United States Patent Application Publication US 2024/0301345 A1 - sequence listing, part 21

SEQ ID NO: 3694 - DNA, 57128 bp, Unknown
  R150_10m  MAG No. k141_3363
agagagccatgaccgaagcatctgccctttcaaaaaatgacaaattcagcgttattgtctacggcttgctgcacgcatgccaccgcacgcctgccacgatgcgtccgcatataaaaagctggctcccctcaggagagggaagccagctgtattacgccgtgcgattgcctcgcttcagcccttacttcgcgagcctggcgtactcgtcaaccatgaactgggcgatcttcttgccgccttcgcccagcagggtgggcagcgagttgatcggcatggagttgaggaacatgcgcatcatggcgttgtcgggcagcttcgtcagctcgccggcctcgctggcggcggccacggcggccacgatcttggcgccgaacggatcggcctcccactcgccgtaggtggaccattcggtgagcggctgggtcttgccgtcgccatcgagggccacggcaacggtgccggcaatgtcgcgggagctcacgcccacttcgatggcatattcgccggcctccacgtgccagtcgttgtatttttcggaccagtaggcgaacgcgcgctcgtcgaggtcgatggtcacggtcttggattcgccggccttgaggaacaccttggtgaagcccctgagctcgtgcttcgggcgggccacgtcggccttgcccggagccacgtacacctgcacggtttcggaggcatccacatcggaggtgttggtcacggtggcggtcacggtggcggtgttcgcgccggtcttggcggcggcgacgtcagcgatctcgaatgtggcgtagctcaggccgtagccgaacgggtagtccacaaccttgccgtaggtgtcgtagtagcggtagccgacgaacacgccctcgccgtagtcgacgtggccttcctcgcccggccagttcagcatgctcgggtcatcgttgatgtccagcggaatcgactgggcgagcttgccggacgggctgacctggccgaagatcacatcggcgagcgccgggccaccggactggccgagcagccaggattcgaggatacccttggcgttcttggcccacggggccacggagaccacggagccgttggacagcacgaccacgacgttctggttcgcggcggcgacctgttcgagcagggcgatctgcttggcgggcatgtcgagggtgtcgcggtcgaagccctcggattccgcggcttccggcaggcccaggaacatgaggaccacgtcggcgttcttggcggtttccacggcttcggattcgagggccgggtcggccggttccagatcgagcgtgaagccgggggcgaagtcggccttgatgccgcgttcggcgagcgtgtcgaggaagctggtcagcttggtgggggtgatatgggaggagccgccgccctggtagcgcggggtgcgggcgaattcgccgatgacggcgatcttccgggccgcggcagggtcggcgttcagcggcagaatcgcatcgtcgttcttgagcaggacgatggattcgatggcggcctggtgggccacttcgtcgtgcgcgtccacgtcgaaacggtagccgtcgatgctcatcgcggcgcgggccttgttgatgaggtcgatcatgccctgggccatgcggtcgagctgggcgggggcgatgcggccatcgcgggcggcgtagacaatctggtcgtcggtgtagctcggcggcatttccaggttgaggccggcgttcagggaggccacgcggtcatggtcggcgccccagtcggacatgacgatgccctcgaagccccattcgtcgcgcagcacgtcggtcagcagccagtgattctgggcggagtgcacgccgttgatacggttgtaggagcacatgatggtccacggctgggcggtcttgacgatgtgttcgaaggccggcaggtagatctcgcgcagggcgcgctggctgatgcgggcatcgacgcgcagacggtcggtctcctggttgttggcggcgaagtgcttgagcgaggtgcccacgcccttggactgcacgccggcgacgatgccgatggcttcatgaccggccaggtacgggtcttcggaccagtattcgaagcagcggccgccgagcgggttgcgcttgatgttgacgccggggcccaggatcacggccaccttctcctggatgcactcctcggccatcgcctcgccgaccttgtggatgagttccgggttccaggagctggacaggccggccgccggcgggaagcaggtggcgggcacggagttgtcgagatcggtctcgccggtgctggaggtcagggacttgcgcaggccgtgggggccgtcggtgatcatgtagccggggatgcctttggcttccacgccctgcaggtgccaggcgtcgccgccggaggtgagggacgccttctcttccagggtcaaatccttgacggacgggtaggtggactcgctcatgttgcctctttccttgagtttcttgagttgtgcggttgtccgatatgcgttggctccgattcggccgggctgcctggctgttgttcgaggttcctccacgaatctcgactgccgttttctctcgaccaaccggttggtaggcagattatcaaaatctacggcacaacacgccgaaatcatttggaatcactactaaccgaccgtaaggttgcctgtatgaacgacccctctcccacagacaccgatcgccgtaccgcaattctcgacgccgccgtcgaatcgtttggcaaacttggctattacggcacgtctctgcaacgcatcgccaccgaagtgggactcaccaaggccggcgtgctgcattacgtgggcagcaaggagggactgctcaagctggcgctgaccgagaaatacgaccggatcaccgaatcgatcaacgccgcgatggtcgcccaggagcgcccgcttatcgcggatatgtggcgtcaggtggtggctgtgaacaacaagaggcccgcgttggtgcatatgttctccacgctgagcgccgaggcgctcgacccggcccaccccgcgcacgattatttcgccgaccgcgagcgccgcacggtcaccacggcgctcaacatcaactgggccgtgccggaaggcgtcaatgtcggacatgtgctgcaggccggattctcgatgatggacggcctccagctgcgctggctgcgcgcccccggccaagatctcaataccatgtgggccgattgcgaggatgttctgatgcctttgcccctttgggagggatatcgctaattggtgcggctgcaggccatccaaccggcgtgccaaacgtgggtgaggtcccatgggtcgagccgtgacgtgtcggattgcgggtcgatggtgggcaggaaagcgcgattgccgcgcagttggtagctccagtagatctgcccggcagatgcgctccacgctttgcgctgcatggcggcgacctcgcgatagacggcattcctcgctgaaggggttcggttcaccagattgttggccacgcaccactcccctacgatcaccggcgtatagcgcgcggcccggcggatgcggcgttcgttccagcgcacgaacaagcgataccagcccatcagccaccgatccggaatcagacggaacagcgagaattgctcggccatgaccagatagatatgcgtatcgagcatgacgcccgcatgccctcccgcacaaaccagtcccgccaacggcccagccggaagccgtcatggaacacaatgacttggtcctcagccagaatcggacgcaaccggcgatatgtctcgcggtaaaaacgcttgagggacgccattggaatcggcccgcttccccgcgcttcaaagctatccttcgcctgcctgctcgatggcgacgtagcatacgtgagccaatcaatcggctcattcagcacttcgatgccgaacagcgccgcacgatcacggtaccgtttggccaaacgagtcagcacatccagcgcataggcgaccgctcgcgggctatgatgccagcgcaccacaccagtgaggccgccgttgtcgaatccgttctgtgagccgggcaccgtgtgcaggtcgataagaatcttgagaccggtatgctcggcccagtcgaacgccctgtccaaatactcgatgcagcccggatgaccggacacatccccgaagataaaatacggcacaggaatacgcaccagattgcagccatgtgcggcaatgttccggaaatcggcctcggtaatatacgtgtcgcgatgccgcgtcagcaaagcctccagctcagccgacttcgtagcccgatgcagccagatctcgtccgcctcgccgctggcggcaaaaatccccggcttcatccaccgctccagcaccagccaattgccgaggttcaccccattaattcgttcgccaacacccagcgcgcccgatgccatacctgtcacgctaatcgttcaatgcttcaccgtagcgagcgaccaacccctgatttgcacgctcaaactcggggatgtaatcagcgatgatggcgtccacaagacgccgagctcgttcttcatcatagatatgagcagaatcattgcgatcgcgtagcatgcgcagccacaacgattcgtccatgaaatcatagtattgaaaagcggttttgagcacatctcgcggagagccggaagcggaaacagggtctccctcataagccagcagcgccttgaacagtttccaaccaagctcgaactgcaacccgaacttgtcaataatgccgctctggatgaaatcattgccgagatcctgttcgggagccttgcgcagcgaattcaatgcggaaacgtaattctcatactttttcatacagcacctttccgctacgctcaatctctgccctcagcgatgaagaaatcggctcatccagattgatgacatcaactttaagcagtgaccacagattgtcctgaaggttctgctccaagcgattgaaatcgggacaaccggccacggcaagatcgatatcgcttttaggccggttcacgccctttgcgcgagaaccgaacagcacgaccttgcgagcgccggcatcagcggcaaacgcgcgaatctggtcgtacacgtgctcgataggaaccatgacacctcccgccgcatccaacagtcccggaccaatcccggaccacccgcgcttccatcatacggccgcgtcccactcaccgcacggagcccgaaccacccgaacgcggcgacgtagttgcgggaggcgggctggcgctgtagggcgtgcgggaagttcctgacgtctacttttcaggaggtgaatcctcatgttcaccacgttttctctggccatcattctcgactgcaccgtacgcattgtgctcggcacggcattgggcgcgctgatagggctcgaacgccagttgcgcgcccgaagtgctcggcgtgcgctgggatgtggagcacatcaccacgtccgactgaaacgtccgactgacgctgaccagcaacatcgcaacagtacaacaagccaacaagtgggatggggcatcgagcctcatcccactttgttattatccggcgattgtcagactcactcacgccacggtgaacgtggtgcgcttcaggtcctcacggcgcgaggagtggccgatgagcagttcgaattcgccgggctcgacgatgcggttggcgtccgggtccacgatcgtgcagttcgccaccgggatctcgaaggtgacggtcttggtctcgccgggttccagtgcgacgcgctggaacgccttcaattcgcggtcggtccagctgtaggaggtcacgatgtcgccgatgtaggcctgcacaatctccacgccggcgcgctcgccggtgttggtgagggtgatttcggcacgtacggtgtcggtttcggcgaatgtgccgtcggcgttgcttgcgccgcccgtaatggtcggttcgccgtatgcgaacgtcgtgtagctcaggccttcgccgaacgcgaacgccggatcctgggtgaggtcggcgtaccggtcgccgtgctggccgcgaatctggttgtagtagactggcagctggcccgcgtggcgcgggaaggtgatcggcagtcggcccgacgggctggtcaggcccaggattatttcggcgatggcctgaccgccgcgcatgcccgggttcggcgcccacaggatggagccggtgccggtttcagggtcgctgacgcgcttggcgaacacgccgtactcccccacgatggaggcgggcaacacctgcggcttggagctgatgagcacggtgaccatcggcttgccggtttcgcgcgagacggcggcgagcgcgtcgagcagggcgttctggccaccgagcagttcgagcgtggcggtggagcaggtttcgccgaccagctggaccacgtcgccgaccacggccacgatcagatcggactggcgggcgttggccacggcttcgtcgatcattgctcgatcgacggcggcggaaacgccgattttcgggcgaggctggccgtccgggtagaactcgccggcagggtcaggcacgaggtcgatgacgttcgcgccgcgcgagtagaccacttcgcaatcgtcggcggtgagctgggtcaggccgtcgagcacggtggtaatcatgcctcgaggctggccatccggcatccaagagacctgaccggagttgccggtccagtcgccgagctggttctgggcgtcgtcggcaagcgggcctaccacagcgatgcgcttggccttgtttgcggcgaacggcagggcgccgtcgttgcgcagcagggcgacggattcgcgggcgagttccaggttggtctgctggtgttcggcggagccgatgaccgccttgatgcgttcggcatccggcaggcgcgggtcttcgaacaggccgaggcggaatttcagggccaggatgcgggctaccgcatcgtcaatcagggattcgtcgagcagaccggtttttacggcttcgatggctccctcatagaactgtggggtggtcatgaccaggtcgttgccggccttgaccgcatcggctgcggcgtgcacgtaatcgggcttgacatgctgttcccataccgagcggccgacgttgtcccagtcggtgatcagcgtgccattgtattgccatgcgccgcgcagcttgtcggtcagcaaccatttgttgaatgtgaccggcacgccttcaatggactcgtaacccagcatgaacgtgccgcaaccttctttggccacgcgctcgaacggcggcaggaaccaggattcgagcttgcggtgggagaggtccgcttcggaggcgtcacggccgccctgggtctcggagtaaccggcgaaatgcttggcgcaggccaggatcgcgttcttcggcagggcctcgccggccttggcgccgccctggtagcctttgaccatggcggaggcgagttcgccgatcagcatcgggtcctcgccaaaggtctcgtccacgcggccccaacgggtgtcgcgggcgatgcacagcaccggggagaacgtccagtgcacgccggtgcaggagacctcttcggcggtggcgcggccagcggccttgaccttgtctggatcccagctgacggccatgccgagctgggaggggaagatcgtggcgccgggccagaaggaatagccgtggatgcagtcgtcgccgatgaccagcgggatgcccagacgcgtcttctcattgacggtcttggcggcacgagataaatcctcggggctggtatgcagaatggatccgacatgcttattcacgatgagatcctcaagatcgccgccgcgggcgtcaagctgcatcatctggccgaccttctcctcaagtgtcatacgggagagcaagtcggcgattcgctcaccagcaggcaaatcaggattcttgtacggtaaggtttcagcagttgcggcaggcgtggtgttgtcggtcatacgaagtcgctttcctcagtgaaatcgaacagctttttaattaccaattggtagtttatctattgacagcatacaacacgcttatgccgcgcgcatcacatacaccaaaacgaccgtatgtatgcgaccccttcgttcgcccgcatacttactgccgccatcaagcacaagcctcagttcaaggcacacagcgaatcagcgatacccgtcccatatcggcgaaggaaatatcgccggctccagatcggcccattcatcgcataagtcaatggccggcccccgtaaccacctcagttgcacaccatccatgatctccagagcatggcgcaacgtgggccggacctcctcaaacgaggtgaattcggaaggcaggttccagttgtatgtcgaatagtatcgccatattgaatcccgacgattggcaaactcgtcatgtaacggatgcgcaggattgaacgattcgacctgcaatatcgagaacagctgaacaagcatggggcgcgtggaattgcaatgtaccaagaacctcagatacgcgggtaatctgaaatcatcgggcactgaaccaggcaggccggaggccatgaagtcttccacactgccaaacgtgttgtaattctcgtgatacatcgcggcaagcaggttatctttgctaggaaaatatcgcaaaactccctgcttggtaacaccgaccgcatcggccacatcctgcacagaagtaccgttgtagccacgctcggaaatcagtcgcacggcggcatcgagaatttcctgccggcgttcccccggcgacttgcgaacacgcttatgctgcaatgaattcccagatgtcatatccgccagtctatccgcattctccccactcccatgcgcaaccacatccaatatccttggccggatatgcaaaacggtgccaaaacaaaacattctgtcatgccttcgacaccgatatcgcgcaatagatttttctgtatatgcttcttcgcttactcctggaacacgtcggggtgcttcagatcgccggggatgtcggacaagaggccctccaatcccaggaattccttccagaagtcgagcggctggccgtacggcgtggcttcgcggccgtgggcctgaatgttggccttggcctcgaacacctcttcctcgctgatgccctcgaagtagctttccaagcggtcgcgatgctcgggcacgtagaacagagaggacacaatctccgtcagacgttcggcacgctcgatcggcaaggaatcccagtggcgaagctcgatgaagttcttcaggcgtacgtcattgaagtgcgtggagatgatgtggttgatctcgtacgggttgagttcgcggtccgggtacacctcccccgcgttctcgcggaaggccgggcgatgcagttccttgggacttgctccagaagccacagcttcaggggtatgggtcaggtcagcgaacatgagcggcgtggacagcacgtcgatggcgtaatcctcccacccatagcgcgggtcgaacaggcccggcagcacattcgtgcgctggaagtcgagataatcccacatgcgctggcgcagcaacggccatgggttcgtctcaccttcgaaatacggggtgttgcggaagaagtacgccagaatcggaccgatgacggtgcccaaccgcagtttttcgatggaatcgcgctcgtccacgtagtcgatgctgacctgggtggaggcggagcaacgcatcatgcaggggccaaactgacccacgcggccgaggtagtcagtcattgcatcgtagcgatccttggggttgaccggcacatccgcaaagctggatttgggctggtaaccgtagttgaccagtcggaagtcgagatcgtcaagaatcggggcgagctcgcgacggaacttggaatacaacgtattcaggtcggacggcttcttcagaatgccgattgaagtctccacctggccgccgggttcgagcgagacggcgacgccggggcgcgcgagccccaccagatggccgttctcccagtattccttctcctcgtcatagtagggtacgagacgtttgagcagcgtttcgatgccgttcggctcgtagtagcttacggcagtgtcgtcgctgttgtgcacgggcaggtgctcgatctccacaccgaagccaccggtgccacgctgggagcgaccgttctcaaagaacttgagtaggctttcgacgtgcttggggttcggcttggcgagcaggtgcgcgtaactgattcggggagtaaccatgctttgtatcgtattcgagccggccggcgcgcgtgcccgaaagcccgcaatacgctatacgaaaaaccgatagcaggctccggcccggtttctcgctctagagactcccctcagtcgctgcgcgacagctcccctcacagaggccgagccgtaaagcggacagcccagtggactgtccgtaggcgagggtgagccgataggcgaaccagcatgtcgcgagcgaagctcgtccttaattgcggacgagccagagcataaatcagtccgcggaggtgaagccctgcggctcgccggcctcggcgaacttggcgttgtgagccttcttggcggcggcgatcatcagcttgatacgattgagctggttcgcctcggaggcacccggatcgtaatcgatggagacgatgttggcttccggatgcaggcggcggatcttgccgaacatgccgcggccggtcacatggttgggcaggcaggcgaacggctgcgcgcagatcacgttcgggcaaccctgttcgatgagttccagaatctcggccgtcagcagccagccttcaccggcctgcacgccgatggaggtgacttcagcagccttcttgaccagttcgggcatcggctcgtcctgcttgaacttgccgttcgatgtggccagcgcggccttgatcggcgcgttgtacaggtcgaggcccttgcgcatcagggcgtaaaccgtcttgttgccgcccatgccgaggttcttctcgttccagtcggtgatgtaggggcgggtggtcatgaattccatgatgccgggcaccacggcctcgcaatcctgggattcgatgacgtcgaccacgtggttgttcgcgtccggctggtacttgacaagaatctcgccgaccacgccgacacgcaccttgcgcgggatgtcgcgcagcggcaatgcatcaaaggatttcacgatctccttggccagcacgttatacggcagatagcccttcttgatgctcggcgccttggctgcggtcttggaatagccgtgatgctcgatggtctcacgcacgatggtgtcccacagctcgtacagcttgttggccgaacctttctccacctcatacgggcgtacgcggtagaggcacttcatgagcaagtcgcccagaatcagcgccttgatggcacggtgcagcaggggcagggtggccttgaagccggggttgtcttcgaggccctgggtagaaatggcgatgaccggaatctgcggatagccggcatcgaccaaagccttgcggatcaggccgaagtagttggtcgcacggcacatgccgccggtctgggtgatggcgagcgctacatggtcgggatcgtatttgccttccagaatcgcgtcgatgagctggccgacgaccatgatggccgggtagcaggcgtcgttgttcacgtatttgaggccggtttccacatcgccacggctcgcgtgcttcaggatgtcgaacttgtacccaccggaacgaatcaccgcttcgaccaaggacatgtggatcgggctcatctgagggccaacaatcgtatagttcttcttcatgtccttgacgaacttctcgcgatgcgcgtatcgggacatggtggcgttgttgtggccggacttcttggcgttcttggcgttcgtcacgccggtggtgccgtccgaagtgccgttcttgctggcgactgcggcctgcaggtcgcgttcggcggcacgcttggaggcggcgcgcatggccttggtgagcttcgggttggcggccatggtgctgtcaagcagaatctggcggccgggggttggcgcggtggagccggtcttgcggaatccggcggacttggggccttgcacggccttggccgcggcggcttcgcgggccttgttggcttcgcgttcctcgacggcggccttgagcgagcgcagtcgaatcttggcggcacccaggttggagacctcgtcaatcttcagcagcgtgtacacgtccgccttgtctgccaggatttcggccacctgatcggtggtgatggcgtcaaggccacagccgaaggaattgagctgcacgagttcgaggcccgggtaggaggccacgaagtgtgcggccgcgtacagacgggagtggtaggcccactggttggtgacgcgcaacggcatcttggtgactgtgcggtctcccacgtggcggaatccggcggcgttcttggagcgcgggtcggcttcgccttccgagaggaattcggtgaggttgagcttctcccccggctgcagttcgcagatggaatcctcggagagcaccaccatgccgagcgagcagatggtttcggggatgccgtggttgatttcggggtcgatgtggtagggacggccggcgagcacgatgcctcggcagttgtgctctttcatataggcgagcgcggtcaaaccttcctgctgcacgtcatgcttgaagaccttgtcttcggcataggcggccttgaccgcggtttcggcctcttcgcgggtcacgttggcccacgcaaactcttcgacgatgcggccaaccatgagctcatggttggcgaggttgaagtacgggtgcatgtagcgcacgccgtcctcacgcagctcaggaacgttggcgccgacgacgagcggatagttggccacaaccgggcagttgtaatgattgtccgtgttgggcacgaggttctcctcgtagctcacgcacgggtagaagatggtcttgatgcccttgttgatcagccacttgatatggccatgcaccagcttggccggatagcagatgttttcggaggcgatggattcgatgccggtctcgaacagctcgtgggagctgcggccggagatcatcaccttgaagcccagcgtggtgagcagcgtgaaccagaacgggtagttctcgtacatattgagggcgcgcggaatgccgatctcgccacgagtggccttcttgtcggtcaaacggcggtaggcgaagcaacgcttgtacttgtagtcgtacaggttcggacggtcggaacgcttcttcttggcatcgccgccgcgttcgcagcggttgccggtcacgaagcgcgagccgtcggagaacgtggtgatggtgagcttgcagtggttctggcacagcttgcacacgtcacgctcggcggtcatgctcatgttgtcgagcgcttcgccggtcagaatggagctggcggtgtgagtcacaccgtccacgacaacgacatgggcttcgggcttggccggctcggtcttcttgaaggctgcggccttgggctcggacttgggtgcgggctcggccttggactgttcctcggacccatcggccttaaccaccacgtccaagtggtcggcctcatcctgatagtgcatgcgggcggtcagggcggcgccaaacgcgcccatgaggccggcgatgttcgggcgggtgacctgacgttcggtgagcagctcgaaggcgcgcagcacggcgtcgttgaggaacgtaccgccctggaccaccacagtgtcgccgagttcgccggaatcacgcaacttgatgaccttgtacagggcgttgcgcaccacggagtagcataggccggcagcgatgtcctcgatggaggcgccttccttctgcgcctgcttgaccgaggagttcatgaacacggtgcagcgcgaaccgaggtccaccggatgggtggaagccagagccttttgggtgaattcctgaatcgtcaggcccatggacatggcgaaggtctgcaggaacgagccgcagccggacgagcaggcttcgttgacggcgatcgagtcgatgacgccgtcagtgatggccagatatttcatatcctggccgccgatgtcgatgacggcggtgacgccggggctgaccatttcagcaccacgatagtgggccatggtctccaccacgccctcgtccaggtgcaggccggtggtgatgaggccttcgccgtaaccggtggcgcaggagcgtgcgatccatgcgccttcgggcagctcggattggatcttcttgacgatgttgatggcggcggtcagcgggctgccttcgttgttggcgtagctggaccagacgatttcacggtcgtcattgacgagcgtggccttgatggtggtggaaccggcgtcgatgcccaggaagtgcgggccatgcgcgccttcgagggtgccgatgtggatgtgttccttgtggtggcgcttgttgaagtcctcgcggtcggcctcggtggggaacagtggcggcatggtgggcgtgttggagggcaggttcttcagctcgtccaaacgcttcaggatttcgtcgcaggtgtgggcttcgaaatggtggccctgatcgtcggaatccatgtcggcctgcaatgccgaaccgtaggccacgtacaggtgggcgtcggtcggcacaatgaactcgtcgaccttgccttcaagggcacgctggaaggcggcgcgtagttcagacatgaagaacagcgggccgccgaggaagatgacggtgccgtgaatcgggcggccggaagccaggccggcaatggtctgcgtggccactgcggtgaagatggaggcggcgagatcaggcttggccgcaccatcgttgatcagcggctgcagatcggttttggcgaacacgccacaacgcgaggcgatcggatacaggttctcgtagctcttggccatctcgttgaggcctgcggcgtcggtgtcaagcagcgtggacatctggtcgatgaacgcgccggtaccgcctgcgcacgaaccattcatacgctgttcgggcgtgggcttcaggtaggtgattttggcgtcctcgccgccgagctcgatgatgacgtcggcctgcgggtattccttgtcgatcgcctcggtttcggcgatgacctcctgaatgaaaggcacatgcagattgtcagcaagcgccagaccgccggaaccggtgatagacaggcgaatcggctcatcgcctcgacctagttccacgagctctttacggatgtcgaccaacaggccggccacggtggcacgcacgttggcgtggtggcgtcggtaatcggagaagagggtgtctttcagggaatcggactgatctagcaccacggccttgacggtggtggacccgatgtccaatcccacacgcaggggcttcgggtgtgaagcgggctttacgctcgcgtcagtgacgatgtcaaccatgtgttcctcttaattccgacttccgggtatgtgcgccttcaggcatcatgagccgtttcgggacggctggcagatacctgcggacggcttcgcccggctacttcttctggaatattagtccgaccacctgcccaacgtgacgccgggcatggtgatttcgctcacgggaagggcgttccccaacagttccgacgatattgctgagtgcggcattccggacctgctactacgaggcctgttggccttcgccggcttcgcggtctctcaaatagatttcggggatatctcgttcttgatcgtggagcttggcccagatgaccggttcgccggcttctagggacttggacacatcgaggatgcgctggtttctggagccacggaattgcagcagcgagtccttctggtctttgaggtagcggccgtcgacgaggatgtcgataagatgcagcaattcaagcttgtctggtgtttctccgaggcgcatgagctcttcccatgtgtagccggtccacgaccagatatctttggtatggccgaattcctggcggatacgttgtgcgagcggcaccagcacgggagtgttgaggaatggctcgccgccaaggaacgtaatgccttgcacccatggcgctttcaggtcttcgatgatcttgtcttcaagtttttgcgtgtattcgtggcctgcttggaagtcccagatggaggcgttgaagcagtcgacgcagtggaaggggcacccggagacgtaaagggagttgcgcacgccttctccgtcggtgacgatgaaggttttgtagtcggcgatcatccgcttggacatgcgccggccatcccattgaccggctttcggatcgttggcaagaccgttggagggtacggaggggccacgcccggtctcgctggccgcaaagtcatggcgcttgggttcgggcttggtcgtatgcaactccggcatgattccctccttgcggaaagcattaactcccctctttgagggggagctgtcgtcgtaggcgactgaggggagcttcggaatagctcttcggactcccctcagtcagctttgctgacagctcccctcagagaggggagcctactcacgaataaccctacttggcctcttcgaaccactcgcgggtggtgccgtcatccagcgtcacacgaccggtttcgccgctcatgtgcttgactcggtgggcgatctcctcgtgacggccgtgcaccatcgggcgctggaccgggctgccgaggtagccgcaggtgcgcttggtgacgttgcacttgtccgggttggagttaccgcactccgggcacttgaagccttcctcggtcggctcgaagtcgccctggaagccgcacacgaagcagtggtcgatcggggtgttggtgcccaggtagccgatgccgatgttgtaggcgtaatcccacacggcttcgagcgccttcgggttgtcctgcaggcacgggtactcgcagtagttgatgaagccgccggaagcgtagtacgggaagtccttctcgtagctgagcttctccatcggggtgggctgcaaccacaccgggtagtggaaggagttggtgtagaagtcgtggtcagtcacgccttcgatacggccgaacttttcacggtccatgcggttgaagcggtcggtcagggattcagccggagtggagtacacggaatagtggtagccctccgctttgctccactgcttgcacagctcgttcatgcgcttgacgatggacagcgcgaactccttgccttccggatcccagccgtggtcgcgaatccagttcttgccgtagaagaccgcggtggtctcggcaaggccgatgtagccgagcgacacggtggcacgctcgttcttgaacagctggtccacgttgtcgttggcaccgagacgaccgaacgcaccgaagcggaacagggtcggggcgttgaccggggtggcttccttgcagcgcatgatgcggaactggagggcctgatgggcgacttccatacgctcctcgaacagcttccagaagcgagccttgtcaccgtgggattcgatggcgatacgcggcacattgacggtgaccacgccgaggttcatacggccatcctcctcgtccttgccggtctccgggttgatccaaccctgcaggaaggagcggcaacccatcggagccttgaaggagcctgtgatcttgacgatgttctcgtagaacaccacatccgggtacatgcgcttggtggcggactcgagggcgagctgcttcagatcgtagttcgggtcacccgggtcggcgttcacgccgtgcttcacagtaaagacgagcttcgggaagatggcggtgtggtgttccttgccgaggccgcgaatacggttcagcaggattgcgcgctgcacttcacgagagaaccagtcggtgccgagaccaaagccgacagtcacgaacggggtctggccgttggacacacggttggagttgatctggtattccatggtctgcatggcatcatagatggccttgcgggtacgaatcttggcgaggatttcacgctcctgctcaagttcgtcaacgtcggtgtggaacggggtgtccatcggcagcggttcacgggaaccgaaatgcagcttggcgggctcgttcctcttggcgctctcgacctgacgacgggcgaattcaaccggcatgccgtcggggatggtctcacgagcttcctcaaggaacttctcgtaatccttcttggcatactgggcaagatgctcgtcggcacggttggcggtctggccaccatactggctggaggccacgtccttcatgatctgggtaatctgggtggccgcaatggcgatggacttcggggaagccatcggagcgttgccaagagtgaagccattggccaacatgtcccagaagttcggcaaagagcagttggactgggcagtgaacggcgagtagtcggcatcgtggaagtgaatatcgcccttcatgtgggcgttggacaccgccggcggcagcatgttgaacgcggcggccttggacacggcaccggccagcagatcacgctgggtggagtagacgttggaatccttgttcgcgttctcgtgaatcagggtcgggtcatgattaatgaagcgagcaacggcctcgttcacatcagtggccttggcgcgctgaatgtctttgtcgagacggtagttggtgtaggcgcgagccacgtcgtacaggtgggcgtcaatgagggcgtgctccacgaggttctggatgtcctcgatcttggcggggccggcgtaacgccccttgatttcgccttcgacttggttggcgaaaccacggatcatggcatcttcttcggggccgacttccttgttcaggtcaccgaaagcagacttgaccgcagagatgatgttaatggggtcgaagtcgaccacacgaccatcacgcttctcaacgagcacggtggaggccttggcggccaccttggtctcgttatcggtgacgatttcctccaacacctgtgcgcccatcgggcacccctttcctataaggcgaacactctcctgagttccgcattttggccgcactcgacgtgggccacacgaaattacattgatgtcgttttttgaacctctagaagaatacggcatctccaccactatatctagtgctcaacagtggtgtgtcgaactatttatagggttttcggctattttccgccaaaaccacaagtgtgtgattagcgtaactgttttctgctcgcgtgtcgcacagcgagctcactaacgactctcaatcgtcagcgcaacgcatatctcactcctcttcatagcacccgtttcttcgccataatgactcctttcttctgatgcaccagaccatctccatcatcggctgatacatcgcttcgtacggttctcgcattcatcatcacaccgttttcaggcgacggtaaatatttaccgtcatcaaccaacgcacttatagtggagtgcatgactactgcaatgggctacccatctaccggccgtccaccgaccgccgcttcactggcctcggctggctttgagccgggtcaaggcactttcgcgcctgatcagggcaccatcaatctgccgaatgagcctcgccctatcgatcagctgcctgcacgcgccgctgaaaccagcgcgcaaaatccgtggccggtaagtgtgctgagccagaagttctacggtgccgtggaacgatggccgtccgcgtgggtcaccggccagatcacgcagatcaatacccgtcgcgccggctcggcctacatcacgctgcgcgacgacttcgaggatatcgccatggaggtcaatggcttcggcaggttcgcggccgcggccagccagttcgttcagggcgaccgcgtggtgattcatggcaaaccgaacctgtggatgaagcgcacttcgctgtcgttgcgcggggacacgattctcaaggtcggagccggtggcagcctcaaggccatgatcgacgaattgcgcaagcagcttaagggcgagggcctgttcgatgccgatcacaaactgcctctcccggagtttccgaagactattggcctgatttgcgcacctcaggcacgcgcggaaggcgatgtgatcaccaatgtgaaccttcgttggccttccgtaaccttcaaggtggtccatgtgcatgttcagggcgagcaatgcccggccgaagtggttcaggccattgcacaactcgatgccgacccgagcgtggatgtgatcatcgtggcccgtggcggcggctcgtttgaggatctcatcggtttctcggatgagcgtgtggttcgtgcggcgtatgcctgcaccacaccattaatctcctccatcgggcatgaggatgactggacgttgctggatctggtcgccgatcttagagcctccacccccaccgatgcggccaagcgcgtggtgccggatgtgcgtgagcagtcgcagctcatcgaaggtgccatcgaccgtatgcgactgcgggtccgttcgcgcgtggagaacgagattcgacttatcgagggatatgcgaaccggccaagcctgacccaaccgcataccatgctcgaaccgcatcagcggctgatcgacgattccctgcagcggcttgacatcggcctgcgacgcatcgtggatgatgcccagctcaccgtcgaacgcgcccatgcctcactgaccgcactcagcccgcaatccacattgaatcgaggctatgcggtggtgcagtcctccgatggccatgtgctggatgacgcttcgcgggtcagtaccggggatgacatcaccgtcaccctgaaaaagggcgtcattaccgccaccgccacatccgcaaccgcaaccgcgtaatgcaccatatgcattcacgcatatataccgtatatataaggagaacaagatgaccgagaacaccacacccaccgacaagaacacccccgcctcgtccctgacggacaaggaacgcgagctcatcgcccagatgccatatgaggaggcgcgcgacaagctgattcaggctgtccaggcactggaaaccggcggcctcaatcttgaccagtcgatgcgtcaatgggaaatcggcgaggccttggccaagcgcgcccagggcctgctcaacgacgtacgagccaagctcgaccaggcacaagccgagcaagccgccaacgaagccaccgcaggcacgcagtccaacctcgactgagttgcctcccggcgcgacatcatcgtgcaagcttgcggatgatgccgatgcgctcctgcatggcggagcagatggcgtcaatcacatcagcggacagccggcggttggtggcgagctgtgcccgtatcagttcaggcacctcgtcgagcatccccaaatcataacggtcccaatcgtcgataagtcccaactgccagtaggcgttgtccgcatcgccgtagtcgtcgacccagaacggcttcgccgggtagtcttcgttggtgatggcttcggggtccatgccgttccacaggctggcgccgctgtcaaaaatcggggccgggcgaatctcgaatgattcgacgtcacggatgagaccgaagttgttgtaatgccggtcggtgttgcgcagaagaaaatcaaggaacagaaaatcgttggtcgccgcatttgccgtatcatgacttacgccgagttgctgacatgcgtccagccatatcatcttgcgttcggtgttgtcgccgcgtcggaagatgcgcataacctgccctgcgggaatcagctcttgcgtgtcttcgagcatttcatcgcagacggagacccggatgcccttggcgcggccgatgcggtattcgacatggtcgatgccgaacagtcgtgccgtatgccaggcgatgcgctcgttgtccggctcctgaccggtgcgccctcccttgatcaggctgcggacgccatcgggaccgataatccaacgtttcggcaggtcaccggcactggtgacatccggggtgttcacgttgccgatgcgcgacgaattaccgaagaataaggcctgcccaagtcgttcgtcaaaatcgttgtggaaaaagttcagtttttcccacgtcagatcgggccggtcgagaggccgcacccaatactggtccgacaggctgagtcccaaggaacggtccagcagatcgttcgtcgaagcgatacccgaaccggcaaatacggaacgcataccgtcacgggtcatgggaatgccgcgagaacgccaccacccggtaatcgactcaccggtgggctcaggtttgccgtccacatacatgccgatcgggattcgggactcgtcgtagatctcccctgccctcagggcgtatccgccgcgttcgaaatactcgaactccattaccggatgggtacggcacatcagcatgcggttcatggtcatgtgcgcctcccgttattcagtccaccgacgatatccgcgtcatatcccatcctatccgctttaggactcgtatatgcggcccactgaagcttcagcgccaaatcatcagtcagcatcctttcccgcgtcaattactcatccgcggcatcccgcggctcgcatctgaatccggactggactgagttctgcttcccggcatacgatagtggtgattaggccacattggtagcagttatagaagggaaatcccatgtcaacgctgattcttgtattccatccgcacctgaaggacggctcgcgagtgaacgcccgtctgcttgccgaactcgccgcacaaggcgaggacgacatcatcgtacgcgacgaatacgccgaatatccgaacttctccgtcaacgccgacaaggagcacgagctactggaggccgccgaccgcgtaatcctccagttcccgttctactggtactcctcccccgcgctgctcaaggaatgggaagacgaggtcatcaccgcaggctgggcctacggtggaggccacgcactcaagggcaaggagctcaagctggtggtcaccactggttccgacgccgccaagtaccgcaaggatggcgagtacagccgcaccatggaggagctgctgagcccgtttgaggtcgtggcgtacaagatcggcatgaactatgctgagccgttcctggtgcagggcaccgccaccatcggcgatgcggagctggatcaggccgccgccgattatgtttcggcgattttggactgaataagctgaggccgggtgcaagtcgcacccggccttgttgtttcgcgggctagccgcggtctctcccagtcagcctgcggctgacagctccctcgtcagagagagcttattttttggatcagagggagttgatagctacttcttcaacggcacgtagatcacgtcgtcaatgagctcgcgatagtgctcaacgatttgcgcgcgacgggtcttcaggctcggggtcagcatgccgttggcctcggtgaattcgtctggcagaatctcgaacttacgaatcgactcggcgcgggaaacgccctcgttggcggcgttcaccgcacgctctacctcggcatgaacgatggcgttcttggccagcgaggccagatcgggttccggtttggcgccttgggattccaaccagttgttggcatccgccagatccagcgtgaccagagcggccacgaacggcttcttatcgccaataaccaagcactggttgaccacgggcgaggtcatcacggaagcctcaagcagacccggcgacacgttcttgccgccggcggtgatgatgaggtccttcttacggccagtgatggaaatgaatccgtcttcggagatatcgcccaaatcaccggtgtgcagccagccatcggtgatctgctgggtggtgacctcagggttgttgtggtaccccttgcacaccagcggtcccttgatcaccagctcgccatcctcggcgatgccggcggtgatgccgcacatcggcatgccgatggtgccgatgcgattgtcttccggcaagctcacgcacaccggaccacaggtttccgtcatgccgtagccttccagcaccggcatgccgatgccgttgaagaagtgggagagctcggaatccatcggggctccaccggtgacggcaaagtcggcgttcgggccaaagatggtacgaatcttcttgtacaccacctgctcgtagaaagcgtgagcaatacgaccgggaagcggcagcttctcgcccttctgctcggccttggaccattcgcgcgcgttttcggcggcgcgcatgaacatcttgcccgcaaaaccgctgccggcacgctgggaggcggcgttgtagaccttttcgtacacacgcggcacggcaagcagcagcgtggggccgaaggtctcgaagtccttgaccatggtcttcatattggagctcagggccagagaaatggtgccgccaaaactgaagaattccaggaatcgggcgaacacatggctcaggggcaggaacagcagcagacggcggttgggccatgcgccggcacgaggcatgtactgcaggccggagcgcaccaggaacgcgaagttgcggtgggtgagctccacgcctttcggggtgccggtggagccggacgtgtaaacgatggtggcgcggtcgtcgccgtgggaggcgctcttgtattcccagaattcggcatcggtgacgctttcgccataggtcttgatggcgttcaggccgcctgcttcgatgacgaacacgttgcgcagggtgggcacctcgctgcgcacggattcaatcttgtcgcgctgaccgtcatcctcggcgatggcgagcgtgaccttggaatcgttgaaaatccagctgacctggctggcggagttggtctcatataccggcacggtgagtgcgccgatggacatgatcgccatatccagagcggtccactcccaacgcgtgcgagacacgatggccacggagtcgcccttgttgacgcccagaccaatcaggcctttggccagatcgatgaccatgtcgcggaagacctgggtgctgtacggctgccaggtgccatcctcagttttatattcgatcatggcgccatcgggatcgcgcttggctcgctcatcgagcaaatcgaacaggttgatgtcgctgtcaatcggctccttgacgggattggtgaactgcttgacgatacgagtatcgtttatggccttatcagcgatgttttcagtcatactccccatgtaactccacggatgctacaaaacacgcgcgaaacaacggattgtccagaccaaatggccccggcaatccgttatttcgggcaaaccaggtaaatctgtcgcaccgtacattcagcagattactcggcggagtcattggcctttttcagctcgtcgcgaatctcctgcagcgtggcgagagtctgctcttcaacgctaggcccctgttcttcagcgtcagcctcatcctgggcagcagtgagatcacgaagcttattaatcggcaaaatcacacagaaatacaccgccacgccaacaagcaggaagctaatcagcgcgttaagaatcgcaccaaatgaaacagtcgagttgttgaacgtgatggtcagcagtccggaaagatccggtacgccgccaatcatgccgattaatggactgatgagattgtcgacgatggaattgaccacagcggtaacggcagagcccatcaccacacctaccgccatatcaatcatcgatccgcgcgacaggaatttcttaaagccattcaacggacctttatcggtcaaagcaacaactttgcgagcggttcctcccgtggccttggcaaagtcggtggcaatattcatgggattgtggttactcataacggcactccttacgaaattcagacacttcacttgtatccgactggttttcccacgactccattatgccgcttgttggaatatccctataccactgcggcgttcccgtacatgactatgtacgagaacgccgccacccctgtttgctgagaacctgttagagctgcttagaactgaatgtaatcgacttccgtatgttcgccggtttccaagtatttcgccacatcatcaggaccgacgaacaccagttcgaccgcttgcgcaatcatcagattgacacgatccattggcgtaaggttttcgaaatagccgtacaccgggattcccagcgcatgcgcatatccgatttcgaacatcgtgcccgggtcctcgtccataagattggcgaccacggctttagcagcattaatgccatggatatcgtccgcaaagcatccttcagggcctacttcttcgatctggctgacaaaccgcggcttgaacagtaccttgccatggtcttccaatatcttttccaaacgttccatacttgacgtttgttcaggatcaaagaacggaccggccacatagaagtcatactgtttgtcttcactcatggtctctagtcatagcgcagcaacgtcggacgccagccgttattttcactgtatggacaaggggtcgtatcgtgaacattactacgggataaccgtcaatgactacgtacgttgcccccgatcagcacactccgccactttcgccccctcccgtatcgtcgagcacgcgaaccaagccgaccaaatagccgccatcccatgcgctgattaccgtatccgaatgctgcaatgccttgaacaaccgttcgggccactgcgccgattcccaaccaaccgacttgaacagcgcctcaacctgttcgacagtaaaccgcttctcttccgtgtattcgatagccatggaccctcacgataaccgtgaagccccacatgtctttgcatagtttcacatgacgggatgatggatggtggaacctatacgtttacacatgcctaatgcctatggctcatcaccgatgaatagaggctgagataccgtcatgtttccgaagccaagtgcccgagatcggattcgaaccgacgacacccgctttaggagagcggtgctctatccactgagctactcgggcaacgacgtttcattgtacacggccgcacgcccagtcgcatcatgttcgcgtggcagcctacataagacgcatggcagtctgtgtaagctacctggcagaacccgccaccaaggcatggccggttttcgtgctggtttggtgcgaactgctcttgcgcacggcgaaaagacaccgaaagacaagccgcacacggtacagtggcaaatcgcacgaaaagcaaggtaacagtaaacaagccggaggaaagggcagcatggcaaaggcacgaagtactaccacaggtgcaagcgtacgagctcgcgccgctgccaagccacgctctgccaaagccacggcacgcccagtatccaagtctgccgtgaagccacacaaacggcatcgtctgcttggttttctcgccacgatgttcgcgcttcttgctcttgccggcactgccgcccgcgcgctgcctgccgatttacaggaactgccatttgtgccgattgtggtatcggcaacgccctggttcacgttgcttggcctgattgccctactgttggccatcgtgtcgcggcgtatccttgccgcactaatcgccatcgccgcaatcgcatgcaatggctattggcaatatccgttcttctactcgaccgacccgctcccccaagccgcgcagaacgccgtggctgcggcctcccccaacaccagcgatgcctacgcgcgcgtcatgaccttcaatgtatacaaggggcaggccgacccacaagccatcgtcgaactagtccgcgatcagcgcgtcgaagtgctcgctttgcaggagaccaccgaggatttcgtcaaaaaactcaacgaggctggcattgagcactatctgccgtatgcgcaggtctcatcgtctgacggcgtattcggtaacggcctctggtcggccacgccacttgccgatccggccgacgatgacgtgaattccagcgcctcattcatgcccggcggcacggtggatatgggtggtcagcagattcgattcgtatccgtgcacaccaccgctcccgtacccggctattggcggcagtggaagcgatcgctggatgagttgggtccgatgcgcgggcatacggatacacggtatattttcatgggcgatttcaatgccacttacgatcacacgccattccgtgattttcttggcgaccggttcgtggatgccgcacgtgaatccggacatgggtttacgttttcgtggcctacgaaccgcgtgtatatgccgatgttcgccggtattgaccacgtggtgcttgatcagggcatgaaggccgggcaatgcaaggtggtcaaagtcgagggctccgatcatgcggcgttgttggctaccgtggcggttgggtgatttcgtattcctcggccagccgcatacactgggacacggcttccagaatcgcctcgatgccggacttcttgattgagccgtcatcctttaaatacttcatcaggcgcactgtggatttggtgctggcctcggggtcagggcgagcgccgggagcggcgtcgacgataagcatgtggatagtgttcgaaccgatatcaagcacaccaagtcgcgtggtgcgcgaacgcagattgaccatgatccctattcccgaccttacccaacccgtgatggccgaacaacgggccgaccatcgcaatcagccagccgtgcgccaccatggcgagtcgttcggccggcaaccaacaccgcgaggccagccgaacatcacacaaactcgactactgtacaacaatcacaccggctaccgcgccgttcacaacgattcgacgaacgttccgagacgttccagcccctcggtcagggcctcacgtgaggcggcatagctcaggcgcacatgcgtatccgctgtggccgcaccgaagtcgcggccaggagtcagagccacatgggcttcatccagcgcgcgttcgcagaacgtccaggcatccagaccagtacgggagatgttgaagtaggcgtagaacgcgccattcggctccacctcaaccggcaaaccgatgcgcttgagcccgtcaatcacaatgcggcgacgggcaagcaattcctgacgacgagcttcacattcggccaaactctccggcgtaaaacaggcgagcgccgcatgctgggtgggcgtgtgggcgcacaggtagtagttggtggccaggtcgtcgaccgcttccagcacggtggggtcgtcgggcagaatagcccagccgagacgccagccggtcatgccgaagaacttggagaagctgttgcacacgatggcaccgggatcgcaggccagtacggacttgacttcggtgccgtccggctcacggtcggccaaatcaaggtaggtttcgtccacgatgcgccatgcgccgcggctggcggccagcttgcacacctcgtccaatacgttgaagtcgatggtggtgccggtggggttggacggcgacgtgatcattacggccttggtcttgcttgtccagtactggctgcacaggtcggcggtcaggtggaagcgggtggcggccgaggtcggaacgtcgatgacccgcccctcaaaggagcgcacaagttcgcggttgcacgggtaggaggggtcggccacaatcacatcgtcaccggggtccacggtcagcgcggtggccaacagcagggcggccgaaccgccggcggtcacgcagatacgcttggggtcgatgtcaaggtcatgacgctcgcggtagaagtcggcgatggcttggcgcagttcaggtaggcccatggcggcggtgtacggcagggcccggccgtcgtactgttcgcgcatggcgtcgcgtacggcgggcggcgcgccgaaatcgggctcgccaaggcttaatttgatgacgctgataccttgggcgatcatcttgtctgcttgttcgccgaataccatggcacggaagggattggcctcacgcgctcggcgggacatgactggagacgcggccggagattggggctgctgcgctgcttcgttttccatatttcggttctatccgcctcacgggacaaggtttcttcttctataatcactgtaggtcgattgagtgtccaacccgtattcaaggaggaataatgagtcgattcaatggcaaacgcgccgagttcgaggccagcggcgaaaagatcaacgtcgcgattctgggtgcgggccgcatagctcacaccatggccgacaccctgacccagatggctgaaggttcactgtattcctcatggattcacccgtatgcggtagcggcccgtgatattacgcgcgcgcaggcttttgccgaccaatggcattttgacaaggcttatggatcgtatgaggagttgacggcggacccggatgtggatctggtgtatatcgccaccccgcacagtctgcacgccgaacaggcgatcctgtgtatgaaagccggcaagaacgtgctggtggagaagtcgttcaccgcgaacgccgggcaggcacgtgaggcgctggccgtggccgaggaaaccggcatgctgtgcacggaggccatctggacgcgctacatgcccagccgcaagctcatcaacgaagttatcgagtccggcgagatcggcgaggtgaaagcggcgagcgccaacctgtgctatccggtgtccggcaaggcacgtatgaccgatccggcctgtgccggtggcgcgctgctcgatgtgggcgtgtatccgctgaacttcctggatatggcgatcggtgccgaccatggccgcacgctggatcatttcgatacgtcgatgatggccgccgaaaccggtgtggatgcacagaattccaccacgttgtattacgatgatggcacgatggccgtgtccaccagttcgatgctggtttcctccgatcgcggcggctacgtgtggggcaccgaagggtatttggtggtcaccaatatcaacaatcccgagtccatcgatatctacaacaacgatcacaagcccgtgcgcagtgttgcggtgccgtcgcagttgaccggttatgagtatgaggtggccgatgcagccaacgcgctgctggatggcaagatcgaatgcgaggcgatgccgcacgccgacaccatccgcatcatggagctgatggatgcgattcgcgaccgttggggcctgaagttcccgtttgaggtctgatttcagctcccctccagaggggagctgaaattattccgctgaatctgcatctccttcaacaatctgctcatacagccgtgcgaggcgttcgtcacgcacggctttcgttaattcgcactcccatacggtaattacacgccagccggcggcctccagttcagcccgctgcgcgatgtctcgattgtgattgcgcagtagcttcgtctgccagaattccacattcgatttcggcatcgaatgtttggaacagccttcatgcatgtgccagaaacagccgttgatgaacacgatggtgtggtatttcggcagtactacatccgggtggccggggtaacgcttgtcgttcttgcggaatcgcaaacccttgcgaaacagatagctgcgtaccagcacctcgattttggtgtctttgccacgaatatgcgacatcgtgtacgaacgggtgccccgctcatacttctccactggctgtttcttgcgattcacgcactccagactaccgtgacgttgcggcgaggatgaaagcctgaacgaacaatcacccatcttgcccgtccgtgtctcttatcgcgggcaatgatcatctgccggtcgagactgcacgattagaccgaatcaaatggatgacatgatgattcgtagggccacggcggccgatattccccaaatcgacgaactgctgcggcaggtgctcgaagtgcatcatgccggccgaccggatctgttcaaaggcggtgtcaagaaatacacggacgaggaattgaaggcgattctggccaacgatcagacccctgtgttcgtggcggttgcgccatctgccaatgacggcactgacgtcgaacataacgccgactcccccgccaccgaccaagtgcaatggcatagcgccaagcgacgtctgctttgcgagatttgcgagagatgaatgcgataccagcgttcatggctatactccttaatccaatatcaatggatgaacctgccctgccccgtatgtcaccatcataatatatcgaatatcaatataaaaatatcgaaaatcactttcaccattcacccacacacatcgcgacgtgatcgaccgttcttgccttgctcgcagcatccacgaccaacacgggaaagtcactttaaaaaagcactttatcaatgtggataactcggaagctagaaccacatacccccgttcagcttgccaatcagaaacctcatcccataccgtcagatgcacccgcacgcaacgacgcgtcagacaacagaaagaaggaccaatgaacatctctacgtttacccacaactcccacccggcaattcggcatacgcattttgtctagtgcgagattgagagttatgatgacacgaagaaaactcatcatcaagaaacttcggcaagcggcaaagcagcgagggctcgatttctatttgttacggcaaggcagcagacatgaggtttactgcctggacgggttgaggatacccatcccccgccataatgaagtctcagaacgaaccacgctggatatcatcaacgagagcgagcagaaactcggaaaggggtggtggcaatgagcaactatgacgtgcttgtgcaacccgatggccgatattggtacgttcaggtaccagctatcgaacggtcgacccaggccaaaggacttgacgatatcgagccaatggctaaagatctcatcactgtcatgaacgacgacgacaatccggagctcaaggtgacgtttgtgttgccgaaacaagccaaacaacacgtaacagaaatgttccggcagcgcgaaatagcaaaaaaagccaacgcacaagcggctgccgaatcccgactcgccgcacgggccctacgcaacgagggactcacgtatcgacaaatcggagctttattgggggtctcctaccaacgagcatttcaattggtcaacggcaaaacaaagcacaaaacgacagcgtccgaatcgcctcagccaacaactgaatcacgctccccacgcacgcaccatgccacaccgctatcgactccggtctcggcttagcgaacgggtccacaaagcccagactgtttccatcaccaagctcaagagcaccgagcaggatcttctcatcccagcagattgaggagatcgtccttggtgagggtggcgatggaggcgggggcttcggtgagggcgctggcaccggtgccagcttcgtcggcaagcaaggaagcatcggtgaactggcgggcgagctcgctcttggtatgctgaagctccaagatgcgttcttcgatggtgtccttggccaccacctgatacacgttgacgtcttcggtctggccgatacgatgtgctcggtcggtggcctgatcctgcgcggcagcgttccaccatggatcggcgtggatgaccacgctggcaccggtcaggttcagtccggtgttgccggccttcaatgaaatcaggaaggcgggcgtatcgtccgcattgaactggtcgacgagttcgagacgcttctttttaggcgtggatccggtgatggtgtagtagcgtagtccttgcgcgtcgaaacgttcggcgatcagatcaaggaagctggtgaactgggagaagatcagcgccttcttgccttcattcacgcaggtttccaccagttcggtgatggcggcaagcttggccgactgatccttggcatcggcatacagcagtcttggatcacagcagatctggcgcaacttggtcagctcggcgaggatgcgaatcttcgacatgttgaaatcggcttcttcgctgtgttcgagctgcattctgagccgctgctcgtgggccgcatacagtttgcgctgttcgccggcaagctgcacggtcagcgtggtctccaacttgtccggcaaatcggtcagcacttgggacttcaacctgcgcttgatgaacacgcccaccaacgactgcaattggcgagacacccgggcggcctcaggattgacctgtgcggcggcccgaccttcggccgtgctgccatctgcagcccgggcgttggagatgggcaactcgtagcgctcatggaatcgcttgtatgagcccaatagtcccggcatcaggaagtcgaagatgctccacagttcggagagtcggttctcgatcggcgtgccggtcaaggcgaaacgatggtcggcggccacggccttgaccgctttggctatcttcgtggtgtgattcttgatgtactgggcttcatccagcgccatgacattgaaacgttgctcattggcggtgtaatcatcgacatcccggcgcagcaggtcgtatgaggtgatgagcacggtgggttcatccgcccggaacgcgcggccgatggcggtgcggcgctcggctttggtaccggccaccaccacggcgttgaagctcggggcgaacttggcgaattcggcaccccagttgtacaccaaggacgccgggcacacgatcaatgatggatgcggcccgccatcttcggaatcgaaagtaatatgaccggttacggctgattcactattaacagcattaccggcatccatgccttgagcggtcggcatgccactagattcgttgtggtatcgcgacagcaacagggcgataagctgcacggatttgcccaaacccatctcgtcggccaaaatgccgccaaaacccttgtcgcacaacgtgttcagccattggaagccttcgacctgataagggcgcagaatatgcttgagactatccggcacttcatacgacttagggtcgatgatcttgagatcgtcgatgtattcggtgaacgaagcgtccttgactacatcggagccgtcatccggcagctcaccatccagtaggaatgctcgaccgcccggcaactcgatcagcccagagttgagctgctgctcgctcagatcaaggtcgctggccaatcggtccaacgtgctgagattcgcgccgctgagtttgaccagcgtgccgtccttcaaatgatggaatcgttgacgccgacgatacgaagacagcaaggcacccacttcgtccggcggtacttcatcagcgaggggtgatatctccaccaaattgcctttgatggacaatccgactttgacgcttggcggcttgggcgcgatcagccggtcaaaagccggtgtggtgaagacctcccctacttccttcagtgcgggcaatccctcgtcaaaaagacgaacaatctgcgtggtgtcatcgcgatcgatagtggccgcatcagacacgaattgtttggcggtctttcgcgcggccggcgttcggaacccattcaccgtctgatgagtggcggccgcaacgcgcttgcgctggtcaggcatggtaaagaattcacgcactacatcaatcgcaagatgctcagcgtcgaaatcacgcccaatcacgccccgagacaaggggatggaacgctcatccctagcatgcaccgtcgggccatcgggtagcaacgggacaatggcatcgccgtagtgtgccttgacctcgcattgcacaccatgctcatcacgatccagataaaactggaggctgcattccgtaggacttaattcagccagctcgcgaggaatctcactggcctccaacagtccggcaccaaccagctgaggcaatagcgtgcgtgcgaacagggcgatgtcatcaccggcaatgacctgcccctcgccatcgggttcaaacaggtctcccaatagtcctcgcaacggaatcaatcgtttcgggcaacggacgaatcggcatcccgctgcgcttttacgctgagagcccgccatcatggcggataccgcaccggccggattagtggaggcgagcaacagccatacatccttgccaccatcaatcacggtttccaccgccggcactccggcaagcaggtatccggcatccggaccatacgtattgaaatcacgccgcgcaatgcgcataagaaaatctggctcgccaccatcaaccggcaccgatgcaggctgcccggagaaccatgtgttcaacacgagctgtacgcctctgccctcacgtacggacagcaaccgggccacttccggtgctgaaagtgtcaggtgacgatcgatggcgatatgcccgtaataccggtcctgctgctcggccgcacgacgcacggccatcgcgtcgtcaaggaagcccagcagtgggcgcgaatcatcgtcgaacatatccggcgtatgggtaaaggcaagcttctgcccataatccgtatagtcgccgttcgccatggtaagcacaaattgcggaatcgatttcagtacatagctggacccattggaagtcgatccgatcttgaactccacgctccacacgccatcgatgaaactcaatatcggaacaagctgcacctgccccaagcccacagtctcactatcgccctgatacccgccgcctcgggtgccggcacgagagccgtatccgctattcgtacgtcgtccacctgcgccatttcgtctttttgcagtatcgaatcggcgcatgagcgcattgcggcgacgcgctttggcttgagcatcttgcctatcgacgtgctccatatagtcgatcagcgtccgagacggcctcacagccccggcacggtacccttcaaaacgctgcggatcatcgcagaatatgaaggcgagcgcaatcatgtgcttgcacatgccatagccacggccgtaagccgggcatgagcacttgccaccgacggcttctcccgtatcgaggtcgaattgcacgctggtacgatacctactcgatgggctggtggtgccacgtagaataccgtcaagctcggcatacccggttcgatgattttcgctgtataccggattgataaccatggtggccgctttgcgcgcaatgctacgggcacgagcgagcacggtattcgacgatgacgattccacatcgttgcgtaacgcaaggatagggacggcatgggcttcggcacgcttcgcagacccggcgaaatggccttcgtcctcatcgtcgaaccatacggaacgtccttgcctgaaacgatagggcatcaccgcatcggcggcggacaaactgtccgttccgccaaacgttacggctctactgccggcagcgcctgtgcccccaagcattccacctgcctcgccagagataccgactataccgctgctcttgccggcaaagaggcccctgtcctcattagtgccatctgtgtcatctgcgccataccgatcatcgtcgtaatcggcaccttcgtcgcctccccttttccaaggattgcgacggcgcaacgcatggccccaggaaacgccggaatcatcatcctcataaggcaggaggtcatcgtcatccgcattatcgggaacatggccaaatacaccataccctttgctcatgggcgagcctcctttccagcgaatgcatttcagtccaacacttctatcctagacgaggcgcgcggtagccttaatgtatggatgcagacaagccggcgcaacgcaaatcctatgcagggaacaccaccctcgaaatcttcgaggtgctgtggcgtcacagctactttggacatggcctgaccgtgcggcaaatactcgatgaacttgcccgtaaacaccagctggaagatccaagcgagctgccgaccgagaaaaccatacgaaatcagctcaaaaagcttaccgccacggaatttctcggcagacacatcgggcatctcaccgaaagcgaccttgccggcatcgaatgcaagaatccacaacccggctggtatcttgacgcattcctatccaccgccgaaatgcgactgctgctcgacagcctcaccttgtctcgcatcagcctcgacaccatggacgatctcatcggtaaaatccgcgaactcgcaggtgccgctgggcaagcagtaggttaccttgagcacgtggccacctacacgcatatcaacggcgagttcctatccaccatcgaccaactgaatcaggccattgaagaaggccacggcgtaaccttccaataccgtgattacggcccggacggcaccctgataccgcataaaagccgtacgggcgcaggtcgaattacctacaccgccgacccttaccagatggtgtacaagaacggacggtattacctcatctgccatctacatggcgaggataatctccgcattttcgtggtcaaccgaatcgccaacgtcagcgccaaaggcaggaacggcacagttccactggaaaaaccagcgccggctgattttgacgcagtgaacttcatgcgtcaccgcccgtatcccgtagccgatgccccgattcgcatccgcatggccgtacgagacgaatccatgctcaacaatgtgttcgaatggttcgacgaccctcagatcaaacattcgccggacggcacacagttcgaagtcatcgtcgatgctcccgaacgcgccgtgttctggtgggcattgcagtattcctgggatggccgcgtagtgattcttgagcccgattcgctcaagcgcaaactctatgatgccgggcgtcgcatggccacagcctatgctcccgaatgatgcagcatcacatcgcacacctccttgccgagttgttcaccagcgaatttcaccggagaacctatcatcccatcgccaatcgcgttcggtaattttttaccgaacaactcgatttcaagccattccacgaactatggcccccgcctagccgtacttgacgctaaggtggaaccatcacatgccgcgatgcacatgcaacgcaaacgcaacgatatgtaaggagcaactatgagcgaagagcgtaccgcatggggatggggtctggccagcgtagacgccgccggcaccaccctagacgtctggtaccccgaactgaatctcggtgaggcaccggccgaggccgatcgtccaaaccacaatttcggcactctggctcacgatgaagccgacgcccgtggcatccgccgcgtgccggtattcgtcgtcagccagttggacgagccgatcagcaacgccgcggacgcttacctgaaactccatctgatgagcatgcgcatggccaagccgaacacgctgaaccttgacggcatcttcgcccaactcgccaatgtggtgtggaccaactacggtcctttcgccgttgaggacttcacactacgcaaggccgatgtcgaacgcgcctccaccgaagccgctctcgctttcgctgctcaggccggactgcctgccgcagctcctgccaccaccgtcaacgtgttcggtgtggataaattcccgcgcatgatcgattacgtagtgcccaccggcgtgcgtatcggcgacgccgaccgtgtgcgcctcggtgcttacctatcttccggcaccaccgtgatgcacgccggattcgtgaacttcaatgccggcacgctcggcgtctccatggtcgaaggccgcgtttcgcaaggtgtggtcgtgggcgacggttccgatatcggcggcggtgcctccatcatgggcaccctctccggcggcggcaagctgcgcaactccatcggcgagcactcgctgctcggcgccaacgccggtatcggcatctccctcggcgataactgcaccgtcgaagccggtctgtacatcaccgccggcaccaagatcagcatctgggacaaggccaaggccgcagccggcgagccgctcgaagtcgtcaagggtgctgagctctccggcaaagacaacatcctgttcatccgcaactcggtgaatggacgtatcgaagcccgctaccgcaaggtgggaattgagctcaacgccaagctgcacaagaactgaaattgaaataatggagcgttatcttcgttgctcctcggtcgacgtacttccgtacgccttccctcggtacgcttcgataccgcacacattatttcaatttcagaactagccctgctcgttcttatgcagccgtcgcagcatagctggtttgcgctgtacatatagaaagcgcttcactggaatctccagcgaagcgctttctcaaaccaataatcaccgctcgtccatcggcatgaaatcgcgctcgaccggaccggtgtagacctggcgtgggcggccgatcttggtgttcgggtcggccagcatctcacggtactgcgcaatccaaccgggaatgcggcccagtgcgaacagcgtggtgaacatggccggatcgaagccgatcgcccgataaatcaagcccgtgtagaaatcgacgttcggatacaggttgcgcgatacgaaatactcgtcgttcaacgcaatatcctcaagctcggtggccacatcgaacaacgcacgctcgtcggacggcagtttctgcgtatcctcgcgctccatgatcttctcaagatacttcttggcaatcgccgcacgcggatcatatgacttatacacacggtgaccaaggccggaaatcttctggccatcctccttggcatcacgcacgaactcggccacagacttaccggaatcacgaatcgccttcaattggcgtagtacggcctcattcgcgccaccgtgcaacggtccggacaaggcattgacgccagcggccaccgccgaatacagattggcgtgggcggaaccggcgatacgcaccaccgaggtcgagcagttctgctcgtgatcggcatgaataatcagcaaacgacccaaagcatgcacatacaacgggtcagattcgaacggctcgtacggcacagcgaagcacatgcgcaggaagtcgtccacatagccacgcgcgtaatcggggtacagcatcggctcatcgcgacgacggcggaagatgtacgacacaatcgtgcgggccttggccatgatgatcttggcggcctcatcgagctggtcggtgtcggagatatcggtggtgtccggatagaacgtggccagcgcattgatggcggaggcaagcacgctcatcggatgagcggagcgcgggaacgaacccatgaaggtacggaagtcttcgccaaccatcgtcttgtggttgatgtccgcgcagaactgctcatactcagccctgctcggcagctcgccgtggcgcagcagccacgccacttccagaaaatcggagttctcgcacaactgctcgatggggtagccacggtagcgcaggatcgaatgcttgccgtcgatgtaggtgattttcgattcgcactgtgcggtggtgaggaatccggggtcgagcgttacccagccgtcattgcgcagcttggaaacgacgatgccatccggccctgcactagccttcaccacgggcaggttgaacttgttcgaatcgacatcaagttgtgccgttgccattcgcgcaccttcctcttcatgaaccacttaccccaaacattaacgttcacgcgttcgcgaacgctagtgttcggtactttatgtcttctgtgttaccgccggcagacaccggtcgatacacgaaagccgaagtgcgctcatgctatcaaagcaaacgcacttcggcttgttacgtctcgaattcgcgggaaaaccgcaaacatatagacggttgatgagatgccgatcgcccatcacaggccaatcaggcacccgccatacgccaaacgccaatcagaggttggtgcgatcggtgaagatgatcgggccgttctcggtgatggcgatggtgtgctcggagtgggcgccgcgcgagccgtcggaggcgcgcaaggtccagccgtccttcggatcctggaagatctcgtcggtggtcttgaggaaccatggttcgatggcgatgaccaggccttcgcgcagcttgtagccgtggtgggcgcggccgtcgttcggtacgtgcgggtcgccgtgcatgatgtggcccacgccgtgaccgccgaactcgaggttgatcgggtagccgtattcgcgcgcgatgtcgccaatggtgttggagatgtcgccgagacggttgccgggcttggccacgtcgatggcggcggcgagcgcttcctcagtgcacttgatgatgcgcaggtcttcggggtccgggtctttgccgaccacgaagctgacggcggaatcggccacccagccatccacggagatggcgagatcgagggagacgaggtcgccgtccttcaggctgtaatcgtacggcacaccgtgcagcacggcgtcgttgacggaggtgcagatgtagtgggcgaacgggccggtgccgaagtcaggagcgtagtcaacatagcaggattcggcgcccttgcggtccacgatcttcttgtggacgaactcgtcgatttcgagcagattggtgcccaccttggtggtctcctgcagttccttcagaatgccgccgacgaaacggccggccggcttcatttcctcgatttcacgaggggtcttcaattcgatcatgaggttctttctaccttgttgagacttgttctcaactctagcccagcccggggtcaaccgccagagcatcacccgtggtctgcctagggtccgctagtagcctatcaacggccaaggccgagaaaaagcgcccggcagatacataatctgcacgggcgctttggattgattgtccggagattgattgtctggagcgcgagatcacttcctgcgcttgccaaaagtgaacgcgcgaatcactgaagtaatccccatcaccaccatggcacatccgccgaagataatcatgaatacggcggagctcagcgggctcatcagcaccacgaagccggcgataatcgagatgatggcataggcgatggcccagccggagcgcgggatgcgccatgattcgactagagccatcacgccttccataatccaaccgaaaccgaccatcagggtgatgagtaatgccaaggtctgaccggtcataccgtagtttcgtacgactacgacgcctccgaaggtcagcagaatgccgacgaacacgtccagcacacgccagccgcccggcagacccggctccacgagagcgctgacgatgcgcaccacgccggaaatcacgaaatacacgccgagcaacaatgcggccaaagccagcgtcttgttcggcaccaacaacagcgcagcgcccaaggcgatggcagccacgcccaccacgccgtaaatgatgcgaatcttggtcttggccttttccggcagccattcctcgatcaggtggaatggactgaaattgccgacataccagttggtctgctgccagccgggttgactttgatcgccccatgaaccattcggctgcccgtccgcttggctattcgattggccgtccgcctgataccgccgaccgtccggaccccatgctggctggccgttcgggccatagttcggattgtaggcgtacaggccgtagtacgggttctggttcggtccgccttgtggctggccgttctgcgcctgctgattctgagtgtcttgcgctcccggcgcaccttgcggaggatattggccgccatgattgctgtcatacgcgccatactgcggttggcccggttggcccgccggattcggctggctcggctggctctggttgggctggcccgtctggccattccactgaccctcgtttggattgctcatcgtaactccttaactcaaggtccatattcaggttccacataccatgttaggcaagttacctaatttgaaccatcactacagttaggcaatccgtctagttcactgacagcgcaatacccataacgcaatatctgcatcaccaacgcttctcccccgccgcgattaggcttagggccatgaccaacgaaaccgaaacgctgacgtcgggcatcgacccggcatcgttctcctccgtcatcaagccgaccaatgacctgttccgctacgtgaatggtccatggatcgacacctaccgcctacccgacgatcgttcgcgctacggctccttcgacaagctcgccgaagacgccgaaaaccaagtgcgcgacatcctcgacgccgacgactgcccggccaccaaatcgcaggctctgtaccattcgttcctgaacaccgacgccatcgaggccgccggccttgacccgatccgcgacgagcttgacctcatcgattccgccatcgacaaggccgctctcacgcgcgtgctcggcaccatcaacccagccggcggccccgacctgttcggcttggccgtttacggcgaccccggcgacccggaccgcaatatcgcccaccttgagcaggccggcctttgcctgccggacgaagcctactatcgtgaggaccactacgtccccgtgcgcgaagcatacgtggcgatggtcgccacccagctggtgaacgccgggtacgcgcccgccgccgaatccaacggtggcgatgaactgccggccaacaccggcgatgacgagagcaatgctcccaccacggttcccagcgaagccgcacttgatatggcccgccacttccttggcgtggaaacgaaaatcgccgccaaccattgggacaatgtggccacgcgcgattcggtgaagacctacaaccccaccgattacgccgatttggccgccacgctgaagaacttcgatctcggttcctggatcgacgcctggcagaccgcctatgacgccaccaaggccgccaaggctcagccgatcgatttcaagtctgtgttcgcgcgcgtcattgtgcacgagccgagcttcctcactggtcttgatgcgttctgggccgaggctgatctggccgaccttaagctgtgggcccgtgttcacatgattctgggcttcgcctcctccctgtctcgcgacttcgacaccaccaactttgacttctacggcaaggtgctctccggtgccaagaagcagcgcgatcgttggaagcgcgcggtgagcctggtcaacggcgtctgcggtgaagatgtgggccgcgaatacgtgcgcctgcacttccccgaaagctcgaagcgccgcatggaagagctggtcgccaatctgattgacgcctaccgcgtgtccatcaccaattccgattggctgggcgaggataccaaagccaaggctctggagaagatctccaagttcacgccgaagatcggctacaccaaccactggcgcgattattcggcgctgagtgtctccgcggatgcgctgcccgccgagaacgccaaggccgcgaacctgtacgagaccggctaccagctggccaaggtcggcaaggcggtcgacaaggacgaatggctgatgaatccgcagacggtgaacgcctactacgagccgagcatgaacgtcatcgtgttcccggccgcgattctgcagcccccgttcttcgacccgaaggccgaggatgcggcgaattatggcggtatcggcgcagtgatcggacacgagatcggccatggcttcgacgatcagggttcgcagtatgacggcgacggcaagctcaacaactggtggaccgacgaggatcgcaagaacttcgaggcccgtaccggcgcattgatcgcccagtacaacagctttgtgccgctgcagctggcagagaagtacgctgacgagtctgataaggcgccgcacgtgaacggcgcgctgaccatcggcgagaacatcggcgatttgggcggcgtgaacatcgcgctcaaggcgtatgcattcgcgctcggcaaggcggcaggtaagcccgacgccgaagaagacggctcccccgccgccatcaaggcactgctcgataccgcccccgaaatggacggattcaccggcctgcagcgcttcttcctgagctacgcctccatctggcgcaccaagaaccgcgacgagctggccgaacagtacctgcagatcgacccgcattctccagccgaattccgcaccaacggcatcgccagcaacgtggacctcttctacgatgcctttggcgtgaccgaaggcgacgccatgtggctcgcgcccaaggaccgtgtgagcatttggtaatccccgttatgtaagagaaaaccgctgtgcttgcctcgattacaggcgaacacagcggtttttcatgatgtatggttggcactcagaattcggattcgctgggatcggaagattcggcgaaaccgtcgacgtaggtttgttgggctgcggactgtggctgattagcgccagcgtccggttgcgacatgacggcatcggccatggacgcagccgctgactcggttgatggcgacggcgattggccggaatcggaggtgaccccaaattcgacggggccagattccgacgaggtcgcatacgggtcaatgcccacaccggatgcggcaccgtccacactatattgcgttggcctcatgtgcggtgacgatgctcgttgcccgtttccgccatccatgccttcggcggcaccattggcattgccgttaccgttgccaccattgcctccgttcccattaccggcacgctgtggcttgatcagcgacgtggtgccgaaggtcaggtcatgcccaatgttggtggcttcgagaacagttctgctgcgcggttcgccttgctcattggtccactgctcggtgatgagtgagccgaccacaatgatgcggtcaccgcggcgaaccgaactggcggcgttcacggccaaagcacggaacgctttgacgcccacccatgcggttccgtaatcctcccattgtctggtagtcgggttgagtcgactgcgggtgctgcccatacggaatgtcagcacgcggaaactctcagttccgcctagtgtcggatcaccggccacaaagccggtgacggtcactgctgcttgttgatttgccatgatcggtcctttcctcggcctgctggcctgttgtttggatgtggaccgccggagcctgtctccggcttcattgccggcttgcacgccccagcggtacctccactgtgaggcatgacgtttgaagtgcacaagggcaactggcaaatgtggatactgtgacgcagttgaaattttaagaatgtggataagtttcggttatccacaacaaagcgccattctgcgactgggcagaatggcgcttgatgcgattaacgtcgaggctgagtaagtgggactcagctgagggcggcgaagcgctcggcgagcgcgtcggcggcttcggcggcgggcacggcgaccttgttttcgccgttgcggtcgcgcagttcgatggtgccgtcgttgacgtaatcgcggccgaccacggcgaccagcggcacgccgatcagctcggcatccttgaacttgacgcccggagacaccttcttgcggtcatcgtaaataacctcaaggcccttggcctcaagctcggcgaccagcttctcggcaccttcaaacgccacggcgtccttaccggtggccaccacgtgcacggcagccggggcaatcacggacggccaagccaagccggcctcgtcgtggtgcgtttcggcgatgcaggccagcacgcgggaaacaccgatgccatagcagcccatccacaccggcacggccttgccgttctggtcgagcaccttcaggtccagtgccttggagtacttgagacccagctggaacacctggccgatttccacaccacgctcgaagctcaacggaccggaaccgtccgggctcatgtcgccgtggcgaacctcaacggcttccaccacgccgtcggccttgaagtcacggccgtacaccaggttgtagtagtcgacctcgttctcatcggcaccagtgaaccaagcggaacccttgaccacgtgcgcgtcgaccaggtagcgaaccgggttcttcacgccagcagcctcagcctgcgggccaagcaccatcggtccgatgtagccgggcaccagttcggggtgctgcttcaggtcttcctcagtggcctcctcaagctcggcgggagcgaactgggcttccagtcgcttcatatccaccgtacggtcgccgggcacgccgacgacaatcacttcacgccacggctcgtcatgctcttcatcctcagggtgcttgacggtaatcaccacgttcttgaggatgtcggaagcctgccattcacggccatcagtacgcgggtggtcggcgttggcacgctcaatcatgttatcgatggtcttggcatccggggtggcttccttggaagcggcgggagtggcggaagcatcgatttccggcagctccggagtgctcagggcctccacattccatgccttgccggaaggtgccagcgcgaaggtatcttcgccgatcggcatcggagccaggaattcctcggatgcggagccgcccatcgggccggacatggcgaacacaggtacgtacttcaggtcgaggcgctggaagatacgctcgtaggcgccgcgctcgtcatagtaggccttgcgcatgccttcttcatcgatggtgaaggagtaggcgtccttcatgatgaattcacgaccacggatcaggccggcacgcggacggaactcgtcgcggtacttggtctggatctggtacagggtgacgggcaggtctttgtaagaggagtacatgtccttgaccagaagggtgaacatctcctcgtgggtgggggccagcaggtaatcggcctcgtggcgatccttcaaacggaagatgttatcgccgtactcctcccagcgatgggtggcctcgtagggttcgcgcggcagcagggccgggaagtgcacttcctgggcgccgatgccgttgatctcctcgcggatgatggcctcgatcttgttcagcacgcgcagaccgagcggcagccaggtccagataccgggtgcggccttgcggatatagccggcgcgctgcagcagcttggccgaatcgacatcggcatcagcggggtcctcgcgcagggtgcgcaggaacatggttgacatacgaagggtattggaagtcatgtgttccaagatattcgcgtgaaccgacaagcccgcctgctattcgcactattccggccttcatcttggcattcggactcattcgtacaacaatgatggctagaagggtaggagggcacgatgacgcagccgaccgagcaacaggggaatcagccggaacccgcggagcaaccggtgtatcaaccggcccagcatgggccccgcaattttctgctgcaaccccgcaattcccaacggcagttccgcgacaaccggtatcgcaacagccaatggccatgccaccatttgcgcaatcgcctatgtcggtcccggaacaagcggcctgtccggagcggccgcgctgattgtgggtgtgcgtttgctgcaagcaccgttgatctacggcacggtgattcttatcgtcagcacggtgactgtgctgtggccatggcgggccgaattctcccgccactaccggtgggtgtggcttgctttgggcggcatcattctgattgtggcagccgcgcgctatgaggcgagcctcaaatcgatgaggacgatcgccgcgcgtattggcgatctgcgctaaatcgcgcgggcgacctgaggcagattaccaacgtccggcgatagcagtcctgcatacggggcagtgcccattgccactgtatccggcagataaacggttggcaatgattcgataccaatcgcgttccacgagcttggccctgcattcagggtttgggcaatatgtggtatcgccttcacgatcatgcacgttgccggtgtacacataattgagtccctcttcgagggcgatgcctcgggcgcgggtcagagtctcgtgcggggtgggcgttacgtccatcatgcggtaactggagtggaatgcggaaaagtgcagcggcacgtccgggcccaagtgctcgcgtatccatgtacattcagcatgcagctgggcgtcgtcatcgttgagtccagggatgagtagcgtggtgagctccacccacacgtgttcgccttctggtgtgcgtgcctcgttgaccgcatagtcgatggtttcgagcacatcggccagatgcgtgccggtcactttccaataaaattcttcggtgaagcctttgagatcgatgttggcggcgtccatggcggcgtagaagtcgggccgggcttcggcgctcatgtatccggcagtcacggcgatgggatgaatgccgagcgctcggcaggcttcggccgtgtcgatggcatattcggcgaacacgatcggatcgttataggtgaacgccaccgaatcgatgccccggtcggccgcgacctgcgcgattttctccggactggcttccacgccgagccagtcgaaactgcgggctttggcaatatcccaattctggcagaatcggcaaccggaattgcagccagccgtgccaaaactcagcacgctggaaccggggtggaagtggttgagcggcttcttttccactgggtccacggcgaagccggagctgcggccgtaggtgtcggagacgatgagtccgtcgtggtttgagcggacgaagcaaaagccgcgttggccgggcttgaggacgcagcggcgcgggcatagttcgcagcgagcgcggttggtaccgtcgtggaattgcgtttgccagcgggctatggcggggttacgaacatctgtgactgacgccgtatgaccgcacgattcccggtgaccaccctctgattctcggtgaccaccctccgtcgcttcgcgccacctcccgccagcgggaggggacatggttgctgcgttagtgctcggcataggcggtcacctcgtagcgttgacagtcgatttcgccatcgttccagtcgtaggacgggcggataccggctttggcgagcaggtgagcgacgaaatcgtgcggattgggcagctcatcccacacttgtggcaggaatgtggcgctgcggccacgacggtcggcgagaatcagaccgtctttgccggggcgtaatacttcctcaagttcagtgcgcgaacgtaccgggcgttcgacgttgctgccgtcccgtttgacggcgtcggtctgaggtccggattgcagcgatgccagagtcgcggtcttcgagccggtatcgcgcgaatcggcgtcacaggagttcacggtaatcggctcgggctcgcccaagacggatacctccacgttgagcaacgggtattccgcggcggtgaccgggttgaaacgtgggtcacgggtggcggcgtccaccgcatgtgcagctatgtccttgccgagcgagcggtgggcggccagcgaaccgatgcacccgcgtagccggccaccctcggtcagggtaacgaaacaggcaccggactcgttcagccatgggtttgcggcaagaatggacgcggtcgaatcggcggctgttggatgttcaatatgcaaccgttcccggatagcggcacgggcgagtttcagcagcacatcaccatgggctgttcccgattcgcctaagtcatctgcaccggctggagcatctgcttctggtttggattcccacgcggcaaacgagacatatcccactaccggctcgtcggcgtctcgcattgcggggcgaggttggccggcaagcgccaccacgccgtcgtcgccggaagtggaacagccgagctcgaagagcttcatgtccttgcggccttttaacacatccagaaggccgttgatcgggtatgcgccacaggcccggcgagggtgaatcggcagatgcaaagccgcaatgtccgcaatggtctggtcatccaacgcgcgggcgacttcgtgcggatgatagtgcgagagatccgaactaatcacgatgacggtttccgggccaccccacaaagcacgcaacacatcacccgcctcttgtggcgtggcatcgcccgcgttcaacggcacaatagtgaggtctgggccgagcacggtttgcaggaacggaatctgcacttctaccgcatgttcttgtgcgtgggttgggccattgacgatcattgcgggagccgacgcgcccggacgggcatgtgtaccggagcgcaatggctcattgacagacaggcccagagccttacgctcggctgcaatgtctaccggcacagtgcccagcggcgtttcaaacgccgctgccgtggaacaggcgacgcctcgcacggccacacggtgagtcggtcccacgattaccgcgcgagtcacactcccccgccctcgttcgagcaaagcataggcaagcgcggccgccgtgccggaatacacataaccggcatgcggcacgattacagcctttggcactcccgctggaagcgtgggctccaactgttgcagaacctctcgactgtaatccaattgatgggtaatgagttgcttgagcgttgtgcggtcagcggggtagaacgaaccagccaccgctggcggacgtattgcgccagtgattttgccgctgccgtctgccgcgcttgctgcatctgacgcactagccacactaaccgtatcgatttgcacaccggcccgggcggcctcgcgaacctcattgtttccacgaaatatctcggatagcaccataactaccacctcttattccatggtagccgttcagttcctcaatgaagacaagttcgcagtgtcttcttcggcttcaaggggccgattccgcctcttggagacatctacttgcatttcgaggggctggtcatccgctcaatcgcacatagaaacggcttcataccaacgtcattccgccgtttttaagcgctgtctacttggacatcagccccttgaaacggaagtagatgtcccgaaaactcaaaatccgcccctcgaagtgcagaaacactcaaattagcggtcgttcgatatatcgaccgtcagaataacgcgtcctgggcgaagtcatcatcgggattgacaccgaattcgtccggctcggcgggtttgaacgcgcttgcaccttcatcggccaactggtcggaagccgaggccgaggcttcgcgcaggtcgccgtcgagcaccacggcatcgggcgagacgaggaacatgcgttcgttgacgccagccaaatacagtccgcccagcgattcgacgcgggacaacgccacatatcccatgcccggcgcgaaggtgcgcttcagatccatgaccgcacggtcaagcgtcatgccttgcgacttgtggatggtgatgccccacgcgcaacgcaacggcacctgcgagacggaggcgagcacggtgtcgccgtccatcatttcccatgtggcctgtttcatggtgacgatgttgccgttttcgaattccacgatcggccagccgcccttgttctcctgcgcgaagccgcgcacggtgccgagcgagccgttgacgtactggcgatcggtgtcgttgcgcagggccatgacagccgcgccttccttgagtatcaatcgctcgggggccaacatgttctttttgagtcggtcgaccagattggcgggacccgcggtttcggcgtggaactcgtgcggctcaagcatgatctggttcaggcgcatgtcgttgagattgtcggcctgccggttcaccgggaataggtggacggcgacctggccgggctcgggcagtttgcccagacgggtgacgagcacgtcacggtcggactgggtcacgtcgccttcgcgaatgtcggtgagcacggtcagcagttcgccggtgtcctgacggtgctgttcggtcagatagcagatcaccgggttaagttcaggccatatcaatgattcggtgatgaaaccttccgggttaagcccggcacgggcataccgttcgcgactggcgatgaattcgggggtgggggcgatgaggtcgcggttgcgcccggacaccgaaaccggcggcagttggaagaagtcgccggacagcacgacctggatgcctccgaacgagcgtgggtcgcgacgcacttcgcggcagacttggtcgaccatgtcgaacagccatgcgtgcagcatggagacctcgtcgatgacgaggatgtccgtagcctgaatcttgcgtttgcgccgggatttgatgagtttgagcagactcgggctcagggcggtggccacgccgacgccgctccacgaatggatggtttggccgttgatatgcgtggaggcgatgcctgtggacgcggtgactgccacgctggcgccgtcggcccgagcctggcggatgaactcgttcaagacataggtcttaccggcaccgggcgcaccggtcagaaacacgttcgcgccggcgttcagaatggctagggcttcggtttggcgcatatcaacctctctagactcccctcagggaggggagccaagtacggcggactacttattgagaatgctggtggccacgatgtcggcggcgatggccttggaggcggcatcatccgggccggggacgggggccatgaaggccttacggtagtagcgcaactcgtccaaggactcgatgatgtcggcgagggcacggtggccgccgttcttcggcggacggttctcgtagacggccgggtaccagcggcgggcgagctccttcaaggtgctcacgtccacgctgcggtaatgcaggtggctcatgaggcccggcatgtagtggtcgaggaacttcttgtcggagccgatggtgttgccggccagcagcgggcgcacgccttccggcgtgaagcgcagcacgtattcggtgaccttctgctcggcctcggccaggctcaggccattctcccactcgttgatcaggccggaacgggtgtgcatctggcgcacgaaatcgttcatgtggttcacagccttctcggacggcttgatgacgtaatccacgccctcgtccagcacattcaggtcaaagtcggtgggaaccacagacacctcgacgagttcgtcgccgccgaagatgtcaagtccggtcatctcgcaatcgatccaaatcaggcgcgagtccttcgcgctgtacgtttccgcgtcatggctgtcgaccatggtgtgcctcttttcttcgctggtcatcgcttatgcagaacagttcagactataccccagcgcatacaagctatctcgagccacatacgcgaaaagggcctgcataagcagacccttttcacaaggaatcaacccctaactagcgcaagctagcgggcatcaaccgatcagttgttgtggaagccggagtagttcggggcttcggcggtcatcacgatatcgtgcgggtgcgattcgcgcagaccggcatcggtgatgcggatgaacttgccacgctccggcatctcggcgatgttgtgggcgccgatgtagaacatggactggtgcaggccaccgagcatctggtagagcacggcgttcagcgggccgcgatacggcacttcgccttccacgccttccggcacgaccttatcgctggaggtcacgtcggcctggaagtagcggtccttggagtaggacttcttgccgcgcggggccatggcgccgagggagcccatgccacggtacagcttgtactgcttgccgtgcaggagcaccttctcgcccggggcttcctcacagccggcgagcgtgccgccgagcatcacggaggaggcgccggccacgagggccttggcgatgtcaccggagtagtggatgccaccgtcggcgatgcagggcacgccagcggcacggcaggcctgggcggcctcgtacacggcggtgagctgcgggacaccgacaccggcaacgatacgggtggtgcagatggagccggggccaataccgaccttgacggcgtccgcgccagcctcaatcatggcctgagcaccggagcgggtgccgacgttgccgccgatgatctgcacgccgtcgaaggcggagtcgtgcttcaggcgggaaatcatgtcgagtgccagacgagcctcaccgttggcggtgtcgaccacgagcacgtccacgccagcctccatcagagcggaggcacgctgccaggcgtcgccgaggaagccgacgccggcggccacgcgcagacgaccctgctcatccttggtggcgtccgggtactgctcggtcttgacgaagtccttgacggtgatcaggccggtcaggtggccttcctcgtcaacgagcggcagcttctcaaccttgtgctgagcgagtagacggtgagcgtcgtccttggagatgttggacgggccagtgaccaggttctccttggtcatgacatccttaaccttcagggtgtcgtaatcctcggaggcgatgaagcgcatatcacggttggtgatgatgccgacgagcttgttgtccttgtccacaaccggcagaccggagatgtggaacttgccgcacagcttgtcgaggtcggccagcgtgacctcggggttgacggtcagcgggtcggtgatcataccggactcggaacgcttgaccacatcgacctgagcggcctggtcgtcaatggacagattgcggtgcaacacaccgatgccaccgttacgagccatggcgatggccatctcggactcggtcacggtatccatggcagcggagaggaccggggccttcatcacgatcttgcgagtcagatgagtgctggtgtccacttcggaaggaatgacatccgtctcgttcggcaacagcaacacatcgtcataggcaaggccgagcttggcgaaaatcgggggaaggggggcatacgccgactgggcgtttaattcatcaaggtttgtagccatgtaaacactatatgaaaatgcgctgaccttcacgacacacgtgtgagaaccgtccaatcacatatggctcaacgcgtgcggactgctatcaggaagggttttcctgtccgctcgaatcagcgccggcaaccggcagcgattcgcttccggaacgcgtattttctggggttacgtcgtcatgcactgccgtggcatgctgcgcgttgtggcgcgccgcttccaacgtagcgttctcttcctgtatctccggaatacgatgcttcagatacgggtacatggtggcgatggtcagtacgaccacggcaatcgccataccaaaggcaacgtgctgcgccttgaagaaaagaatggtcaacgacccaaacgcgatcaacgccgcccaaccccaaagaatcagcacggctccacgaaccgaatgtccgatgcgcagcatgcgatgatgcaggtgcatacggtccggatgcatcggcgactgccccttggccagacgccgcacaatcgccaggcacatgtcgagcaccggcaggaacagcaccagaatcggcaacagaatcggcatgaataccggcagatagatactggcgtgaatcgatgccggatcaagacggccggtcatgacgattgaggcgcaggtgatgagatagccgagcagcat

SEQ ID NO: 3695 - DNA, 14173 bp, Unknown
  R150_10m  MAG No. k141_3381
cccgcctcggcggtggcgacccggacggcaacccgtccctgtacgatgccatctacaaggccaagaaggcctccatgccggccgacaacatcgctcgtgccgtcaagcgtggtgccggtgctgaagacggcgccgccaactacgaagacatcgtctacgagggctacgctcctgccggcgttggcctcatcatcgaatgccttaccgacaaccgcaaccgtgcggccgccgaagtccgttccaccctgaccaagggcaacggctccctggccacctccggctccgtgtccttcaacttcgagcgcaagggccagatcgtggtgccgtccgagggcgtggacttcgacaagctgttcgaaaccgccgccgaagccggtgccgaggacgttaccgaggacggggaggtgttcaccgttgtgaccggtccgtccgacctgttcaccgtgcgcaaggctctgcaggacgccggcttcgactacgattccgccgaccaggtcatgcagccgaagaacgaggtcgagttgagcctcgacgatgcccgcaaggtgtccaagctcatcgacaacctcgatgaccacgacgatgtgcagaacatctactccaactggaccgcttccgacgaggtgatggcccagctcgacgaggagtaatcctcgtgattatccttggcgtcgaccccgggctcacacgttgcggggtcggcgtgatcgaagccggcgagcaccgccggctttcgtttattcacgtggacgtggtgcggtcctcaccggatatcacccaggatctgcgtctactggccatctacaacggcctgtccgagaaaatggatcgcttcgcacccgatgccgtatccatcgaacgagtgttcgcacaatccaaccgcaacaccgtactcggtaccgcacaggccgccggcctcgccatgctcgccgccgcgcaacgcaatattcccgtggcgttgcatacgcctaccgaagccaagctggctatcaccggtaacgggcaggcgcagaagattcaggtggagcgtatggtgacacgcattttgaacctcaccaaaatgccgactcccgccgatgccgccgatgccttggctttggccatttgccatgcgctgcgcccggcaggcgcattgcagggcggcgaacgcgaacaacatctgaccgccgcgcaacgccagtgggctgaggccgcacagaaatccacgcgccgccgcatcaaccacgaccgaggcatgtagtatactttcgaacagttgttcgagtcttgaatcctggagccctgaaggagtacctgtatgatcggcatgctgaccgggcgggttgaatcggtcgaaaccgataccgcattgattgatgttgggggagtgggctacgaagtgcgcatgtccgccaccgacctgagccgtctgcacgccgggcaagacacccgcgtcttcacctatatgaacctctctcaggatgccattaccctgcatggattcctggatcgggacgccaagaaaacctttctgcaactcatcaaggtctccggcattggacctaaagtggcccaatcgttactctccacactgacgccgagtcagctggcccacgccatcgccgacaacgacgccaccgcgctggccaaggctccggggctgggcaagaagggcgcacagaaaatcatcctcgagcttaagggctctattgatttgagtcagatcgagggtgcttccgctcaggcggcaatatccaagtctccggtggataccggtacggaacaggttgtcgaaggactgatttcacttggctggcgtcagcaggacgcccagcaggccgttgccgaggcttgcgccgaaaacgatattcccacgccgcttgccaccgacgatgtgccgcgtgtgctacgtctggctttggcgctgatggataggggccgctgatgagcgagacaacggattacggtacctcaaacaccggtgccaacgaagagtcgttgcgcatggtctcctcccagccgatcggcaacgagccggtcagcgacgaggagctgcgcccccatgttctcgaaggctttatcggacagccacggctcaaggcccagctgcaactgttcctggacgcggcccgcaaacgcgatgtgccaccggaccatattctgcttgccggccctcctggcttgggcaaaaccacgttggccatgatcgttgccaatgagcttgaagtgccgattcgcgtgacttccggccctgcggttcaacatgccggtgatcttgcttcgattctgagctccctcgacgtcggcgaagtgctgttcatcgacgagatccatcgtctgccgcgcgccgccgaagagctgctgtatatcgcgatggaggacttccgcgtcgatgtgatggtcggcaaaggcccgggcgcaagctccatcccgctgaccctgccgcgattcaccgtcatcggtgccaccacgcgcgaaggtatgctgccaagcccgttgcgcgcacgctttggcttcaccgcacatctcgacttctatccgcatgaggagttggaaaagctcatcgaacgttcggccaacgtactgggcgtaaaccttgatgcgggttccgctcatgagcttgcgttgcgttcgcgcggcacgccgcgtatcgccaaccgattgctacgccgtgtacgcgactgggccatcgtccacgacctgatcgtggtgcggccggacgacgtcaaggaggcgctggccctgtaccagatcgactccgaaggcctcgaccggctggacatcgccgtgctcaatgccatcgtgcgcaacttcaacggtggacccgtgggcctgaacaatctggcggccatggtgggcgaggaatcggaaaccgtggaaaccgtgtgcgagccgtatcttgtgcgcgaaggttttatgattcgcacgcccaaaggccgcgtggctaccgagaaggcatggcagcatttgggaattacgcccaaagatgatgtcagcaagctcttctagactttctcctgtttgcacacttggcggcgtttcgtcaatgtcgctcgtttgaaggagttgtttcgtggaacaacagtacattatgctcatcgtgatcgtcgtcgtgttcggcggcatgatgtggtggcagtccaagaaggccaagcagcaacagcaggagaagcaggacttccgtcgcaacctgcagcccggcaccgaggtcatcaccatcggccaggtgatcggcaaggtcgtcgaagttgacgagcagtatgaggagatcgtcatcgactccgaaggctccaagctgcgtttcggcttcaacgccatcgcccgtgagtacacccgcccggcctatgtgtccgatgatgaggtcgacgagaacggcaacccgctgcccgacgaagacaccgaggctccggctaacgatgaggctggtcaggttccgatcgaggcgtccgtcgtgtccgaggaagacaccgctgacgagaccggtgacgacaacgaaaccaagacgaagtaagctgttcgattcggtagcaccatccgagtatcgcatcgcaaaggcataaaaggggcgagcactatggcacagtcggacatcaccatcgacgcattgagcaaggtagggcaacaggacgccgaatatctggtgtccttggtgcgttccataccggggtttcccaaggaaggcattatcttccgtgatttcatgccagtgctcgccgaccccaagggcttgaagattctgctcaaggcgcttgaaacggctctgccggtgtccccgagcgaattcgactccattgccggtctcgaatcgcgcgggttcctgttcggcccggccatggccgcccatctgggcaagggtttcatcgccgtgcgcaaggccggtaaattgccgcccgaaaccatcggtgaatcctatgacctcgaatacggcacggccagcgtcgaaatcgaaaccgacgccgtacaggcgggggagcgagtgctcattgtcgatgatctcatcgccacaggcggcaccgccaaagccggcgccgaccttatcgaaaaggcgggcggcactgtggtgggcttcagttttgtgatgcggctcgatggtctcgacggtctggataagctcggcggcaagcccagcagctcgctgatcgcgatgccggcctgagattccgtctcacccaacgtacagttagttttcaaggtccggcatgtactgtgtacagttatatgccggaccaattacatagtcagggaaggatcgatggatctttacgaataccaggcgcgtcagctgctcgaggaacaggacattcccaccccggacgccatctttgcccagaactcccatgaagtcgccgaagcggcggacaaaatcggctatccctgcgtaatcaaggcgcaggtcaagatcggtcatcgtggtcaggccggcggcgtcaagatcgcccataaccgcgacgaggcgattcttgaatccgagtccatcctgccgatgaccatccacgggcacaaggtttccggcgtgcttgtggccgaagccaagaacatcctgcacgaatattacgtgtccatctccgtggaccgcacctcgcgcgacttcgacgtgctggccaccgccaacggcggcaccgaagtcgaggaaatcgccaaggaacatccggaggccgtcaagcgcctgcacatcgatgcgctcggcgacttcgacctggccgctgccaccgaaatggcacagagcatcggcttctaccacgcggacgtcgatcaggccgcgcagattctgctcaagatgtggcgctgcttcaaagacaacgatgccacgctcgtggaaatcaatccgctcgccaagatcggcgacccggatgacgaatccaccaagcagctgagcgccttggacgccaagatctccttggatgacaacgcctccttccgccatgatggctgggtgcgtttcgtggatctcatcgttcccgaccccttcgaacagcgcgcccgcgaacacggcctgcactacgtgcacctgcacggcgaggtcggtgtgatcggcaacggcgcaggactcgtcatgagttccctggatgccgtctccggcgctggcgaggaacagggcaccaacatcaagcccgccaacttcctggacatcggcggcggcgcctccgcagccgtcatggccgaaagcctggagatcgtactgtccgaccctcaggtcgaatccgtgttcatcaatgtctatggcggcatcacctcctgcgtggaagtcgccaacggcatcctcgaagcggtcgccaagctcggcggttccaagccgatcgtcgtgcgtttcgatggcaacgccgccgccgagggtctgcatatcctcgcttccgccaacaatccgaatatccatgtgtccgaaaccatggaaggcgcggcagccaaggccgcgcagctcgccggtgaggcgacccagtccaaggaggttcgctgatgctgttcatcgaagacggcgctcccgttatcgtccagggcatgaccggccatcagggcatgacccacacggctcgcatgctcaaggccggcaccaatatcgtcggcggcgtgaacccgcgcaaggccggcacatccgtcaccttccccggtgccaagaacggtgccgacgtggacatccccgtgttcgccacctgcggcgaagcacgtgaagccaccggcgccaaggccagcgtggtgttcgtgccgccgaagttcgccaagtccgccgtggtcgaagccgtcgaagccggcatcgaactcatcgtggtcatcactgaaggcattccggtggccgattccgcatacttcgtcgaactggcgctcaagaagggcgtgcgcatcatcggaccgaactgccccggtttcatcacgctcggcaaccctggcgtcaacttgggcatcatccccgacggcattgtcggccgcggcccgctcggactggtctccaaatccggcaccctcacctaccagctcatgggcgaactgtccgatatcggcttcaccgcatgtctcggcgccggcggcgatccgatcgtcggcacgacgctgctggaagccctgcaggcattcgaagccgaccccgacaccaaggctgtcatgatgatcggcgagatcggcggcttcgccgaacaggacgccgccgcatgggccaaggagcacatgaccaagccggttgtcgcctacatcgccggtttcaccgcccccgaaggcaagcagatgggccacgccggcgccatcgtctccggaggcaagggcaccgcccaggacaagaagaacgcgctcgaagcggcgggtatccccgtgggcaagaccccgggccaggccgctgaaatcatgcgcgacatactcgccaaggccaacatcgactgatcggtcccaaccaatcgtgatgaaagccgtgattcgccaatgggtgcggggagccatagtcgccctcgcatccatggccatctatgccgttgcattaggttgctatacagcgctgatgttattggttgtctccatggaagagggcggcgacaatctcaccgtcggcacaacctcgctgacacaggccgttgtgcttctgagtgagggatcgggctctagaaccgattcgttcaccctcaccatcacgccattgatgttgaccatactgctgatatggctgatcaatgcactcaccatgcgaatcaaagcatacgggccgcatgcgtatgttgccggattgaatgtttggctcgggttgaacgaggcattccggcaatccgtacacctaggtcttgtcgatgaccagtggctggtgttgctgaaagcagccatcgtattctcgatcggtttcctatgcgcagccgtaccggaatcagccaagatgcgagcattcagggactggattcgcaagcaggtgccggcggacatacgccactgcctgaaaatcggcgtcgtcttggccgtcgcgatactgggcatatacctgacaattggattgattaccgtcatcgtatggtcggtacgcaaccatgccgctgtcgtatcgttgttcgaattgtccgggatggaaaccggttcacgaattctcaccaccgtcgccatgctgatctggctacccaacgtcatgctctgggctgtttcctggctcttcggcggcggattcgccatcggtgatttggccagtttcacgttatggctcggccaatccaaagagcttcctgcaataccggcattcggtattctgcccgaaccggtcagcagcgaactatggcgtaccgttgccttgaacgcgcctctcgccatcgctgcgctcgtgggcctgctggctgtattcctaccgcaaggattcgcctgcagaccgttgaatatacggaatgcgtccacccgcggcccagtactggtttcgctgatctactccgccgggtcattctgcctgagcgcgatgctgatctcactggcatccacattgctgttcgctctgtccaatggatcgcttggcgatcatcgtctcgctcacattggcgtcgacgtcatggcctccaccagagtcgtcggtcattcgaccgcattgggatttaccgcggcatggctgctcgcgctgattggcacagtgctcgttttttcgataggctggttggttgggaggatcaatgattcccgcaccaccgccgcgaccccgaagaccgtcatcgtccgtcaggcgcggtccctggcgtcacaaccacaagaatccaaggaggaacaggatgacaaacacgaaccgaccgatccgtcgggcactggtctcggtctttcataaggaaggcatcgaagtactcgcggaagcgttcgtgaaggccggcaccgaagtcgtttccaccggttcgaccgccaggaagctcgccgagctgggcgtcaaggtaaccgaggtgtccgatgtcaccggattccccgaatgcctcgacggccgcgtcaagacgctgcatccgtacattcacgccggcattctggctgatatgaccaaccccgagcatgccaagcagctcgaggagttcggcatcaagccgttcgacttggtggtcgtcaacctgtacccgttcgccgacaccgtgcgctccggcgccaacgaggccgataccatcgagaagatcgacatcggcggcccctccatggtgcgcggcgcggccaagaaccacgccaccgtggccatcgtcaccgacccggccgattatgcactggtcgcctcccgcgtggccgatggcaccggcttctctctggacgagcgcaagtggcttgcagccaaggccttcgcgcacaccgccgcctatgacgccaccatcaacgagtggaccgccaagcactggcccaagccggcctctctggacgccgtcgaggtggacaaggacgatcagggcactgaagtcgattccgccaagttcccggcccagttcacccgcacctgggatcgtgcgcacaccctgcgctacggtgagaactcccaccagcaggccgccctctacattgacccgctcaaccagaccggtttcgcccacgccgagcagctcggcggcaagccgatgagctacaacaactacgtggacgcggacgccgcctggcgcactgtatgggatatggctcccgccattgccgtggccgtagtcaagcacaacaatccgtgcggtctggccatcggcgcgaccgcggccgaggcccacaagaaggctcacgcctgcgacccgatgagcgcctacggcggtgtgatcgcctgcaactccaaggtcactcttgagatggccgaaagcgtgcgcccgattttcaccgaagtcatcgtcgcccccgactatgagccggccgcgctcgaactgctgcagaccaagaagaagaacctgcgcatcctcaaggtggccgagccaccgaagggccacgaggccatccgccagctcgatggcggcctgcttgtgcaggacaccgatctgatcaacgccgtcggcgacgatccggacgcctggaagctcgtggccggcgatgccgccgacgccgacacgctgaaggacctcgtgttcgcatggcgtgcaatccgctgcgtgaagtccaacgccatcctgctggcccacgaccaggccacggtcggcatcggcatgggccaagtcaaccgcgtggactcctgccatttggccgtcgagcgcgccaacacgctggccgatggtgccgatcgcgtcaccggtgcggtcgcggcatccgatgcgttcttcccgttcgccgatggtgcccaggtgcttatcgacgcgggcgtcaaggccatcgtgcagcccggcggatccatccgcgatgaggaggtcatcgaagcggccaagaaggccggcgtgaccatgtacctcaccggcacccgccacttcttccactgatcgggactctctgaggggagcagctcagccaaaacgcacaaaggtgggattccgcctgacccgtcaacgggtccaagcggaatcccacctttgctattcgcctgctattgtggtcacgtaaccgttcgacagaaggaatcgcaacatgcacaaccatccctatgtatccgaagcgcatgagggcaagccatggtttgaatggtgcgtactcggcgtcgtcgccgtcatcacactgctggttgctttcggatatacgatggccgccacggtcatacttgccgtgacggccatcatcaccgggcttgttcgcctgattcttcaggacaaaagcccatggaaagtgcgctcagtggcgttcgactccttcatcggcatcgccttgggaatcggcctgctgattacctacttcagcttctttggactcttcggcaacatctttttccgctgaatcgccatcagacgaggcggcctgatcgaagaattcgccatcgtcgagcgtgtccgcgttcgcatcggcatccgtctgtggaagatcggcggcagccggcactttgggagtggtcatcatctgcgcgatgatcatgaccaacgccaccacagcggcggccaagaccgggctaatccagaacacccacagctgttgcagcggattttgcgtaagaccctcattcatcgcggccagtgcgataccggtggagcgggcgggattgagaccggcaccggtaaccgggtagctgatggcggcggccagaccataggcaagacccatggcaatgacatgacggtccgaggactcgccgtgatcacccagagaagacatggcggtggcaacgacaatcagagaggcaacgacctcgacgacaatcgccagcgtaatcgagaacgtaatgccatactgggtcagcagcgagtaagacacggagccgttctcgaaaccgttaacggccggagtcagccacactttggcagctacctgctcggatgtgggcagcagcttgaccacggcgaagccggcggcgatggcaccgatgacctgagcgatcacatagaggatgccatccaggattttcgtcttggaaaccagcacggaggctacggtgatggccggattcagctggccaccggacacgcgggagaagatggcggtgactgcggcatatgccaagccggtagccaacgcgaagaacacgatattgatgccatacacggccgaaccccatgtggagaaggcgtaaatggcaaagcacagcaggaagctgccggccaattcggcgcacacgcgcagggccagcggctgttgcttggtttcttccatgattgttcattccttttcatctgttggaagacgggcgaacccgtacaaacggttgccagtctagcagcagtcctacgttgcggtatgatatataggttggaattggctgggattccagtccgccaactctgaagtatgtatacaaatcgacagtctctgcgatgacagagtctgtccggccacgttgggagaacgatgccaaacgcatattcccgcgctgcgaaagcgcaagacgattccaattccattcgactccagaagctgcttgcccaagcgggattcggttcccgccgcaagtgcgaggacatgattaccgaaggccgtgtcgaggtcgacggtgaactggtcaccgagctcggaactcgcgtcgacccccataagcagcaggtgcgcgtagacggttcgcgcgtacgcgtcaatccgaaccacgtcactctggcactgaacaagccccgcaaggtgctctccgccatggacgacccgaagggccgctacacgttgcgcgacatcgtgggcgacaagtacgagcgcatcttccacatgggccgtctcgactacgattccgagggtcttatcctcatgacgaacgacggcgaactctcgcagcacgtcatgcaccccaagtacgaggtcgaaaagacctacgtcgccacactggaaggcaagatctccggcaccgtatgccgtcgactcgtgaccaccggcgtacagctcgacgacggctggatcaagctcgaccactgcgcgatcatcgactcctcacgcgaccacacgatggtcaaggtcgtgctgcactccggcaagaaccgcatcgtgcgccgtatcttcggctcaatcggcttcccggtcaagcgcttggtgcgcacccagatcggcccgatcaaactcggtgatttgaagcccggttcctaccgcgtgctgtcccagacggaagtccgttcgctgtccaaggaggttggcctgtgattcgcgttgccatcgacggccccgccggcgtgggcaagtcgtccacgtccaaggcgctggccaagtatttcggatacgcctaccttgacacgggcgcgatgtatcgtgcctgcgcttggtggtgcctgaagcagggcatcgatctggacgccgaaaccgtggatgagcgtgtcatcaccgaagcggtgggcgagttcttcaccggcgaccatttcgatatctccgtggacccggacaacccctgcgtattcgccgacgacgaggacatctccgaggccattcgttcctccgaagtctccagccatgtctccaaggtgtcgaacgtcatcccggtgcgcaacgtgctcatcgccgcccagcgcgcctacatcgcccgcgaggcgtcggccgactccttctccggggggttgggcatcgtggccgagggccgcgatatcaccaccgtggtgtccccggacgccgaggtgcgcgtgctgctgaccgcccgtgaggaggtccgtcaggcccgtcgcaccggccaggctgtcaagggcgtgggcgctgaggatgtggccgcgcgcgacaaggccgattccaaggtcaccagcttcctgaccgccgccgatggcgttaccaccatcgacaattccgatctggacttcgcccacacgctcgatctgctcatcggcgtggtcgaggacgccatcgagaaccaagaatacgagcagtatgccgccaatctcgaaggctatgagctggacgaaggcgatgaggatctgatttccggccgtggtttcacggaaggcgcgcgcaaggccggtcccaagccggtgggcgtgctggctgttgtaggccgtccgaacgtgggcaaatcatccctggtcaaccgtatcctcggccgccgtgccgccgttgtggaagacacgccgggcgttacacgagaccgtgtgagctatgacgcggaatgggccggcaccgacttcaagctggtggacacaggaggctgggaagccgacgtggaaggcattgaatccgccatcgcctcacaggcacagattgccgtgaccttggccgatgccgtggtattcgtggtcgatgggcaagtgggcatgaccaccaccgatgagcgcatcgtcaagatgctgcgtgccgccggcaagcctgtcgtgctggccgtcaacaagatcgacgaccaggccagcgaataccttgccgccgaattctggaaactcggcctcggcgaaccatactcgatttccgccatgcacggcaggggagtgggcgacctgctggacgtcgcgctcgacaagctcaagcaggccgagaagacttccggctacctcacgccttccggcctgcgccgcgtggctctggtgggccgcccgaacgtgggcaagtcgtctctgctcaatcagctggcgcgcgaagaacgtgccgtcgtcaacgatttggccggcaccacgcgcgaccccgtcgacgaaatcgtcaacatcgatggcgaggactggctgttcatcgacaccgccggcatcaagcgacgccagcacaagctcacaggcgcggaatattattcctctctgcgcacgcaggccgccatcgagcgctgtgaattggcgctgattctgtttgatgcctcgcagccggtatccgatcaggatttgaaggtcatgtccaccgccgtggatgcgggccgtgcaatcgtgctcgtattcaacaagtgggatgcgatggacgagttcgacaagcagcgtctcgaacgcctgtggaacaccgaattcgaccgtgtgatgtgggccgagcgtgtgaacctgtccgccaagaccggctggcacaccaaccgtctgacgcgagccatggataaggccttggaatcctgggatcagcgtattcctacaggcaagctcaacgccttcctcggcaagatccaggccgcccacccgcacccgttgcgtggtggcaagcagccgcgaatcctcttcgccacgcaggcgtccacgcgcccgccgcgtttcgtgatcttcgccaccggcttcctcgagcacggctaccgccgctacatcgaacgctccctgcgcgaggaattcggcttcgaaggcacgccgattcagatctccgtgaacatccgtgagaagaagaagcggaagtgacacgcgcgtaatttgccagatttcatatatctggtagattatctactcggtgcttttgcaccatcgggccgtagcgcagtttggtagcgcacttgactgggggtcaaggggtcgcgggttcaaatcccgccggcccgaccgattagccccggaattccgccacttctgagtggttgctttccggggcttttccgttttcagacaacatgagacaacatgacgacggacttacctttgtaagccattcgtaatggattaaacacggacttcatcttggcgtggtattggaattatcagggttataggccaaaatgtgtgtccgttttggcttgtgttcctttgtggcggtgggcgttcctcctgttcgagttgtatgggcggggaactcgaggtcggccagaatgtgtgtccggaatggccggtcaggccttgcggca

SEQ ID NO: 3696 - DNA, 19515 bp, Unknown
  R150_10m  MAG No. k141_3553
accgccctatcaggcttcggccggggcggcgtccgcctcgccatcggcctcatcctcggccgtgttcagacccaggtcgaccggcgaggagctgtgctcccacggctcctcccacggatcgtaatctgggttctgctgcttgtagatgtacaagccaacaagcgcggcgagcaatccgccgaacagcagcgcgaagaacttccaaccgttagaagacttgttctccatgacggctcctttccctagggatcgtctggtcggtatgcccattcagaccgactctgctccctattctaggccgctgtttgtgacgattgggtggaatgacattcgtgggcgattcatccacgcccgcatgccctcggccggctcagcatcttcgcggcgcgtggaacgcatccgagaccttcgatacagtggactgcatgcatattcctacacagcgggagattcgataccagtgggagcgcggtggtccggtgatgacctgggcgctgattggtgcgtgcgtggcagtgtggctactggaggtattgctgggatttattgccccgggcctgaggacttggttgatgtacctcggcatggcggctccggtcagactggtggctgagccgtggacgctcatcacctcgatgttcctgcatgcgccgaactcgctattgcatatcctgttcaacatgatcgccctgtattccgtgggcccagtgctggaacgaatgatcggccactggcggttcttgggactgtatgtgatttccggccttggcggctctctgggacttatggtgtgggctgcggtggctccgggaggcatcggctggcagatggcagcctatggggcttctggagccttatttggcctgtttgcatcattgctggtggtatatcgccgtatcggcgccgatatccgctccatgttgatctggatggcggtgaacttcgccttgccgtttgtggtcgggggcgtggcgtggcaggcgcatgtcggcggctttgtagtgggtggaatactcacatggctgctggtgggtggtgtgccggcgtggcgaggtaaaagcctgaaatggcgtatgcaggtttacggctgggccatggtggtgctggtcgttgtgttgattctgttatgcaatatggccaatccttacgggtggatgagtttcggctccctgcactgatatggcttgatacggctgtaaaaaacgattgatgccgggtattgcggaacatgcagtgcccggcatcagtgtatgtacggaaagcggcgatgtggatattagcgatgtggatatcgtcattcggtgagtgggcatgcgctgtatgaaggtatccacagtaatgaaggtatccacagtaatgaagatatccacagtaatgagatgcgcgcaatgacgagttatccacgataacgagttatccacaatggtgacttgtgcacaagtgtgtagaaaagtgcataagactgtggataacttatgtggataagttaggaatgccgcggtattactgggtttgttgcagtggataactcgggtgtataactgttccctcgctgtggcgatatatgccaagccaaagttatgcacgagatatacaccgagaaacgccgcttatccaccacttatccacatggttttccacattcggtggaaaactacatgggtgtgattcatccacaggctgtggataacgtagtggataagtcgtggataagtcgtggataagtggtggatagctgtggatgaacaggtgaaggcacgaaaaaggccggcctccgcatacgggaggtcggcctttcgcataagaactaagaacaacctaacgatagaaaaaacgatctaccgatagataagcgcaacgagtcggaactcagcgccatcccatcgtcatcaggaatccgatcatgatcagggcgaagccgatgcccaggttccacgcgccgatgttcggaatcggccaggagccggacggggagaggtagtacaccacacaccaaatcaggccgatgatcataaacgcgcagaacagcggcacgaaccaacgcgggttcgacttggtgcccttaatggtttcttcaacacgcttggtgttctccgcctgacggttcatcatgcgctgcatctgcggggtcagcgtggccttatcggcagtggcgttgagcacggcctgcacctgctccatattcacgccgtaagccgcgtcttcctcggcagaagtgttctctgcgttctgctcggtgtctttgttggcggtctcgtcagcagcggtgctggatgaggtctcgctctgccagtccttctggttgttcgagtcggtctcgtgcagctcttcgtcagccatcagcatagtctccattcaataggctaaaagtcataatagtggctacactcgaaagcggcgaccagagtcggcaagaagacaggaaattcatggccagacatgtaggtaagcacggcgcacggcactccctatggggtggtgtcgcggtattcgtcgtcattgccttgaccggttttctgctgagcaccaacgtgagggtcaatcgtacggttgccgccaccaacgatacggccgatctggtggagcaaggcgtggacgaggccaaccagctgcagcaggacgtcagcgatctgaccaaacaggtcgccaatcttacggacgcgctcaaggccgatggcaccgacggtactgacagcacgcagaaccaaggcaaggactccagcaatgtggattccagcctgatgctgcccgcgctcagcggcagcggcgtaacggtaacgctggatgattctccgttatgggagaacgccgtcaacaacaatggcacgaccgccaatatcaacgattacgtgattcatcagcaggacgtcgaatcggtggtgaatgccttgtgggccggcggtgccgatgcgctgatgattatggatcagcgggtgctgttcaattcggcggtcatctgttccggcaacgtgctgtcgttgcacggtaagaaatactcgccgccattcaccatttccgcgattggtgacccgcaaagacttcgcgcagcgttgaacgactccgaagccattaccattcttaagcaatatgtgaccgcgtttggcattggctacaaggtggagaatgccgagggccttcagttccccgctaccgccgccttgctgcagcagttgaaatatgccacggtcgatacgtcaaagaccacagatgaggagcagactcagcaatgagacacggcaggcacaacagcggcgcaccggcgcccattgatctcgcgtccgtgtcggacgtacagcccttccccgaggacgacgccgcacgaatggcggcagacccggccaatgccagcagggcaaggtcccgtcgtgccgcagtacgcggcgcgtcttcgccccagcggagcctgatctggcaggcactcggcatctgcgccgaactgctgattaccgctgccgtgatttgcgccctgtacatcgtctggcagatgtggtggaccggtgtcgaggcggagcgagcccagaacgaaaccacccagtccgtcgactggagcgaccccagcaacaacgggggaacggtcaccatcgccaaagcccaggagggcgatgctccagtacagccgaaagacgcgaaatatggcgacttgattgcgcagatctacattccgcgcttcggctcccaatggcatcgcaacatcgtggaaggcaccacgctcgagcagctcaatcgccacggtctgggccattacgacaccacccagatgccggggcaggtcggcaacttcgccgtcgccggccaccgcaacggctacgggcagccgttgggcgatgtggacaagttgcaggaaggcgatcccatcatcgttcgtaccaaggattactggtacgtctaccactacacccggtacgagattgtgctgcccacggacgtgtatgtgatcgcgcccaatccggaagactccactgccaatcccaccaaacgcatgatcacactgaccacctgtgagccgaaatactccacccccacccatcgatggatcagctatggtgagttggcgtactgggccaaagtgtctgatggcgtgcccaaagagctggctactactgattcgtccggtgcagtgaagttctccaccaccgaaaccccctcgatcgcttcccgcattggctcgctggacaaggtggtattcggcgcgctggtagtgtggctggttctgttcatcgccgctgcggtggcatggcgctggccggtgctgcgcgagattcgcgcgggtgagcgtcgccgcccggatgccagcatctatggcggactgttgcgtctgcagcccggcgtggcaccgattcgatggctgctgctggctctgctgctgttcgcagccgccgcggcgctgttccagtggggattcccttgggccgccgccaatattccattcctacagcagatgtcgaacttcgtggcagtgagctgacggcagcctagtactatggcttgcagtacacgtccctcaaggagagccctatgaccgattccgcgcatattttggtggtggataactacgattccttcgtctacacgatcgtaggctatctgcaaacccttggcgccactgttgatgtggtgcgtaacgacgctatcgacccagccgcgccgggtgtactggacggttacgatggcgtgctgatttctcccggccctggcgctccggccgaatccggtgccagtgaggatatgattcgcctgtgcgcggccagcggcgtgccgatgtttggtgtgtgcctgggcttgcaggcgctcgccgaggtgtacggctgcacggtgggccacgcgcccaccatcatgcacggcaagaccagcccggtggagcatgccgatgacgagattttcgagggcgtggccaatcccatgaccgccacccgctaccattcattggccgttgagcccgattcggtgccggatacgctggtggtcaccgcgtggacgcaggatgaccacaccattcagggcatcaaggtcaaggacaagccgatgtatgccgtccagttccatcccgagtcggtgatgacccaggacggctaccgtctattggccaactggcttaaggtctgcggccaagacaacgccgtggccaagtccgccggccttcagcccaaggttacgaagtagcttttccgcgcgcggcgacgctttcccgggaatgttgcgctgggatagctctttatacagcaaaggggaggggtgcagaagcccctcccctttgcgttgtgtgattgcgttgcgtgtttacgttgcgcatgtgttgcgcatgtgttgcgctatgtgcgttgcgtatgcgcaacacacacgcccggcgctcactcactcacgggttccgccccccgttgccgttgttggcaccgttgccattgccaccgtctccggtaccggtgtcgcctccggtgctgccggccttcgtggtaatggtgacggtcgatcccgcatctacttggctgccagcgccaggattgatgctgactaccacagcggtgctgtcggttgggccactggcctgagccttgaggcccacggccttgagcatgagttcggcggtggcgtagtcagtgccagcggtgatattcggtacagcgaccttttccttgcccgtggacacccagatggtgatggacccgccctgcgcgatggaagagcccgaatcggggcttacgcgggtaatcagaccggcctccaccgtatcggagctttcctgctccacggtgaagctgaacttgccctcatactgctgtagcacgctgtccttcgactgaccgaccaaattgctcggtacggtggtcatgccggaagaaacatatatggtgatggtggtgcccttgggaaccgactgaccggcggcaggatcggttctcgtcaccatatccttggcgatgtcggcgctgtcttcggttttgacggtggcgttcaccttgaacccggcgctttccagaatgctgcgcgcctcttcctggctgcgctccttgacatccggaacctgagtggactgcgggcctgcggagaaccacaccttcacggcagatcccctggccaccttggagccggcgtccgggctcatcttggtgcaggtgccttccggctcggtggagtcggtgtcttgcttttcggtcatcttcaagcccaatctctcaagcttgagcttgatgttgtccttggacgtggaagcgttgcacacttcagggatggtgacggtgtcttcagaggacttgttgtcggagccgttcatggcgaacatgatgcccacaatgacgagcaccgcgacaatcgccgcgatcgccgaaccgatgatgatcttcttgcgcttcttggccttggccgccgccgcacgctgctgcgcacgggactgcaacgccgctgagttggcaccattggccggtggaatctgctcgaactgaccggtcaccgggttgaatgcctgggtgggctgctgctgcggttccaccggcgtggtgggcaaatcacgttcggcttccttgcgggccttcatattcgacaggtccgtcaatgggttgaacgcggccgccaccggcacgccgccgttcatgtaggtcaggatgtcggtcttgaattcggaggccgtggcgtagcggttctggcggtccttggccatggccttggcgcagattgaatcccacatcttcggcagccccggcaccacggcggatggcggcgtggcgacttcggagacatgctggtaggcgatggccacagcggaatcgccggtaaacggcgggcgcccggtaagcatctcgtagagcacgcagccggcggaatacaggtcggaacgcatgtcgacggtctcgccgcgcgcctgctcgggagaaaggtactgtgcggtgcccaccacgccctgcgactgggtcatggtggttgcggaatcgtccagagcgcgggcgatgccgaagtccatgaccttgaccgcgccctgctcggaaatcatgatgttgccgggcttgatatcgcggtggataatgcccatgcgatgcgaatagtcgagcgcgttaagcacgcccaacatcacctgttcgcagtcgcgctggctgagtgcgccgttgaccttgatgatgtcgcgcagggtctggcccttgacgtattccatgacgatgtacggcaaacgctcggtatcgccgctttcggaagaaaccagttcttcgcccgaatcgtagatgttcacgatgttcgggttgttcatctgggccacggcgtgtgcttcgcggcggaaacgggccaggaagatgtcgtcgttggccagatcggcgcgcatgattttcacggccacggtacggcccagacgggtgtcaagagccacgtggacctcggccatgccgccacgaccgatgagctggccaagctggtagcgtccgccggccaatgcggtgggcatactggtgctcattgcttattccctcccaatcttgaggccggggcctccaaaacaatgcgtggcgtgctggtcactcggcgcggcagtcgattgccggacgtggccatggcggtgtcggccatttcggtctgctgatccagcagacggcgttcgatgcgtgccagcgtacgggacaccaccagcgcgtctttcgggcgatccaacgggtccttggccagcatcgacatgacaaattcgcgtaactggacgtccaccgagttcggcagcggaggcacgggattgttcacgtgcgctgcggcgatatcgaccggagtggtgccggtgaacggacgatgcccggcaaggccctcgtacgccactacgcccagtgaatagatgtccgattgcggcgtggcctgctggccctgcgcctgctcgggggagatgtattgtgcggtgcccaccaccatgccgtcctgggtgatctggccttggccggtggagtagctcacgccgaaatcggtgatcttcacttcgccggtgtcggaaaccatgatgttggccggcttgacgtcacgatgaatcacgccgtgcgagtgggccacgaataggcctcgcgcggtctgaatcagaatgggcagcagttcgatgggatccatcgcgcccttgctatggaacagatccgccaacgatttcgaggggacgtattccataatcagaaagccgatgccgtcatgctcgtagtattcgaacaacgcagcgatgttcgggtgcgccagattggcggaattatgggcttcggcacgcaggcggcgcaacttggcctcggcgttggtcacgtccgagcgcagcgccttgatggccacttcacggccgagctgaatatcgtagcctttccagacctcgcccataccgccttgcgcaagacgcgaatcaagacgatatcggcggtgaataagctgtccttcgataagtttcactgttgcaaagcctcctgcatcatcgcgcgcatgatcgggccagcggcgagcgaaccgtgtacatctgtgttatgcaccaacaccgcgacggcgatttgcggattgtccgccggcgcgaaaccgatcgcccagccgtcgatggcagagttgtcgataccgatttgtgcggtaccggttttggtcgccaccttgatgccgtcgatggccagctgcggattggcctcggtcatcacgctctccatcatcgtggtgagcttgtctgcggaatccttgctgaacgcgttggccatggtttgcggtttggtctgcgaaagtacggtgagatcggcggcgcgcacacgatcgaccagcgtgggctgcatcagtttgccattgttggcgattgcctgcgcgaccatcgccatctgcaacggcgtggccgtggtgtcgccttggccgatggatgccagcgcaagcttgtcgtcggtcggatcagaggggaatgtggacgcggtggccgtcatcggggtgcccgtggattcggtgccgtcaatggtgatggtgctgccgaacccgagcttggtggccatgtccgaaaccttgctcgcgccgagtttcacgccaagctgggcgaaagcggtgttggacgaccatgcgacggcctcttgcagggagatctgtccgttgacgccatcgccctgtgcctcgtcgttcggcagctgtgtggcggttcccggcaaggtatagctggagcctgcaggaatcttcgtgtccgtctgataatcgccggtttccagcgcagccaaggcgacgatggtcttgaacgtggaccctggcgggtacagctgcgaggtggcgcggttgattagcgggctattttgattttggcccgcagagagttcgttgtaggactgagacgcggctttggcgtcatgggtcgccagtttgttcggatcgtagctgggcgtgctcaccatggcgaggatacggccggtgttgacttcgatggccaccgccgcaccatcgcgcgtaccgagctgatcgtaggcaacctgctgcagcttggggtcgatggaggtttcgatggacgcgccctgattcgtagtgccggtgagcatggccttggcccgctgccagatcaatgaatcggcctcaccgttgagcagcatgctgcgggaggcttccaggccgcgatcggcggtctggttgatggagaagaagccggtgaccggagcatacagcggaccgttggaataggtgcgcaggtatttgaacgcgtcgttgaccggttcggatttggccatgaccgtgccgtccgaggccagaatggcaccgcggtaggcaccgagctggtggtacagcgaacgggcgttgcgcggatcgttgttcagcgcgttggcccgtaccgccatgatgatggtggacgacaggccgagaatcacgaacagcgcgaccacggcggtgaaaagctgacgaagatatttgttcatacgcgagtgcctccgttaacgggaggaagcgggggaatcgtaccggtaggcgtgtacggttcatcggcgccggcatacgccggagtggtggcatccacaatgggctcggcgatgggggccgcagcagagcccgcagaggtcacaattgcgggcacttcgggtgcctcaagtgtgtctggcgcgtgcttggtgatgtccacaatggggtcgtcaaacgattccgcctcggactgcgacgccgtagccgacgcgctgcgaggctgaacgatcggctcagtggcgcgggctcgggcctcaagttccttgttgcgcagcacggccaaagcctcgtactggaacgtatccgaggtcagctccggctcgggcgcattggccgagttcgagatgatgatgagcagggtcgcgagaatatagttggcgatcagactggagccgccggccgccatatagggcagggtcagaccggtcagaggaatcaccagcgtgatgccgccgaccacggtgaacacttggaaggccatggtgaacaccagtccggaagcgagcagcttgccgaagccatccttgattttcatggcggtgatgaagccggaggcaatgatgagcaggtagagcatcaaaatggccaggacgcccatcagaccgagttcctcgcccagagaggcgtagatgaaatcggagttcgcgaacgtaacgagcgaaggatggccttggccgagaccggtgccgagcatgccgcctgatgccaggccgaaaatgccggtgaccagctgccaggagccgccgggggtcttgttgtattgctcgttgctgaacgggtgcagccaggcgtcgatgcgctgacccacgtggctgaacatgcctgcggccagcacggcacccgcggcgaacgcgatcagaccgatgatgatccagcttttacggccggtggccgtgtacagcatggccacgaacatggcgaagaacataagcgaggtgcccagatcatgctgcatgacgagcacgcccatcgaggcgatccacaccacgatgatcgggccgagatccttgatacgcggcagctgcagaccgagcatcttcttaccgcccacggccagctggtcgcgatgatcgaacaggtaggcagcgaagaagaacgcgaggaacagtttggcgaactcgcccggctggaactggcccaatcccggaatcctgatccagatgcgcgcgccgttcacctccatgccgatgaacggcagcatcggggcgagcagcagcaccaggcccaccaccatcgacacataggagaagcgtcgtagcacgcggtagtccttcaggaagatgatgagcagcgcggaaagcacgatggcgatgcacagccacaccagctggcgttgggccaccgcccaaccttcgctctggtcgatgcgggcgatcatggtcacgccggtggcggtcagcagtagcacgcaaggcagaatcgactggctggcgtacggctggaagcgcacaatcagcccccacagcaccagaaacagcactacgaccaatgccagcatgccggcgtattgcatagggaattcgccggcggtgcgttggaacatctggatgaacgccaacgcgctgatcgccatggcaatcagcaacaaggaaatctgacgtagacgggtagcgatcattgagaatcccccgtggccgcgttgtcggccgctccgataccggatttatccgaggaatcagatgagcttgacgaaccggactggctggacgaatccttggtgctgtccttggaatcgctctgggaactgtctttggaactgtccagggaattggacgcctcggccttcttggcggcgtcggcttcctgctgcttggccagtttgcgcatttcggtgcggatgatacccacatgcgactgcgcttcgtccaacgaaccgactgtgatgccttggctcagctggtcacgccatgtctgaggcaggtccgcggtggcgatattggtggtctgcacttcgtgcgaaagctcaagtccaaagagattggtcggcacgccacgataaatggccacggtgccgttgctatctcccacgtagtagtgcgtctggctccacgtgtacacgccccagccagcgccggccaaggccagcacggcaagaatgcaggtaataatcaccgcaagcttattgcggcgcttcttggtgcgcgtggccttcttctgctcgatctgctcatcgcggatggctttggccacatccgggtcgttggggtcggcggacaggcgcccatccggcttttgcaccaccggaatctcaccggtatcgggattggctcgttcaccggtctcctcgcggacggtggacggctgcaccacgcgtgtggacgacggttcggccgtggtttgcgcggcctccgtctcgtgcgcgctggcgggctgaatcaatgctgcggcgcgctgggcgggggaatcatcctcacgcagcgcgggcgcggtagccaccggctcgttgacgatgtcggcgatcggctcaagattacggctggcggcaccgccgaccaacggcgtttggtgcggcagatcgaacgcatcggcatccaacgccaacgtggcatccgcaataacggccgtgacattatcggtgctgcctgcccgcagtgccatctgcaccagacgctgcgcgcattcgccctgatcggacagcgtggtcatcgtctcttcgatggtggaatcttccagcacaccgcacaggccgtccgagcacagcagccaacggtcggcggggtgggctcggcgaatcgaaatatccgggcgcgggtcaatgtcaaagtcgccaagcacgcgcatcacgacgttgcgctgcgggtggttcttggcttcggacggggtgatacgaccggtgttgatgaggtgttgcacgtagctgtggtcgcacgtgatgcggctcaggtgtccgtcgcgcagcaggtaggcgcgcgaatcgccgatatgggcgatgacccagtagccggccaccaatgccactgcggtaacggtggtgcccatgccggcaagcttgcgttcgcgcttggccttgccgacgatggcgtcatgcgcggccataacggaggtttccatcatgcgggagatcgtctcgacgttgccgccggtgtcgtcctgctcgatgtgggccagtgaccggatggcgatggaggatgccgtatcgccgccggcgtgaccgcccatgccgtcgcacatggcgatgagatgctcgccggcgaaggaggaatcctgattgttcgcgcgcacagtgcccacatcggacaccgtggtggaatacaggaacagcggttgtgaagcggcggattttggcatgcggctacctcagttcgaaggtggtggcgccgatgcgcacaggaatacgagcgggcaggatggtggggcggttgatgcgctgctggttgaccacggtgccattggtggagttcaggtcttcaatggcccactgcccggagcgcgtgtcacggtagacgcgggcatggtgggaagacacgaattcgtcatcgagcaccacggtgttcgaggcggcgcggccaagcgcgatgtcggcttcggccagcggcacggagctgccggcaagcggaccatcgatgatgaccaacagggtaggctgcgccgaggcgacggacgacgcggaagcgctgggccggcgatgcgggcgcggcgcagctgcctgtggcgtttcggccttggccttatgcacttcacgctcacgacggcgacgcgcgcgcgaaggtcgcggactgaacgtctcgatgtccttgcgcagcgaacgcacggccagccagatgaatatccacagcaggatcaggaatccatacttgagcagggcgaatgtcagttcggtcataagtggacgactttcgggcgtgtgctcgactactcctgggcttgggcggaggcccagtacaggatgcgggtacggccgatggtgatggtgttgccatcgagcagcgtggcggcgggcacttggtggccctccacgtacgtgccgttggtcgaacccaggtcgcgggcgatcacgccgttatccgtgatgtcgatttccaggtgcttgcgggagatgcccggatcgtcgatgacgatatcgcagccggaaccgcggccgattaccgtcttgtctttggtgagcaggtactggttgccgttcacctcgagcaccgggctgtcctcggtctgcgcatcggtggtgaccggcacggcattgccctgcacggattcggaggtgaggttgaagttgcccttggacaggtcaaggtcttcctcgaagatcacgatcaccgggcccacgaaggcgtaatgctggctcttcgcgtactcggtgaggttatcggccagttcgttggccagggtctcgctaccccatgcctcgatacggtcgaagtcaggagtactgagcttgaaacggtattcattcggggccaccgtgcggtcacggcccacgggcatggcctcggcgtcaatctcgcgctccaaggcgctggaaagatcgacaggctgcaggtctttggagccaaacttggcgaatactccgttgactgcaccctccacgcttttttcaaaacggtcgagaacgctcatagtcctccctttctaatcctcacccatcctacgcggtgatgggaatatgaggcaaaaaaccggtctttcacatgacgatgggtgcaaaatatccaaaaatatccaaaaattcagggcggaaatgggtgcggcgcaccacctgcgccgtttttccgcatgccgtgtgggcgcgggccccgggcgtgccgcggacgtcacggcccacggcgcgcccggggccggtcaggccagggcgtcgcgcaggaagtcgcgctggagggtgagcaggttttcggctacggtctcgtcgttggtcatatgggtgatgcccgtcaacggcaggaaggtgtgcgggcgacccgccgccatcagggcttgcgagaggcgcaggctatgggcgatggtgacgttgtcgtcggcgaaaccgtggatcagcataagcgggcgctcgagtttcggtgcgtcctgcacgatgccgttgcggtagtagacatccgggtcgaggcccagatagcgctcggtgtaatgcgtgtcgtacagcgtccagtcggtgggcggggcgccggcgcacgcggccttgaacacgttcggcgcgtccagcacggccagtgcggacaggaagccgccgtacgaccagccgatcatacacaccttgtcgaggtccggtgcgggaacgccgggcctgcgcccatcggcgttgagcctggagacggcctcgggaagggcgttgacggcttcgatctgatcggccagcgtcacgcccttcatgttctcgaagattgcgcgatcccaggccgggccgcggcctgtggtgccacggccgtccgccgtgaccaccaggaagccctggtcggcccaccactggccctcccagtagaaggactgggaggcgacgacctgctggaagccgggcccgccgtacggcttcatcagcaccggcagtttgtcggcatgggcgtacgggctggacgggctcggcgcgatgatcgccgtgtacaaccggtgctcgcccagccgcgtgaacgtgacgttcggcgtgaacccgggttccgcggcggtgctggtgatgtcggcggcggtgatgtcggtggtgttggcggcatcgctggtgttggcggcgatgacggcatcggtgacgccgccgacggcgcgtcgcgtgacgatgtgccgcatccgggcgcgggcggaacgcatatcgcgcccagacaccaccatgccgcgtgcgccgcgtgaggccgtccactgaccgggctcggtcgtgatcggcgcgaccgagccgtcatatcccatgctcaccacatcgaagctgcgggcgtcatggccgccgaacagagactcggcatccgaagcggcacccgagccggcccaggctcgcggcacctcggtcgcgatttcgggcgcacgctgcaccacggccagcacatcctcgtcggtcacggcgagcaccgtgcgcacgttccagccagccggcgtgaacggtcggccgtccaccgtcagacggttggtatccgtggccatatcgttgagcgagcacaccagacgatcatccggcgtgtaggcgggcgtgccgtgaaccaagtcgatccactgctcgttcgcgtgctcctcaagcacacgcgtggcgcccagcgcggccccatccgccgcgaccgccacctcgagcacctggtcgcgggtctggcggcggttctgcaccagcaccagcggatcgtggccgcgacgccagctcacggcggccacatactcatacgcctcacgatcccaatccacatcggcgttgccggtgatgcccgcgtaccggtcgttctcatcgaacgccagcgtgatcacggtcaggtacacgtcggcgttgcgggtcagcgcgcgcgggtagcggcggccggcggccggcttctcggggtcggccggatcgctgatgtaccaggtcggctcgtcggcggtgtcgaaggattcgaacagcacatgctgcgaatccggggcccaccagaaaccgtcgtaacggtccatctcctcgccggccacgaactcggccagaccgattttccacgtgttttcggccggattgtcgtcctcatcctccacgctcacgccgtagaccgcggtgatgcggtcacccagctcgccgccgatatcgaccagcatcaggtagctgcccgtggtgtacagcacatgctcgccatccggggcgatgcgcgggttcagcaccggcgtgtacatctccgggtcctcatcgagccattcgccggccagttcgcgggtgtgcggctcgggtgcgccggtctcgtcattccaatcgatgtcggtcaggaacaggcggccgttgatggtgaacacgatgcgattgccgtcatcgtctgcggagtagccgacgatgccggtgccgccttcgcgcgcacgctcgcggcgggccttctcctcggccggcacgtcctcgctgtcggcggttgcgccaagcagttcgcgcggatcggccagcttggtctcatggtgttcgccggactcgtcgaaccagcttagccacagtgcggtcaccagatcctcggggccgtcggagcgcaggaacagggcccgcgagccgtcgcccacggtctgtgcggagcgcggtgcgccgcagccgaaccgcagcgtgcgcgccctgaggcgtgggaaatgcttgattgcgtcattgacatcattggtttcgctcatacctcacaacctacgcgcctgtgcggtcagcggcgtgaggcttgtcctaagatgggagccatgcaggtgacgatgatcgacgaaaacaagtacgccgaaacgatgaccgacgtggtgctgcccgcgctcgaacaatgctgcgaggagggctggttcgatccgtccgccgccgaacgttcggccgggatcgagccgctgtccggcattatggacaccggcggccgctcgggccagctgcactacctgtgctacgactccgccaaattcgacgcgattcgcgagcaaggcgccaccgccaccttccgcggggccatcgtcatcagccacggcttcaccgagttcgccgaaaagtacgacgagctcgtctggtacttcctgcttgccggctactcggtgtgtgtactcgagcatcgcggccacggcaagtccgcgcgcgacgtggacaaccgctgcatggtgtggattgatgactggcagcgctacgtggccgatctggccggcttcgccgaaaccatcggccagcagtacgcggccggcatgccgctgaacctgttctgccattcgatgggcggcggcatcggcgcggccgtgttggagcgataccccaccctgttcgacaaagcggtgctctccgccccgatggtcgcccccgccaccggcatgccgctgggcgtggcccgtgtgctggtcggcgcgctgtgcggactcggcttcggcaagaagcgtgtgttcgggcagtcggacttcacgccggagttctcgatggaaggcaacgagggcgcttccgaggcgcgtgaacgctggtacttcaagctgcgttgcgagaatagcgaataccagacctactgcgcggcgttcgaatgggtgcgccaggcgttgaagctcaaccgggccatactgaatccgtccgcctgcgccgaagtggagacgccggtgctgctcttccagtccggacgcgacatctgggtactcaataagccgcagaatcacttcgtccaactggtcaaggacggcggcggcgaggcgaacatcgtgcgcttccccgaatcgcgccacgaaatcttctccatgcccaacagcacttacaagccctacctcgaaaagatcctcggcttctacgacgaccccatgattgcctgcgccgcgtactgatgtagctcttcacccattgttcaccgtgcggtcaccttgtggcccggcccgctttagatggcgggagagccatggaattatgggcataatgtcttctctccgccgccgcggttgcggccgcggtatgtgccggcgtgctcgcgttgaccggttgcacggcgttcaataattccgatgacggcacagcggacggcaacggcacgtccgccaccacgcagaccttccagccgtccggcggcaaaccgactgccaccctgagcattgcctccggctccgaaaacaaggaagtcgccgtcgccatccagaaagcggccgaccaatccaacgtagccgtgacgatgcactacatgggttcgctggagattatgaacgcgctcaaggccggcggccaggatcacgacgccgtctggcctgcctcctcgatgtggatttcgatgggagacaccaagcacatcgtcaaagacgcggccagcacctccaccacgccgatcgtgttcggcatcgccaaatccaaggccgtcaaactcggctgggctgacgacaccggcgccaccaagcccgtctccaccgcggacatcctcgccgcggtcagcgacggcaaactcacgttctccatgacctccgccacggtgatcgacagcgcgctcaacgtctaccagaccgcgctcaggaaacccagctggaccatttgggtggtcgattactccggttcgatgtctggagagggcaagaacggcgtggtcaaaggcctgaacgcggcgctcgacccggaccaggccaagaagtcgtacatcgagcccgccagcggcgacgtgaacattctcatcccgtttgaaaccgaggcccaccgcccggtcaaggccactggcacaagcaccagcgacctgctgcatgaggccgatgccaccgatgccagcggcggcaccgatatctatgaaggcctgctgagcgcgctcgacgagctgcccagcgagtcggaagcctcgcaatacaccaccgccatcgtgctcatgaccgacggccgctccaactccgatcatcaggacgaattcgaaagcgcctataagtcgcgcggccgtgatctgccgatcttctccatcatgttcggcgggttaagggtcaaaatgtgtgtctggctcggcgtgtcgcgggggttagatttggcctttttgaatgccgattgagtgggtgtagtcggtgtcgatagcgttgtcgtagagggctgggcgtcctgtttcgtggtcggct

SEQ ID NO: 3697 - DNA, 23211 bp, Unknown
  R150_10m  MAG No. k141_3656
caccggcgaccatgagccggtggcgatggacgcgcgcgaactgcccgaggacgtgaacgaactggcccgcgtgctcgaaaacgtcgatgtgctcggccgcgtgctgcctgaccagaagaaggccatcgtgcaggcgttgcacacgcagaaccacgtggttgccatgaccggcgacggcgtcaacgacgcgctcgccatcaaggaggcggacctcggcatcgccatgggcaacgcggcacccgccaccaaggccgtggcccaggtggtgctggtggattccaagttctcgcacctgccggacgtcgtggcacgaggccgtcaggtcatggccaatatggagcgcgtggccagcctgttcctcgtcaaaaccgtgtactccgcgttgatctcgctcggtgtagtgctgacgcaaatcccatacccatacctgccgcgccatatcacgtatatcggcgctctcaccatcggcatgcccgcgttcatcctggcgctcgcgccgaacacgcgccgctatattccgggattcctcaagcgcgtggtcacgttcgcgctgccgggcggcatcgccaccgcgctgtcggtgctgctggccgcttgggtgctgccgccggtcatgggctggaacgtgaccggcgatgccgcggacctgtccgccctgcgcgccaccagcgccatcatcctgttcgcgatgggcgtgttcgtgctggcccgcgtggccagaccactcaacggttggcgtggcgtgctggtggcggtgttcgcggcggcgggcgtgatcggcgcgttcgtcccgttcgtggcgaacttcttcgccctgattctgccgaccggcgccacgatggtggccacgctgatcgcgttggccggttccgcgctgatcttcgcgctgtgcctgtggctggcgccgctcgtgcgcggactgacgggcaagctctcgcgtcggcattgagacggcggcgcgattgtctcatacttcaagccgacacgccagagcctcggtaacgtgcccgtaccatgtgtagcggataatcagcggcatcataagccgattcatgatttcggaggaagcatgtccttacgcgacgaccagctggctaccctcaaggcagccggcaaggacttcgattactacaacatcgccaatctcgacggcatcgatcatctgccgtactcgctgaaggtactggtcgagaatctggtgcgcaacatcgacggtgccaacatcaccgacgagcacgtcaagaccctgctcgactgggatccgaacgccgaacccagccacgaaatccagttcacgccgtcccgcgtgatcatgcaggacttcaccggcgtgccctgcatcgtggacctcgccaccatgcgtgacgcggtcaaggacctcggcggcgacccggaggtcatcaacccgcaggtccagtccgatatggtcatcgaccactctgtgcagatcgacaagtacggcatcgccgacgcggtccagcaaaacatggacatcgaataccagcgcaacggtgaacgctaccagttcctgcgctggggtcagcaggcattcaagaacttccgcgtggtgccgccgggaaccggcattatccaccaggtcaacatcgaatacttggccaaggtggtcatgagcaaggccgaggccaacggcaacacgctcgcctacctcgactcctgcgtgggcaccgactcgcacaccaccaccgaaaacggtctgggcgtgctcggctggggcgtcggcggcattgaagccgaggccgccatgcttggccagccgatctccatgctcgtgccgcgcgtggtcggcttcaagctcaccggctccatcccggagggcgttaccgccaccgatgtggtcctgaccatcaccgacatgctccgcaagcacggcgtggtcggtaagttcgtggaattctacggcgaaggcatcgcctccgtgccgctggccaaccgcgccaccatcggcaacatgggccccgagttcggctccacctgcggcatcttcccgattgacaatgtcacgctcgactacctgcgcctgaccggccgctccgaagagcaggtcgcgttggtcgaagcctacgccaaggccaacaagctgtggggcgacgcttccgacccggattacgtggaaccgcagtactccgaatacgaggaactcgacctcggtaccgtggtgccgtccatcgctggcccgaagcgcccgcaggaccgcattctgctgtccgaagccaagagcatgttcgagaagaccgcccccgcctacgagaccgagaagaccgtcaaggatccggtggccgtgtccaccgacttccgtggcgatttcgacatcgaaaacggcgacgtggccatcgcctcgatcacctcatgcaccaacacctccaacccgtccgtgatgatcgccgccggcctgatcgcccgcaacgcacatgccaagggccttaagcccaagccctgggtcaagacctcgctggctcccggctcgcaggtcgtggccgactacctgaaggccgcggggctgcaggacgacctcgatgcactcggctaccagctcgtcggcttcggctgcgccacctgcatcggcaactccggcccgctgctgcccgagatttccgaggcgatcaacgccaacgacctgaccgtcaccgccgtgctttccggcaaccgcaacttcgaaggccgcatcagcccggacgtcaagatgaactacctggcctccccgccgctggtcatcgcctacgcgctcgccggcacgatggacttcgacttcgagacccagccgctcggcaccgacgcggacggcaacgatgtgtacttgaaggacatctggcccaccaatgccgaggtcgccgccgtggtcgacggcagcgtgagccgcgagatgttcctcaaggactacgcctccgtgttcgacggcgaccaccgctggaagggcctcgacgtgccggaaggcgagctgttcgcgtggaacgacaagtccacctatgtgcgcaagcagaccttcttcgacggcatgaaggccacgccggacccggtcgccgatatccacggcgcccgtgtgctggccctcctgggcgactcggtcaccaccgaccacatctccccggcaggcgcgttcaaggcctccagcccggccggcaagtacctgaccgagcgcggcgtggagccgaagaacttcaactcttacggttctcgccgaggcaaccacgagatcatggtgcgcggcacgttcggcaacatccgtctgcgcaaccagctgctcgcctccgtgggcgaggaggtgacgcctggcggcttcacctacgacttcctcgccaagaagccgaccacgatcttcgaagcctcccgcgactacatcgacaacaaggtgccgctcgtggtgctcgccggcaaggaatacggcaccggctcctcgcgcgactgggccgccaagggcacggtgatgctcggcgtcaaggccgtgatcaccgaaagcttcgagcgcatccaccgctccaacctgatcggcatgggcgtgctgccgctgcagttcccggcaggcgaatcctatgagtccctgggcctcaacggcaccgagacctacgatatcgccggcgtcgagaagctcaacgagggcgtgacccccaagacggtccacgtcaccgccacccacgaggacggctccaagactgagttcgacgcggtggtccgcatcgacacgcccggtgaggctgactactaccgtaacggcggcatcctccagtacgtgttgcgcaacctcatgaagtaaccaccttcttggctcccctctcttgaggggagctgtcagcgaagctgactgaggggagcaaggccggtatccgccaacggataccggccttttccacgcatgccaaaatgctatactgtatagcatctttggaatggaggttgccatgaccatggtccaaatgaacgttcgcattgatgcgaaactgaagaacgaggtcgaagaagtcctcaagggcaaaggcgtatcggtgagtgacgtaatccggtcgctgtggttgtacatcgccgaccgcaaggaagtgccggcattggaaacgaccgccgaagagcaagcccgcgaggaggaaaagcagcgcaagctgaaactgattcgagaaggtgccggatacgtacacaaggaactggtcaaggccggactgatctcagaagacaccgacctcatggaaggccttacctacaagcagttccgcgacaaaatgtacgacgagcaacttgatgcgtattacaacatgaagagggccgattgatgaccgacgtttccatgcagcgtattttgctcgataccaacgtactgttggactatttgctccatcgcgatgatcacgccaagatggcggaagcggttatggaacttggcgcgaagaacaacgttacgttgttgtgcgcgtcactgtcgctgaaggatatcgcatacctatcatcatcggcgattcgtagcgaattcaaaccgaatgaatcggaagtggagaatttcactcgcggctttctgtcgtcacgggtgccatggcgttgtatcgagcaggtgaaggagatgtgtgacatcgtcgctgtcgatgagtcgacatgtgataaggctttttccctgcaaaaacggcatcgggattttgaagatgatctgatcatcgttgccgcgcaacaatccggtgccaactgtgtggtcacatcggatgccgaactaatcagtcattttcccgaatattgcaaaacaccggctgaaatcgtggcggcgctggaataaatgagcgtgtggctcccctcacggaggggagccaccaatgatgtgccggctactgtagcctactgcgcctgtagacggaactgcttccagatgtcgctgagcttctgaccgttgcgcgtgcgcttccacacgtccagaccgccgccgcgacgtcctccggcggcggcacgggccgcggcggtcggagtcggatattcggagccgtcatccagacggagacgaccgttttcggtgaccgtggcgaaccagcgctcgcccttgcgcggccgctcccacaccagacgctcgcccggcaccagcagaccagcgtcaatcacctgccggatcgtgacgcgccgcgaactatgagacggccgtggagaggtcttcgacaactcatcgacattctgcttggtcagatcacgggcgtccttgtcataccggatgccccagtattccacgatgagtcggaccgactcttcctgccgcgcctccagcagggcaggtgtgcagtcagcgaaatccttcaactgattggtcagcgggaaacgacgtgaatccgcgcgcaacagcatgcggtcgcgacgtgccggatattcactcaacctgtccaactgatcctcagggccctgcaccagcgccatattgccgagtcggtacatccagaaatcatgctgatcctgcggccagtccgcaaacgatttcgaccgttcgatatccaacggcataatcggcagcgcactgaaccggcgtggtcgatccaactgcatgccggccttctgctcgttggcgcgaatcagcagcagacggaccaaatcgccgtcaccctgcatctcgccatgcaaacggaccaatgcgccttcacggtcgccgtccgagacatgcaacccgttcacgcgctggaccaaatagcccttgtcaagatcacggatggcggcgttcgcataaccgcgccgctccaacgctccagtgcgattcagcgtgcggatgcccgtcacctgttccaatgcggtcagaatttccaacagccgacgctcgtcatgggcacccaacgattccagcgtggccgtggttctggcgatacgcgaggcacgaaccacaaacggcgacaaatcggcgtcgcccagcccgcgatacgaattgaccaacgcccacatggccacgggcttccactcgtggctgcggtaatcgtccaatccctcaagccggctacgcacctcggcgggcaatatggtgtcgctggggcgcgcgatgatccgccacgccatcgcatagggtgccagcacctggttgatgaacgtgggcaccgtgcctttgtcgatgtacggttgcagcacgtcggccaggaaatcctcgatgagcttgtcggtggccggcttgtgcgtgagcacgagatgcagataggcgaagaattcctcacagtcatgcggatcgtcgccaagcgggtcaatgatgtcatcccagcgggcggcgtacacgtcaagttcggcggtcgacaggctggccgtggcgcgcgccttgaacacgtcggacggggtgagcggcaggccgcgcatgttcatcacgtcgaagatgcgatgcgcgccgtcgagatcgtcggtggtcacgatgacgagcgtcacctcgttgaccagatactgcgcgaattgctggcgttcggatgccgaccaattggagatctcgtcgtacgtcttgcggatgttggcgacgatgttgcgttgcgcagcggtcgccagatcgtcgtcgttcatgtcgaacacggattcgaggttgtcctcctgcacgtgttcgcggaagaacgccgcgtcgcgctcgcgcaacgtgaggcgaggctcggtgacgatgccgcgcagcttgtcgccgggctccaccagcagcgcgtcgagttggcacatgaggtccgggtctcgctccagatcgcgcagcacggcgatgatgatcgacagggataccagccgctgctgcccgtcgatcacgtcataacggttatcgccctcgcgcaccagaatcagcgagccgaggaagtacggggtaccgggtgacttgcaggcgtcatccaagtcgcttaccagttgcaggatgttctcggccttccatatgtaggcccgctggaatgaggggattgtgaaccggaaatccggggtgaacactttcccgagtggtagttccttcgcgctgattgccatgtcaatcccttcgtcgccggcctctggacggtatgccgacgtgccgactgtgctcaagcctaccagtgttcgcccggcggcgggcgcatcacgccggctcgggcaccgacccctcgtacaagtagaacgaagacgggttttctcccggcccggatgcgggcagtgactgctcgcacacctgcgtcaggccgcgatgtacatagaatccgacatcgcacgtggtatccgtgaataggaagtactgacgtatgccggctgcgtggaatgcgctcatcatcgtctcgaacatgcgccggcccagaccgtgaccgcgcgccgccggatcaagtacgaacagcaccacttcagccgaatactcatggccaatgttcgccgcctgcttacgcagttgcctatcgacatgaagagtcccgagaatctcgctcgcagctgccatgccgtcgtgggcaaacgccagttgcaatagcttgcgcaacgaatgacgccggtgcatgttcagcgggctgcgatggtcgagctcgtcgatacgccccacaatcaatgcgacgggtttatcttccagctccgcgacaaaggccgtggtcacacgtgccagacagttctcccaatcggcctcggctgccagcaagccggtccgctcatcatattcggcgtaccaagtgcggcgcaccaggtcgatcagcgccggataatcgtctttacgtaacgttcgaataatcgcttcactcatgttctccattatgactgatatggctcgataacccgacgtgttacagtcgcgccggcaaatcggcccgctccaccagcctcgccatctgtacgcggcccatattgagcttgtccgccacggaggagagatgcgccttggccgtacgctccgagataaacatacgggaggcgatttcggcgttgggctatgtgctgcaagacgattcgccgattacggtgtatgccacgcgcatggtggaaacgcccgttacgctttgcgatgagcagaacgagccgatcgatcctattcatggaatgttcagctttgttcctctaagattggtactggaacaaacgctaaaggagcgattatgacattcggtcagcagccccagaacaacgggcaatacaacccgcaatacaacacgcctgattacaacgccgcccaacagtctggatatggccagcaatacgcacagtccggttacggccagaactactatgcccagccgcagggcgcccccacctaccagtacgcgccgcaggatgcggccggtgccggcgcgggtgccgccaccatcaacacgacgatgacctacaactacgaggaggcccgccgcgtctccgtagccaaggtgtacggcgagatgaccatcggcatcctcgtcaccgccgtggtcgccgtgctcggccagatcaccggagcctactacagcttcctcatggccaccggcatggtgggcctcatcggcctgtgcgtggtgcagattgccctggccgtggtgctcggcatgcgcgtcaccaagatgaagtcggccactgcgcgcgtcatgttctatgtgtacgccgcattgatgggcttcaccttgagctcgatcttcatggtctacgacctcggctcgatcggcgtggcgctcggtgtcaccgccgcgttcttcttcgcgctgaccatgttcggcatgactaccaagttcgacatgctcaaggccggcccgatcctgatgatcggcctgatcgtgctcatcatctcgcagatcgtgctcgccttcgtgcaggtcgacggcatgaccaagatcgtctgcgccatcggcctgatcctgttcgccggcatggccatctacgacgcgcagtccacgcgcgcgctgctgaccgaatacgaggcccagggcccggaaatggtcaagaagatctccatcctgtgtgccctgaacctgtacctcgacttcgtgaacatgttcctgtacatcctgcagctgctcggcaacagggactagcctcgccagccgattggtgggcggcatgtagcctgctcgtcaaacgtcacagcccgaccacattgtggccgggctttttcatgtctgtcacattcgcacgttaggctgtctccccgtgaaaagacaagaactcgtaggcatgctgagcctgttgttgaccgcgctgatctggggttttgcgttcgtggcgcaggtccagggcatggatttgatgtcgccgatgttcttcaacgccacgcgcttcacgctgggcgcgctgtctttggtgccgattctgctgtggcagcgtggccgggggagcgcagataagggcgatacagccggggtcgatgtcgttgggaccgaggcccccagggccgtctccacagatgccgcatcgaacggtgcatccgacgtcgttaccatcaccggtgccaagctgaatgcgaacaagcccgattcggccgtggcgcgattgctcgccaacccggtggtcatttccgtgatctgcggcatcgtgctgttcaccgccagcaccctgcagcagtatggcattctgtacggcaaatcggccggccgcgcgggattcctgaccgccatgtacatcgtgatggtgccgttgctggcctgcgtgttcctgcgccggcgcatcggcatgctggtgttcgtggccgtggtgctgtccatcgccggcttctatctgctgtgcatcaccgatggtttcggttcgatcggcctggcggatatcctgctcgtgttcacggccgtgctgttcgccgtgcatattctggtgatcgatactttgggcggcaccgtggacgccatcaagctttcattcggccagttctgcaccaccgccgtgctgagctgggcgggttcgctgatcgaaggctcggtcgactgggccggcgctgctcattcctggattccgatcctgtacgccggcatcggctcggtgggcatcgcgtacaccttgcaggtggtcggccagcaatgggtgccaccgacgcgagccagcctgctgatgagcctcgaatcgttcttctcggcggtaggcggtgcgttgcttctcggtgaagtgatgaccccgcgcggttacctcggctgcgccctcatcttcctcggcaccctgctggcccaagcgccggccaggctgccgaagtggctgcaacggtgaatgaatcggccgcaggccgattccatagcacctcagtccgaggttttaggcgcttcacccacttgcggcgcgccgttgatgtcgcggtggatgttctgcatttgcacttcgatgttctgcagcgaacgggcgcagtcgagcagtgtctgtgaatgctcgctgagcttgttgtccggcaaatcggtcttgtagcgcagcgcatgctccagcgacgcccaataatccatggcgatggtacggaactgcacctccaccggcgtgtaatgcgcgcccgaggagagaaacacgggcaccgcgtagattacgtgcaatgaacgatacccgttctgtttcgggttcttgatgtaatccttgacgcgcagcacctgaatatcggactgcgacgacagatagttggacacggaatacacgtcgtcgcggtaattacagatcacgcggatgccggccacatcgaacagattgtccttaatcgaattgacactgattggcagattcttgcgctccagcttgccaatgatcgaactcaccgacttcagacggcgttccatatgatgtatcgggtcatggctgaaccgcacctggaactcgtcgtcgagaatctccagcttggtgctgatctcgtacatcgcgccttcatacacctgcatgaggtcaacgaatttaacgacctgttcgggagtgaaggtgcctcccggaagatccaacgctttgagacgggcctgtagatcggaggttttgagtcggctatgtcggtcaagtatcacgtccaccaatatactcggcggattccagacaatctggatgttcgcggggaatctttccaagaacccatatttaagatcgtgacaaccaatggcatacgtgaccggagcatgacgaaccccgccgatagaatcggtcgttatgaatgaagacatgatgaccgaggcggagcgtgcctcgattgcagccgatggaaccgatagcttgttgggggagcgcggcaagggcgtattccatatccacacgctcggctgccagatgaacgtgcacgattccgagcgcatcgccggcgtgctggaggccaatggctacgtccctgcaaccgaggaccagatcaatgacaatgacctcgatttgctggtgctcaatacctgtgcggtacgcgagaacgcagccgaacgcatgtatggcaccattggccgattcaatcgcgtcaaactggttcggccgaacctgcagatcgccgttggcggctgcatggcccagcttgaccgcaagaagatcgcggatactgcgccatgggtttccgcggtgttcggtaccaagaacatcgaagatctgcccaagctgttggatcagaatcgtgcgaccggcaaggcgcaggtccaggtcactgaacaattgcggcagttcccgagccagcttcccgccgcccgcgcctcccgcatcagctcgtgggtggcgatttccgtgggctgcaataacacctgcacgttctgcatcgtgcccaccacgcgaggcaaggaaaaggaccgccgccccggtgacattcttgatgagatccgccaatgcgtggccgacggcgccaaggaggtcacgctcctcggccagaacgtgaactcgttcggttatggtattggcgatcgatacgctttcagcaagctgttgcgtgcctgtggcaccatcgacggtctcgaacgtgtgcgcttcacttcgccgcacccggccgccttcaccgatgatgtgattgcagccatggccgaaacgccgaatatcatgcatcaactgcacttcccgctgcagtccggttccgatcggattctacgcgcgatgcgccgctcctacaggtccgccaagttcctcgatatcctcggtcgtatccgcgaggccatgcccgacgcacagatttccaccgatatcatcgttggattccccggcgaaaccgaggaggacttccagcagaccatggacgtggtgcgccaggcgcgcttctcctcggcgttcacgttcatctactcgccacgccccggcacgccggccgccgcaatggaacagattccgcgcgacgtggtgcaggaccggttcgaccgactggtggcgttgcaggagcagatcaccgaagagaacctcgccacattcgagggccgcgacgtcgaagtgatgatcaccggcaaactcggcaagaaggacaccgacacccaccgtgtcaccggccgcgagaaaaccggcgtgctggtgcacatcggcgtgcctgaaggcgaaccggtacctgaaatcggcgatttcgtcacggtcaccgtcacacacgccggccgccataatctgcttgccgaccccgatgtggccgctggacagacctattccgtgcgacactgagggggcgtatatgacgcaacgagtcgtctccatcgtcggtcccaccgcgtcaggcaagacggggttgggcatcgccatcgcccggcgtctggccgaagcgggggagcgggccgaaatcgtgaacgcggacgcctaccagatgtaccgtggcatggatatcggcaccgccaaacccaccgccgaagaacaggcggccgtgccgcatcatctcatcgacatcatcgaccccgaagacacgatgagcgtggcccgattccagcagcttgcgcgcgagaccatcgccgacctgcaatcacgtggcatccggccgattctcgtcggcggctccggcttgtacgccagagcggccatcgatgacatcacctttcccggcaccgatcccgacgtgcgcacacgtcttgaggaacgcgagaaaaccgagggtgccggtgctttgttcgacgagctgcgggccaaagaccccgaagccgccgcgcgcatggacccacgcaacccacgccgcaccatccgtgcgctggaagtcatcgagcttaccggcaaaccgtattcggccagcctgccgcgctaccggtacgtgattccgtccgtacagatcggactcgacctggaccgcccggatttggaccatcgcatcgacctgcgcaccaagcagatgtatgacgatggattcatcgaagaagtcgaacggctgcgcccgcatctgggtgccaccgccgtacgcgcgctcggctatcagcagatcatcgacctgctggacggtatctgggatgtgaacgacgccttcgcggacatcgcacagaaaaccaagcgactcgcccgcaaacagatgggatggttcggccgtgacccgcgcatccactggctgcaggccctgaacccgaaactggtcgacaacgcgatggccattatcgcgcacgccgacgccggcgactacgacccgatcgacgcccgagccgacgaatacacccagcatcatctgggcgatatcacggcgtaggaatcagccaaaggccggtgcaatcacccgcaatcagtgtgcaggcccctgattccagccggcgatcaagaacacgcgcgtcggattcgccgggcgtagtatcgcgtcgaacatcgtctccagtgcagacgtgtcgccccgatatgccgagtgcttggcggagcgatactcctcgcgcgtcactgagccccagtcgagatcccagccggcgtcatgcgccaagcgtgaaccgaatatacgcagcaccatcgcattgccgccacggaacggatgcagataaccgagctcatcataaatagaagcgaacgcgtgaacgaacacgtcgcgatccaacgcatgcaggttgcgcttgtccgccaactccatcgcgatgttgtgcgcgccggtctcaatgagcccagccgggaagaacgcctccggattcgcggcccgagcccggtcgttcgtcacctcgcgtgtggtgtttgaggtacgcaacttgcccgcatcctcgaacacgccttcgaacagccccttatgaatggcggtcaactcgtccaagtcgccagacggattccaccgacgttccgccaacaatacggtacgtgcgaacaccgcatccgcgcgatccgtggcatgatcatccagactgccggcagccagacgatcctttccggcagggtcggcggcggcgcgcagacgcatggcggtctgctcgtccgccacgtcgatgagatgggtcacgggctccaagccacgttcgtaggcaaccgcggcgcgcatcgttgcctcgcccggcgtcatcgcttccagtgcgcagttcttgagtgcaaatgcgactgcgctcgcacgctctgcgggtgtcatgcaacccatgataaggcatattcgcgctccagcggggaatcgactcggacgaacctcgacgaaccgcggcgaatcggctgtcgggattcgtcaatcgaccatatcgtcacggtgtcgtcaccaaccatgcacccccgtactagtagaatcagacccgatatggcacgaacagcatcctccaacagcaccaaaccccgtaaatccaaagacaacgggtctacccatgatggcgaaaccaaggtccagcccgagcttgacctcgaacctgagccgttgtggaagaagatcctgctcgcgattccgcgcgcgttcggctccggcgtacgcgccgtcaccggcgtcggcgaatacgacccagcctaccgtcgtgacggtttgtgcttcctgctgctcatgctcgccgtactgttctgcgcgtccgaatggttccgtgtcagcggtccattcggccagctgcttcacgccatcgcggccggtgtgcttggtctgatgagcgtcgtgctgccggtgttgctcgccgccgtggccttccgactcatgcgcaattccggtaaagggtccaataacccgcgtgtggtcaccggttgggtgctgctcatgtggtcgatctgttcgatcatcgacgtggcgatcgccgccgaccacaccggattcgacatcacgattctgcaatccgccggcggcctgttcggcttcttcctcggctcaccgctcgcctggggcctttccaacgtgttcgccatcatcattttcgtggtcgtcggcctgttctccttgctgatgattaccggcacccacgtcaccgatttgccggaggatgcgcgcaaaatcgcagctaaaatccaacgcaaaccgtatgtgccgatgggccaggaggccgacggaagcgccagccagttccccaacgaggtccatgtgggagataccacactcgcctttgccgacggtgttccctcgcatgacggcaacgacgacggcaacgacaacgatcaggccggcgatgcacggcccagcctgttcgcacgactgttcggccgcaaatccaagaccgaagacgacaaaacccttgacaagtatgctgccgacgatccgttcgaccgtgccgccagccagcatggtgccaccgccgaaaccccggtggtcgatccgatgaccggcgagattaccggtgcgcgaaccattgcatcgtcttcgtacgacggtcgtccgcacctatccagccctgcgcctgctgccgatacggatgatggcgacgcttcacgaacccgcgtcatcaccagtggccagaccatcgccatgcccggtgggggagcggtagacgatccgtgggcacccagtgccgcccaggccggtactgtcgcgctcgcaggggcagccggggcgatgggagcggccggggccgccggtgccgcggccgcggcagccgcgaccggagcctacgcaggcgccgatgcggatggcagcggagtcggccagggcgtgcccaatacggacggacagccgaatgccgccgccggcaacggtacagatgacgacgccaataggccgtatcagttgcccgacctgaacctgctgaccaaaggtcagccccatgcgatgcgcaccccggccaacgatcgcgtgatccgggcactgacttccaccttcgaacagttcaacgtggacgccaaagtcgtcggcttcctgcgtggcccttcggtcacccaatatgaggtcgagcttggccccggcgtcaaggtggagaaagtcaccaacctgcagcgcaacatcgcctacgcggtggccagttcggatgtgcgcatcctttcaccgattcccggcaagtccgctatcggcatcgaaatcccgaacgaggatcgcgaaatcgtgcacttgggcgacgtattgcgctccgacaaggccgtgggcgacccgaacccgatgctctccggcatcggcaaggacgtcgaaggccacttcgtgaccgctgacctgaccaagatgccgcacctgctggtggcaggtgccaccggttccggtaagtcgagttttatcaactcgatgctcacttcgatcatcatgcgtgccacgcccgaacaggtgcgtctgatcatggtggatcccaagcgcgtggaactgtccgcctacgcaggcatcccgcacctgctgaccccgatcatcaccgatccgaagaaagccgcacaggccctcgaatgggtggtcaaggagatggatgcacgctactccgacctcgaattcttcggattccgccacgtcaaggacttcaacgaggccgtgcgcgccggcaaggtacatgcgcccgccggctcccagcgcaaggtggccccctatccgtacatcctcgtggtggtcgacgagatggccgaccttatgatggtggccaagaacgatgtggaaagctccatccagcgcatcacccagctggcacgagccgccggtgtgcatctggtgctcgccacccagcgtccgtccgtggacgtggtcaccggtctgatcaaagccaacattccatcccgactggcgttcgccacctcgtccgccaccgattcgcgagtcattctcgacacggtcggtgccgagaccctgattggccagggcgatgcgttgttcctgccgatgggttccgccaagccgattcgtgtgcagggctcgtgggtgtccgaatccgagattcgcaaggccgtggagtttgtgcgcacccagcgcaagccgaagtaccgcgaagacatcgaacagatggccaaggaagccgaaaagaaagacagcatggagcccgacgaggagatcggcgacgacatggacgtgctgctgcaggccgccgaactcgtggtcaccagccaattcggctccacctccatgctgcagcgcaagctcagggtcggcttcgccaaggccggccgactcatggacttgctcgaatcgcgcggcgtggtcgggccgtccgaaggctcgaaggcccgcgaggtgcttgttcagccgcaggacctgccgcaggtgctcgccttcatccgaggcgaaaccagctcgctcgaagccagcgccccgcaacaacccgaactcggcgaataattcacccatcgacctccctctgatgagggaggtgccctaaggggcggagggagagaagcgcggacagcatcagcacgaaacctgattcccgaataatagcagtcaatatccagccaccactcactcaaggtaggagtatgggggtaacgtgaacactatggatgagaacacaatggacaagcagtcatcgcccaaatcatcgctgttcgacggatggaacgcgccgccgaacctggtcacctactcgcgcatcgtactcgtggtgattttcctgacactcgacattctcgccggttcctggggtgagaacaacctgatcatgcgttggatcgccgcggtgctgttcatcgtcgccgcgtccaccgataaaatcgacggttggatggcccgcaaatacaatcaggtcaccgaaatgggcaagctcatggatccgatcgcggacaagctgctcacttgcggcgcaatgattgtatgctccgcgttcggcgagctcggctggtgggtgaccatcctgttcctgattcgcgaaatcggcatcaccgttatgcgtttcttcgtcatggagcgtccgggcggcaaggtcatcgccgccgcatggcccggcaagctcaagaccgtattccagtgcgtgggtctgtccatgctgctgctgccgttctggtctctgggtaacggacaggccacgccgttctggatgaccgcttactacttcctgacctacgccatcatctacgtggcattggtcctgtgcctctactcgggtgccgtgtacctgtacaacacgttcgtcgccccgaagcggaagtgacggatattccaatgcaggaattgtgcgacagtctcgcggccggcatcctcaagatctgcgaggcgaacaatacgaaaatctcctgcgctgaatccctgaccggtggcctgctcgccgatgcgttcgtgcgtattcccggtgcctccaacgtgttgctgggctccgctgtcacctacgacatcaatgccaaggcctcgatcctacacgtggacaaggccctattggatcgagaaggcgccgtacaccccgaagtcgcccggcagatggccatcggtgccgctcgcctatacagccagccggaatacggcgaccgaatcatcggcctttccaccaccggcgtggccggccccggtccggacggtgataagccggccggactggtgtatgtgggcctgcgcatccccgcaagcctcaccgcggaccatgccgaagtgctcaaagccgtcgaactccatcttgatggcatgcgcgaagaggttcgtcgcctcaccgtattccacgttctgcaaaacttgagtctattcacagcaagttttaaggaataaaaccgcgggaccgtcgtgttgtacatagtggaaacactgaaccgaccttggaaggggcgatggcgatggaaacgatgacccgagtgaacgaacagatggatgtggccgccaagaagccgatggctgtgcagccgggtgtcgcccgtatgcgtgaactgactccggcccagcgccgtgcggtgatgttcgcccagcagcaggtgctcaaggcgcaggctgccaagaaggccaaggatcagcgtcaagccgttcgtgaacgtatgtgggatgaggattcgccgtcgtacaagccgactgccgccgccgagcccgtggtggttgaggaggagcctcgcgaggtttcgctgcgtggtgctatcggctacgtgctgcgcgaactgcgtacgcgcgatcgccgcacgttgcgtgaggtctccgagaaggcgggcgtttcgctgggctatctttccgaagtcgaacgtgggcagaaggaagccagctccgaactgctgagctccatcgccgatgcgctcggagtctccacttcgcgcatgctgcgcatggtggccgattatctcgacacagtcgagggctgatcggttggcggtgtgaagccgcatcccgtaatctatgtctagctgtgaacccgtatcgcttgtggcgatgcgggtttttgctgtcctgcgggtggtggcacactggcgtgtatgcgtgaacgggaattctgggaattacttgaagaggtgttcggtcggacctacggtcgttcgttgtcgcgtgatcaacggatgtccaaattggcgaatatgaccgtggtcgaggcgctggacgcgggggaggagccacgcgtggtctggaatgtgctctgtgaccaaatggaggttccggactccaagcgttggggccacgatcataacgcgccgcccatgcccgccgtctgacactgcgggattacggagtcgctgaatcgtgaaattggcgatttcggcgtgttgcacgccaaattcgaacaaatgttcgtgtgtgtggttatagttattcacagtgacaagaagccgcatacgtgtgcacagggtgcttgtcatccgccataagccttaccgcagtaggtcttagggaggtcagatggccgagctcgggcaagctggaaccacaatggttggtttggattgcctcacatggcatgtccgtcatacggtggaggcatccgattcgcgcacgacttcgacaaggagaagatcatggcacttgagaccaagccggccaaggacccggcagccgaggacaagcacgagctcgatcccaagcgcaaggcggcgctggacaccgcgctggcgcaggttgagaagagctttggcaaaggttccgcaatgcgactgggcgaccagcccgagcagaacgtcgaggtgattcccaccggttcgttggccctcgatatggcgctcggcatcggcggcctgcccaagggccgcatcgtggagatctacggccccgaatcatccggtaagaccacgctcgcattgcatgtggtggccaatgcccagaagaagggcggcgtggcggcctacatcgatgccgaacacgcactcgacccggcctacgcccgcaagctcggcgtggacaccgactcactcatcgtctcccagccggataacggcgagcaggccctcgaaatcgccgacatgctgattcgctccggtgcacttgacgtcatcgtcatcgactcggtcgccgccctagtgccgaaggccgaaatcgaaggcgaaatgggagacagccatgttggtttgcaggcccgactcatgagccaggcgctgcgcaagatgaccggcgcgttggctcaggccggcaccaccgccatcttcatcaaccagctgcgtgaaaagatcggcgtgttcttcggcaatcccgaaaccaccaccggcggcaaggccctgaagttctatgcctccgtgcgtctcgacattcgtcgtattcaaaccctgaagaatggcgacgaagcggtgggcaaccgcacgcgcgtcaaggtggtcaagaacaagatggccccgcctttcaagtccgccgaattcgacatgctctacggtgaaggcatttcccgtgagggctcggtaatcgacatggctcagcaggttggcgtggtcaagaagtccggttcgtggttcacctatgagggtgatcagctcggtcagggacgcgagaaggttcgtcagttccttaaggacaacccggccatcaccgaggagattgagaataaggtcaaggccgagttcggtctgatcggttccgccgaccagttcgcggaagatggcgaagccgcagcagcggccgccgtcagcgaggccgctgcggccgacgtggccaaggacagcaaggccgcagcggcgcctgctgccaaaacgacccgtgccaaggccggcgcagctaaggcctgaacatgattagtgccgaagcattcttgcggcgcaatcctgttgcgtcgcaagacatgcccattgccgagcagcgtgttcagtcgaaaccgccgggacgtttttctcgacgggggagagacgctgccgttgtcgaagatcccaatgatttggacgcttgccgcgaggctgcattgcgtttgctggacgcggccccacgtgcatccggcgcgttgcgcgaacgattgctcagcaaaggctatggcgaggcgattgtggacgaggtcatcgaacggctgattcgcgtgcaactgattgacgaccgcgcttatgccgaatcggccgtacgctattgtgccggtcgcatgatgggtcgtcgtggtgcggtcctggaacttgctcgcaaaggcgtggaccgcaaactggctgaacaggtgtgtggcgaagctgagcaaaatggcatctttgaagatgccgcatgggaattgggccgccaaatagcccgcaaaacccatggcctcgatcgtcaggtccgtcagcgtcggttttggtccgcaggcggccgcaaaggacacagccccgaaaccctccgccgagtcgccgccgaattgttggtgtagccaagaaaaaaatgagacctcttataccccgggttctgtcgtgccgtgcacgaacgcacggcacggatggccatccatctcgacctgacggtgccgccaggctctagcagcctacccgatgacacgggcgagcagcccttaccgccatctgcttggccttgctcccgatgaggcttgccatgcgacctactgttaccagaggcccggtggtctcttacaccgccgtttcacccttacccgtcgaggacgggcggtctgttctctgttgcgctatctctcaggtcaccctgggcggacgttatccgccatcgtgctctatggagcccggaagttcctcagccgatcccaatgaagatcacggccgcggccatcaagaggtctcaagcctgcaattatacataaggtgcggaaaaggcggcatcccgccctgcggtgaggccatgacgttgcccagttatcctgttttctccatagttgggcatagttgggcgattcgtgaacgacgcgccgaatatcggatggggcgtgtcgggcgtgttgtggcgtgtcgtatggagacgaatcaaatctgtaagagcttggtatgtgcgagaaagagcaagaaaacgttgcctatccattgcagtatttgccatgacgaacaaacgagccagcctgataaaccggtatcaaatcttcttataggagactgctgccaaaaccccagtatatacatcgtttcattgcagagaaaagcccgggaataaacatatattctctgggcgagtttccggccgttcacccattgttcgtctacaatgaaacatacccggtcggtgatgatgccgttcggaacacatatagcgggttacaccgcttgagttagaggaggtcaacatggaaatcgtcgttaccggacgccacacgcaggtcaagcaaaggttccgtgatgtggtcgagaccaagatgaatcgtgtgaccgctatcgccccggatgctcagcgcgcgcagatcgtgctgacccatgagggcaacccgcgtcaggccgataccgccaagcgcgtggaaatcaccgttatcgccggacgtaccgtggtgcgtgcggaggcttccagcaccgatgaattcagcgcgctggacatggcgctggataagttgacgctgcgtctgcgtcgtactcgtgaccgtcgcaaggatcaccgtcgtggttacgcaaacccggtcccggtggatctgggtgttatcgccccggagcccgagccggaggtgtcggaggaagagccgaacaacagcccgcaggctgcggtcgcctccgatcttggccctggcgaatccgtggaggtccaggttggggatacgccgattgtcatccgtcgcaagctgcacatcgccgagcctatgagcatcgacgaggcgctgtacgagatggaactgatcggtcacgacttcttcctgttcgtcaacaaggagaccggccgcccgtccgtcgtctaccaccgccacggttggagctacggcgtgttcgaga

SEQ ID NO: 3698 - DNA, 29123 bp, Unknown
  R150_10m  MAG No. k141_4182
cttgactacgatgtcgtccgtagccggctcaagtcggaaggtgcagtgcaatgcggttacgtgaagaacgacggtgagcggttcatgttgacgattcttaccgacaacagatccacggacgagaccatgtgggtgttcgaacgtaaggacctgccgtagcggaaggctcgagaccctcaggggcatggccctgggcttccgcaacctcgacgccaccatcaccagaagcctgctgcacgccggcggcttcagacacgccatccaaacccacctctgacacatgcccttacacgccaaaatcggaagagccggaaatactacaacacgctgattgttgtatgtacaactgttgtctatgggtctctttatcatgaattgttacgtataattctgcatcacccggtccaccgcctcgcgtgtgctggccctgatggagaagaagggcctgatcgcctgtgaatcggtggagcatgacgcgcgctgcaagcgcatcgtcctgaccgacaaggcggacgcgatcgtcgctgatctcaaggtgaatggtgaccgggtcgaacggttgctggtcggcggcttctccgatggagagaaggccgctctgcgcgactacgtcgcacgcatgcgtgcgaacatcgagcgcgcacaacgcgaatttgaacatcaaacgctccctcagtcacctgtggtgatggctcccgatcaagacggagcggaggttgctgacacgaaggaggagaacgaatgagcgataccgcagaggcaatcgcgcaggcgcgcaaagccgtcgaaccggacaagcccaaacatgtactgcgcacgctgggccattcgattcgtgaatacaagaaagccagcatcctggctccggtgttcgtggcggtcgaaggtattctggaaatcctgattccgaccatcatggcttcgctgatcgatgagggtatcaccggtggcagcatgccggccaccgtcaagttcggcgtgattctgctgatgtgcgcgatggtttcgctgggtgccggcttcctgtccggaaagtacgcggccgtggccggcgcgggcttcgccaagaacctgcgcaaggaccagttcgagaaggtgcagggcttcagcttcaccaacatcgaccggttctccaccggttcgatcgtgacccgactgaccaccgacgtgacgaacctgcagaacgcctacatgatgatcattcgtctgggtgtgcgtgccccgatcatggtggtcgtggcctggctgttctcgttccgtatctccccgtcgatttccctggtgttcctggcctgcatcccgatcctggccatcggcctgtgcggtctggtcgtgctcgtgaaccccgtgttcgagcgcgtgtttcacacctacgatgcgttgaacaacgtggtcgacgagaacctgcagggcatccgcgtggtcaagtcctataaccgcgaatccttcgaggtctccaagttcggccgcatctcccaacgcatcttcaaggacttcaccaaggccgaacgcatcatgagcttcaacatgccgatcatgatggtgtgcgtctacgcctcgatgattctcatcgcatggatgggcgcgcagcagatcgtcgcttccggcaataatgcggcgttgggcctgtccaccggcgagctgacttcgctggtcacctatgccatgcagattcttatggccatgatgatgctgtccatgattttcgtcatggtgattatttctcaggcttctgccgagcgtatctgccaggtgctgcaggaggaaagcacggtgcagaacccggctcacccggtgactgacatggccgacggctccatcgaattcgaccacgtcaccttccgctactccgacagttccgaaaagcccgtgcttgacgacatcaacctgaagattcgttctggcatgaccatcggcatcgtcggcggtactggttcggcaaagtcgtctctggtacagctggtgccgcgactgtacgacgtgagctctggctcgctcaaggtcggcggcgtggacgtgcgcgactatgacattgaggcgctgcgcgatcaggtggccatggtgttgcagaagaacgtgctgttctccggcactattgccgaaaacctcaggtggggcaacccgaacgccaccgatgaggagattcgccatgccgcgcagctcgcgcaggccgatggattcgttcaggaattccccgataagtacgacacgtacatcgagcagggcggcaccaatgtgtccggtggacagcgccagcgcctgtgcatcgcccgtgcgctgctgaagaagccgaagattctgattctcgacgattcgaccagcgccgtcgataccaagacggacaagctgatccgcgccgcattccacaacgagatcccggacaccacgaaaatcatcattgcccagcgcgtggcctccgtgcaggaatccgacatgattctggtgatggattccggccgtatcatggcctccggtgcgcacgaggaactgctcaccacttgtgatgaataccgttccatttacgaatcccagaccaagaaccaggctaagaccggagaactggccgctgccggacaggctgctgagtcatctaccgctgagccgtccgaaaccgtgacggtgacagtgaccatgcccacggccgataccagcgcagctgataccaatgcagccgataccaaggaaggagaagcacgatgagcaacgaccagagtttcaagaatcgcgagcctgacatgggcaaagccgaccccggaaccatcaagcgcatcttcagctacatcttccaatacaaattgcgcgttatcgccatcgtggtgtgcatcctgatcggtgccgccgcgcaggccggatccgcgctgttcctccaatcgctgattgacacctacatcctgccgatggtgggggaatcgaaccccgactgggctccgttgctgcgcgccatcagtctgatgggctgcctgtatgtggccggtatcgtggcatcctgggcttggcagtggctgatcatcaccgttgaacagggcacgctcaagaagattcgtgacgatatgttcgcccaccaacagaagctgccgattcgctacttcgacagccacgagcacggcgacatcatgagccactacaccaacgacaccgatacgctgcgccaggccatctcgcagtcgttcccgcagatgttctcctcgattatctccgcgattgcggcattgctgtccatgctgtggctgtccattccattcaccgcgttcgtgattgtgttcaccgttctgctgtatttcatcgtgcgcaagatcgtgagccgttccggccgctacttcgtcaagcagcagcagtggatcggcgacgtgaacgccttcgtggaggagtccgtcaatggtcagaaggtcatcaaggtcttcaaccatgaggacgccactcagaagaccttcgatgagaagaacgaggaactctttgaggcgtccgccgaggcgaacacttggggcaatgtgaccatgccggtcgtcggcaatatgggctatctgctctacatcctgctcgccatcgtcggtgccgccgtttcgctggccggcgtcaatgacatcggtctgaccggtgtcaagccgctcaccctcggcacgctcgtctccctgctgaccttgtcccgctcgttcatcaacccgatcggccaggtctcccagcagctgaccatggtgatgatggcgctcgccggcgcctcccgcatcttcaagttgatggacgaacccatcgaggaagacaagggcaccgtgacgctcgtgaacgtggaacttgggccggacggccgcaccatgaccgaagtcgaccatgagaccggccactgggcgtggaagcgtgagatcggcgacgatggtacgaggtctctgaaggccgccgaaaagctgcgcggttccgcctgcgaggtggcgatgaaggccaaggagcaggcgatcacctcgcctgatgggcgttatacgctgctgcgcggcgacgtgcgcttcaccaacgtgaccttcggctacaacccggacaagccggtgctgcacgacatcacctggttcgccaagcccggccagaagatcgcgctcgtcggcgccaccggtgccggcaagaccaccgtgaccaacctcatcaaccggttctacgatatccagcaaggtcagattctgtatgatggcatctccgtggccggcatcaagaagcctgatttgcgcaggtctttgggcattgtgttgcaggacgtgaacctgttcaccggtaccgtgatggacaacattcgttatggccgtctgaacgccactgatgaggaatgcattgaggccgcgcgtctggtcaatgcggacagcttcatccgtatgctgcccgagggatacaacacggtgcttgagggtgatggatccggcctgtcccaaggtcagcgccagctgatttccatcgcccgcgccgcggtggccgatccgcccgcgctgattctcgatgaggccacgtcttccatcgatacccgtaccgaggaagtcgtgcaggccggcatggataacctgatgaagggccgtacggtcttcgtcatcgcccatcgtctgtccaccgtacgcaactccgacgtgatcatggtgctcgaccacggcaacatcatcgagcgtggctcgcatgacgagctgatcgcgcaaaagggcgagtactatcagctctacaccggcgcggtggagctggagtagtttgacggcaaattcgcctggttgctgatgagattacaaagcggcatatgtctcaggggacatatgccgcttttgttgtgcatgagaagcataagtcttggtgggaattgcgagtattggtgaggggaagggtacattggattgtggtctgatgatatatgagtcgcaaggaggaggccgagatggcattcgtgacgttgaaggatgtcgcgcagcgggctggtgtatcagccgctgccgtctcccagattcttcacgataaaggccgtttctctgatgagacccggcaattggttctgaaaacgatcgaagaaatggggtatgtgccggaccagcgtgctcgctccatgcgttcgtcgggtaccaaaacagttggcttgctggttcctgatttgtgcaatccgtatttcgccgatttggttgcttcgatggaggatgaactctaccggcatgggatctccactctgattggcacgtcttcggaaagcgtggaacgccaggatgtgtttatcgagaatcttttgggccaacgcattgatggggctatcgtcgtaccgcagggtgtgaaatcccccggagtgcaatcgttgatacaacgagacttgccgttggtgttcgttgatcgtcgcgttcccggtgtcaagtcggtgccgtttgtggtttctgatccatatacgggcattcgtgaggctcttgaagaactggtgcgtctgggccatcgacgtgtgggctatatgtctcatccttcgctcgaatcgttcagtattgacgaacgagagaccgcgtttcgggaggctgccgccgatttgcttgccgacggcgatggcgttgtcgcagcttgcgactccacttatgaatcgcgtgccgctgcggtagagatgctgctgggtgcaggggtgagcgcaatattgtgcgcatattcgccggatgcgttcacggtgattggactgctgcatgaccgcggggtggcgattggcgaacgcatgtcgttggtgtcgttcgatgatatttcggcgtttaccgtgatgacgccgcgcatcgccgtgatttcccaacaggcggatctgatggggaagcagggtgtggagctattgctgcaacgcatccgttcgggatccatggatggcggcatcacgcattccgtgcccacgatgttcatcaaacgcgaatctgtgggtgaggttagttccgcgtccgtcgccaatcaatcagcggaagtgtgattcaagcggcttcgagaggaatgcgcggatacctttgacacgcaggtagatgaggcattgacaatagtgatttaacgttttatcctcagataagccgatgatgaaacgttaaatcatcgggagtcagagatgacccagcggctgttatggaagcaaaggagcacttcggtggaaaagattattctggattgcgatcccggtcatgatgatgccatggccatcatgcttgctgtaggcaaccccaaaattgacctagtgggtgtgaccacggtgggcggcaatcagagccttgaaaaggtgacgtacaacgcccggtccgttctggaaatggcgaaggccacggacatcccggtgcacgccggttgcgataggccccttgtccgcaagcaggaggtcgccgcatcgattcacggcgagaccggtttggatggcgttgaattgccggttcccacccgtcctctggattccggccatgccgtgaactggattatcgatacgattatggccagcgagccgggaacaatcacgcttgtgccgaccggtcctctgaccaacatcgccatggccgcccgtatggagccgcgtatcgtagaccgcgtcaaggaagtcgtcctgatgggcggcggataccacgtcggcaattggagcgccgtagcggaattcaacatcaaggtggatcccgaggccgcgcacatcgtgttcaacgagccgtggaagctaaccatggttggccttgatctgacccatcaggcgctgtgtactccggaggttcagcatcgcattgatgccatcggcactgatttgtcgcacttcgccagcggacttatggacttcttccgcaagacctatcaggataatcaggacttcatcgatccgccggtgcatgatccctgcacggtcgcctatctgattgatccgagcgtggtgtcgactcgccgttgcccgctggatgtcgaaatccacggtgacctgacactgggcatgaccgttgccgacctgcgtggcccggaaccgtccgccgaggaatgccatacgcaggtcgcggtgaaactcgacttcgataagttctgggatctcattgtcgatgccatcgttgctatcggctgacggacgaagaagaatgcgtaaaaggacaagggaatagtcatgtcgacagtcaaatccgaacaaatgcttgatgagggcggcaagtccattgtcgctttgatggctgcgctgatggcggcgatcttcgctttccagctcaacgcttccatgctttcgccggcgcttaccactatggagcgcgagctgaacaccagcagttcacagatcagcctcacccagacggtcttcttcaccgcatgtgcgctgttctcactgttcctgcctcgactgggcgatctcgcaggccgcaagaaagtattgctgggcatgctgagcatcaccgccatcggctgtgtggtctcggcgttggccgtgaatgtgcccatgctgatggtcggtcgcgtgatgcagggcgtatgcggaccggtggtgccgatgacgctcatcatgctgcacgccaaggtgactgaggatgccaaatatgcgcgactgatgtcgattcttacctcggtgaacggcggtattggcggtgttgacgccatcctcggcggctggcttgccggcacgttcggcttccgttccgtgttctgggtgatggtcggtgtcgccgtggtcgcaatcgtgctggtgtcgatgttcgccgatgaaagcacggccaaagagaccccgaagatggattgggccggtgcaatcgttcttggcatcgccttcctggcagcctatctagccatcaacgaaatccagaaactcggcgacgcgaattgggtgctcgtcgctatcgaggtggtagcggctgcggttgccttcgtgatcttctggaaggtcgagaaccgcaatcccgcaccgatggtcaccacccactatctcaagcagccgcgcacctggggcctgctgctcaccacattgctcaccatgaccggcgtgttcgccatcatgaatggcgttgtgccggccttggctcaggacggtaagttcggcaccggattgggagccgacgtggtgtcgttcgccacgctgaccccatatgctttggttggtctggtcttcggcgtggtcgccggtgtgcttgcctccaagttcggctaccatcgcatgctccgcgtgggcattctggtcagcttggtcggcgtgctgttcggcgtatacgttgcacacttcccgagcgtatgggccttgctggttatctcggtggtgctcggtgtggcatacgcgggcacggcgaacatcatgctcaacggtttgggcattgtgctgtcgccggacgacaacccaggatacttgcccggcctcaatgcgggcgcgttcaacctcggcgcaggcttgagctatgcagtgctatatgccgtgatgaacgcattcgcgagcttctcgggcggcattgccggttactcggcggcaatgatcgcgtcggccgtgcttctgggccttgctctgctggcttcgttcgccatccccaagcttgaacgagccgaccagtagtcgttttcgcagctgctgcccccatattcctgccagatgacgctggcaggaatatgtcatcaatggagagaacagacagttgccaagaaagggcagacaccgtgaacaaactcattctcgatctcgacaccggtgtagacgacgcgcttgccattgcctatgcgctggacagcccggaagtcgaactcatcggcatcactggtacttacggcaacgtgccgcttgaccaaaggtgtgcgtaacgcgctcgccatcaccgaactgctcgatcatccggaagtccctgaacgaattcatgacccgtattaccgcgctcgctgagcacgccgagtaaaaggacttcgcatgtcaaccaataccgcaactgtgaccgccgatccgtgggcggacccgaagaccagcaattcgatggccattggctttattggcgcaggtttcaccgtgaactcgggcttcgtggtgctcacgctgttcgcctgtgtgttctatacgggctgtggcctcatgtattcgccggttgtgtgccgcttatcggcgtgatctactatctcgtcatccgcaaaaagatcggcgagtgatcgttggctctattcgtcaacgacaacgaaaggaaatgctatgacagcatctgacattcttgcggcacttgatcgaatccaaggcacggtttgcgtcgtcggttcgatgaatgccgattacaccgtggtcaccgagcgtctgcctggaccgggggagactgtcaccggcggcccgctgcaagtgttgcccggcggcaaatccggcaaccaggctgctgctgcggcacgtattggcgccactgtttacatgtttggagcggtgggttccgatgccaatgccgagttcctgcttggtgcattgcgagaagccggcgtggatacccagcacgtgcgtcatgtaccgggggccagcggtaccacggtcatcaccgtggacgcgaacggagagaacacgattgtctactctccgggctccaatgcgcaggtcagtgttgattatatcgaggcgatgcgcggtgaattgacttcggcgaatgtgcttggcctgtgcttggaaagcccgatcgagaccgttaccgcggctgcgcgtatcgggcatgaagccggtgtaccggtactgctcaacaattcaccgtttacgccggtgctgccggacgagctggtgcagcttgccgatgtcctgctcgtcaacgagcatgagatggcgcagatgttcggtatcgccgaacccgaagacggcgactggtccggattcgactggctggctgcggccgatcgtatgcgggagctcgggttcgaccgggcgattgtgacgctcggcggtgatggctcgatggtgctggatgcatcatgtgctgttgcttcggtgacccgcatcgcaccggttctggtcgaagccgtggacaccaccggttgcggcgactcgttcatgggtgccgtgctggcaggactggcctcaggctttgcgctgcgtgaagcggctcagctggcttcgttcgtttctgcatatgcggctaccggtctgggtgcccaagcgtcttacggttccgccgcccagattcgtgagctatttgtgccctgaccggttttcggtagtttctctcaatggcctcaaccagcacgtcatattcgtgctggttgaggccattgcattaggggccgcgtatatgaacaatccccgaggcattcgccgacgaactgctggaattaaccaacgaacaagggcgttgcacttctaaatagacagcgggcgtgagttacactatgtagtaaagttatttactgaaatactgcgtattgttacgtactgaggcgtggaaggctcaactatggtcacgatgaaggaaatcgcacagaaatcaggcttctcgcaggccacggtatcccggctgctcaatggggacccgacattgtctgtcaaagaggagacgcgacgtcgcatcatcgaggtcagcgagcagcttggctacgctaccggatcacgccgtatcgcattgccacgccgtgtggccgtactcgacaatgccacccgcgaggaagaactggcggacgcctatttcgatgaactacggtccgtgctcggcgacaatgccagagcccagcacatggaactcacgtcgttttcccatatcgacgatctgattgccgacgccggtgatttcgacggcttcatctccatcggaccgtccgtactctcttcggatagactgttgaagctccatctggtattgccctatggcgtattcatcgacatcaatcctgcgcccagcctgttcgattcggtacaaccggatttaagccaaaccattttggacgcattggatatgttggtgtcctcgggcaaacgacgcatcggctatatcggcggtactggcttcacgatgggtttgcacgaatatccggaagatggccgattaaccgcattccgcaattggaccgagcgtttggggctggatgcggaaggcctgatttacgcgcaaggcgcgttcactgtggacaccgggcgcactctaggggaggaagcggttaacgatcatcgagatgacatgccggatgcgttcatcgtggctgcggactcgattgcagtcggcgtactgcaggcgtttaccgctgcgggagtgctggtgcctcgcgataccagtgtgatcagtatcaataaccaagccatcgcccagtacacttcgccgacattgaccagttacgatatcgaccagaatgagctggccgatactgcgattacgatgcttgccgaggccatctccagtcggcgcacgctgcaccaccataccttcatctccaccaccctagtggtgcgtgacagtttcgtaccagcacgataaagaagctccctctgtgcgataaagaagctccctcgtcagagggagcttctttatcgctgttagaacagttccagattcacgtcgagcgtgtaggcgcgatcggcgggcagctggtactgctcatggacgggcgcgccccatgaatcgtctccgcccacgcccatttgcgcggccaacaggcgcaggaacgtgtgacggaccggcggcaactcgttctggtgggtcgcctcttccagcatgagcgagctgtacggcaacaggctcgccgcgaaatgttcgctgccggcctggctgatacgcatgccgtgtccttgggcgtcaagcacttcggcccaacgcaagtcttcatggttgccggtctcctgcggcaccagatacggtgcattgtcttcggccgcggtgcgctcgaaaatgccgagcttgccaccgtgcagacggtcgtgataggtttcctcggggccaaggccgtagaagcgcaggttctcgtactgcttgggaagtgtccattccaatccgaatgccggcagcgtcggcgcatcggtggcaccggcatatcgggcggtcagatgtacacgtccgctggcggcatccacctcatagcgcacggcaacttgggtttcgcccggttcggccaacgtatgacgaatgccgccaacgggcaccaacctcgttgacggcattcgtctttccaggacaccgcaatcgcggatgcatgccgtttacgcgttgaatacgtattggtcaaggcggcgcatggcctccttgacgcggctcaagggcaatgcgagattgacgcggatgctgtagggggcctggaacatgctgccgtcctgccatgcgacgcccacatcccagccgcgtttctccaactcgggcaggctcaggccgtggcgttcgcaccactgctcgcagtcgagcagcagcatgtaggtgccttccggtttggccaaactcactccttggaaatgcttggtgatgtagtcgtaggcgtaatcgacgttgccggtgagcaccgccttcagttcgtcgagccactcatggccttcgggccggtaggcgccgatcagcgcgtgcatggaaagcacgttcatgtcgttgtagtggcatttcgagcttttggccacgatgcggtcccggagtgtgggattgtagatgatgtggtagcttcccaccagtccggcgagattgaaggtcttgctgggcgcgtagaacgccacggtcctgttgcgtgcgtcctcgctgaccgattgggtggggatgtgctggtggttccccagagtcaaatcggaccaaatctcgtcggaaatgaccacgcaatcgttggccttgtacacttccatggccttctcgatttcccaacgttcccacacgcgcccgcagggattgtgagggctgcagaacacggccacgtggatgtgatgctccttgagcttcctgtccatatcctcgtaatccatgcgccatacgccgcgctcgtccagcgtgagcggactgtggacgatgcggtagccgttgttttcgatgctccgggtgaacccgatgtaggtcgggctgtgcagcagcacgccgtcgccgggggcggcgaacgcggtcagcgcactgatcacaccgcccaggaccccgttctcgtagccgatcgcctcccgggtcaatccggtgaccccgctgcgcgtggactgccagtcgatgatggagctgtaatagtcgtcggtgggggagaagtacccgtaggcgggatgcttcgcccgttcgatgatggcctgcgggatcgtgggcacggtcgggaagttcatgtccgccacccacatggggatgacgtcgaaaccctcgcgtggcgggtccggcgcgaatcccgggtcggtgcccagtccgtcgaccgcgatcgaatccatgccatgcctgttcatgatggacgtgaaatcatacgtcattgtccgacaatcctttctcggtccgtggtggccggtcccaatctaaatcgggctcctgacggtgccgtggccgtgggcggcgatttgaccgcgtggcgtgttaggatatgcaccgttatgaggcagtgatccgttatcagcggggagtcttcggaagaacggcggcaatcgcccagtagaaccgacgggatcggcccgagacagccgaacacaagcggtcgcgcaggctcgcggctccgagtgcaacagttcggagcggcgcaaccggtgcgataagcgaggtggtaccgcggtgcggagcgcataccagcgctcgtcatcgtcctcgtaggcaggaacggcagacatggctgttccgggcggaacacagtcggttccggctgcgaggcgattgactaatcggcccacggttcggtacgtgacattcgtgaaaccagccggcacacgtcggcgcccggcaatcgccatcaatgacgctcctgtaggaccagtgcacagtactaacaggagatttacggtgagcgaaaacgtatatcccaaggcgagcgagggcggcgagaccgcgcacgtcgcgccgaaccccagcttccccgacatggaggagaccgttctcgactactgggacaaggacgacaccttccagcagtccgttgaacgcaacccttccggcgaccacagccagaacgaattcgtgttcttcgatggcccgccgttcgccaatggcctgccgcactacggccacctgctgaccggctacgccaaggacgtgatcccgcgctaccagaccatgaagggccgcaaggtcaaccgcgtgttcggctgggacacccacggcctgcccgccgagcttgaggcgcagaaggagctcggcatcgactcggtcgaccagatcgagaagatgggcatcgacaagttcaacgacgcctgccgcgcttctgtgctgaagtacaccaacgaatggcagaactacgtgcatcgtcaggcccgttgggtggacttcgagcacggctacaagaccctgaacatcccgtacatggaatccgtgatgtgggccttcaagcagctctacgacaagggcctggcctaccagggctaccgcgtgctgccgtactgcccgaaggaccgcacgccgttgagtgcgcacgagctgcgcatggacgccgacgtgtaccaggaccgccaggacaccaccgtatccgtggccgtcaagatgcgcgatgaggacgacgcctacgccgtcttctggaccaccaccccgtggaccgtgcccaccaacttcgccatcgtggtcggcgccgacatcgactacgtcgaggtccgcccgaccgaaggcaagttcgctggcaagaagttctacctcggcaaggatttgctgccgcattacgagaaggaactcggcgagaattacgaggtcgtgcgcgaactcaagggcaacgagctggcaggccgacgctactacccggtcttcccgtacttcgcgggtgacgaggccgaatccgaaggccacgtgcccggcccgaacggctacacgatcttcaccgccgactacgtcgacaccgtcgaaggtaccggcctggttcaccaggctccctacggtgaggacgatatgaatacgctgaacgcgcacggcatcaagagcaccgacgtgctcgacgatggctgccgcttcaccgcgcagtgccctgactacgagggcgatttcgtgttcgacgccaacctgccgatcctgcgcaacctgcgcgccggcgacggcccgctcgccgagattccggaagagcgccgcgcgatcctcttccaggagaagagctacgtgcactcctacccgcactgctggcgctgcgccaccccgctgatctacaagccggtctcctcctggttcgtgtccgtgaccaagatcaagccgcgtctactggaattgaaccagcagatcaactggatcccgggcaatgtcaaggacggtcagttcggcaagtggctcgccaacgcgcgcgactggtccatctcccgcaaccgcttctggggttccccgatcccggtgtgggtgagcgacgatccgaagtacccgcgtgtggacgtctacggttcgctcgaagagctcaaggccgacttcggcgactatccgcgtgacaaggacggcaacatcaacatgcaccgtccgtggatcgacaacctggtccgcgtcaacccggacgacccgaccggcaagtcgcacatgcaccgtatttccgatgtgctcgactgctggttcgagtccggttccatgtcgttcgcgcagttccactacccgttcgagaacaaggagaagttcgaacagcacttcccggccgactacatcgtggaatacatcggccagacccgcggctggttctacctgctgcacgtgatggcgaccgccctgttcgaccgcccggcgttcaagaacgtgatctgccacggcatcgtgctcggctccgacggccagaagatgtccaagcacctgcgcaactacccggacgtgaacggcgtgttcgacaagtacggttccgacgccatgcgctggttcctcatgtcttcgccgatcctgcgtggcggcaacctgatcgtcaccgccgaaggcattcgcgacaccgtgcgccaggtcatgctgccggtgtggagctcctactacttcttcaccctgtacgccaacgcggccaacggtggggccggattcgacgctcgccagctgcgcgcggacgaggtcgccggcctgccggagatggaccgctacctgctggcccgtacccgtcgtctggtgctggccgccgagaagtcgctgaacgagttcgcaatctccgacgcctgcgatgcggtctccgacttcatcgacgtgctcaccaactggtatatccgcaacacccgtgaccgtttctggaatgaggacgcttccgcgttcaacacgctgtacaccgtgcttgaggcgttcatgcgcgtgcttgcgccgctggccccgatggaagccgagtccgtgtggcgtggtctgaccggcggtgaatccgtgcacctggccgattggccgttcgtggtggacgagaagaccggtgaagacaccgaactcggccgcgtgctggtcgacgatccggctctggtggacgcgatggagaaggtgcgtgaggtcgtctccggcaccctgtccctgcgcaaggccgccaagatccgcgtgcgccagccgctttccaagctcaccgtggtggtcgagaacgtggacgccgtcaaggcgtacgacgatctgctgaagtccgaacttaatatcaagaatatcgagttctcgactctggaggacgcctccgcccacggtctgaagatcgtgcacgagctgcgtgtgaatgcccgtgcggcgggtccgcgcctcggcaagcaggtgcagttcgccatcaaggcctccaagtccggcgactggcatgtcgatgctgcgtctggtgcgccggtggtctccacgccgtccggcgaccttgcgctggtcgaaggcgagtacgagctgatcaaccgcgtggaggaggagaacgccaccgaggccgccgcttcggtctccgccgctctgccgaccggtggcttcgtgattctcgacaccgctctggatgacgacctgctggctgaaggctacgcccgcgacgccattcgcgccgtgcaggacgcacgtaaggctgccgatctggacatcgcggaccgtatctcgctggtgctgaccgtgccggctgtcgatgtggccaaggtcgagcagttcaaggatctgatcgcccacgagacgctggccacctccttcgaggtgaaggagggcgccgagctgggcgtggaggttgttaaggcgtgaggctttgatgcatttagtgctcgcggagattttgggttggccaagatttctgcgagcacaagtcatctgatggtgccgtgctctgaacctgtggggatgctctggcgaaaggccgggaaccttccaccagagcaaaaggtttaaagggtggagggcaccggccttccgacctttattattgcatgactgagtttgccctgcatacgcggggatgatccgttgatagggaggaatgaaagttcttctgctgatggatgctccgcattggcgggggtattgaatgagagttgacatataaaggtgttatctagtatactttatatcagtaagttgattgggagaaatgatcatcttcccagcatttcttgtaatatgtgttaaggaggacatatggcgataacagataattctcaattgttcccattgccaattcctccgatagagcatgagaggcatatatatcgaccagcatttgattccttcatgtctcggtcggaacgcagacgacaaaccggagattaccattcggcagtgccggcaatgttagccgaatacaaattcgatatacccactgatatcagcgcgaatatggaggaagcagctcatgcgttaggccgattcgatgcttatgcagcagtaaaatttggtacgtcgggacacgaaattagtccgatggcatccattttgctgcgtacggaatctacgtcatcttctcaaattgagaatcttacagttggagcaaagaagcttgcattgcaagagctgggtgaaggtggcagcgataatgcgcgtgtagtgactggcaatgttcgtgccatggagtccgcgttggagttcgcgcatgacttggatgaactgcatctattggcgatgcatcatgcgctacttgccgcacaggaaggttggtcgcagtacgcaggtcggtatcgtgacggcttggtatgggttggtggtcggagcccccgtgatgctacatatgttgctcctcagcccgagctggtcaaacgacatatggatgacgtattggcatttctgcagagggatgatctgccgattatcatgcaatgtgccattgcgcatgcgcaatttgagaccatccacccgtttgccgacggcaacggcagagtgggacgcgctttggtgcatgcggtgctgcgtaacaagggtctgattcacagcaccacgcctccggtgtcggccggattattgactgatactcatcgatattttggtgcgctgcagacatatcgtacgggggatgcgcgcccgattgtggaatgtttcgccgatgcctgcctctatgccgcctctacgggtatcgaactagttgatgcgttggatgcacagttgacggatgctcggcaaaagctagatggtcttcgcaaggattcgtcggcatggagggttctgccgcaactaattgaacagccgattatcaatggcaagtatctgcaagaaactctcggcatgtcgcctatggcctcatctcgcgcacttaaggttctggccgaacgcggtgtactgaaggaaagttcaggaggacgacgcagcactgtatgggagcataggggcgtcttgtctgtgctggacgattatgcagcacgattgagaagggaatgatatggccactcattttccgaagggcaagccggcgttgtcgccggaggctctatcgatttgggcgaaaacggcattttacgggcgcacggatgacgacagctatctgcagttgtggcagcatttggaggacacaggtgaggttgcgctgcatgtatgggatgatttcgtctccgataacatcaaggagctgttggctgaggatattggcgatcgtgaagttgcgaaggaactatatcagttcattgctgcgattcatgatattggtaaaggggctccgtcatttattgtgcagagtaccaaattcgctgacaaggtgaagcagaccaagctgtccattaaggcaatcgtcggcaaagatctgatgcgttcggagtatcggcatgagctcgtcggatatgcagctgtgatcgagtggttctgcagccaggggttcccggttgagccggggacgttcgcctacggtgtcgcatgtgttgtagcaggtcatcatggtaagtccctgactgacgataaacaggcgctggtcgatcccttacaacgggggaaaagcttccgcgggaaaacgttcatgggagataaggcatggaccgcggtccgtgatgagttgctggattggattgcggaaactctgcatgctcagccgattctttatacgctacgcaaccgatccctgcgcagacgtacgcagatactgctgacatcgatggtggttatggctgattggattgccagtgatagcagattatttcctctcaatcagggttccgtggacgaacagatcttcgatgcaaggtatcgagcagacaaagcatggcgtatgttgcggattccggaaccatggaacccgttcgcaacgggggagtcacccgatgagatgttcgctgaacgtttctccatccccggcgcgcatatgcgcccggtgcagcgcgaagcggctcgtctggcccgaaccatgcaatcaccgggcctgatgatcgtcgaagccaatatgggtgagggcaagaccgaggcggcgctgattgcggcggaaatccttgccgcacgattccaatgcggaggcatctattacgcgctgcccagtcaagcgaccgtcaacgcgatgtttactcgggtgttggactgggtagggcatctaccgtccgatgaacagggacagatcggttcgttatttctggcccacggcaagaacaatctcaacgatgagtacgagcacctgcgcgaacaatggttcgacgatggaggagaaggacttgacgccgaaatggatctgtccgaaccatctgtcggttccgtcgacgctgaatacgacgggatcgaccgatatgggaggaatcatgcatacgacgatcattcgaccatgcaggcggtcgtcaactcatggttgaccggctatcgacgcggtaatttgtccgactttgtcgttggcaccatcgatcaggtattgatggctggattgcgtagcaaatatgtcgtgctgcggcatctggcacttgccggcaaggtcgtgattctggatgaggttcactccaacaccgcctacatgaacgtgtatatggagactgtgctgtcttggctgggtgcctacggtgtaccggctatcatgctcagcgcgacactgccgcaggagaaacgccaggcttttctggatgcctacaggaatggggcgtcggctgcttccaaagtggaggcggaacccgtcagatattcaaagtctgctctgtcgcttccggcaaggattcctctaccgtcgagaatcccgccgatgtctgctgggaatatcgcgctgccgcggcgtattcctttgagacagaggaaggatgtggtacggaacaatgacgaggtctccgtcgaaccggatatgcgatatcctctgatttcggtcgtctcggcgagcgaagctctcgttgcggtagcgcctgagccatccggtcgtgccactgacatcgaggtgtcgctgatggatgatggtgacgaggcgctcgtttcgttgctgagaaagaatctccaagatggcggatgcgcggtcgtcatccgtgacacggtaagccgtgcccaagcgacatatcagatgctgtgtgagacgatgggcgatgatatggacatcatgctggaccattcccggtttctagccgtcgaccgtgcccgcattgatcggggactcatcgaccgatacggcagatacggttcggtggagggtcgctccggcatcgtcgtggccacacaggtcgtggaacagtccctcgatgtggatttcgacctaatgattaccgacatcgcgccaatcgacctaatcctgcaacgtgcgggacgtctccaccgccatcatcgtggagatggggagaacctgcgtccggaactgctacgacaggcacgactagtgatcaccggggtcagccagtgggagcgcgatgctccgccgcagttcgcgaccggcgtggataaggtgtaccagccatatctgctgatgcgttcgctggcggtgctggatgtagaaccgggtgtatctcgacgactgaatatcccgggtgatattccccgactggtgcagaccgtgtacggaaagaagctgatatgtccgggatcatggcaggatagtgattatggggagcgtgccgcgcagaccaagttggaagactcgcgaactgacagcgaacatgaggccagacgattccggattttccagccgcagtcaccgcgacatcccttcgatatcaacggttggctcgatgccccgatgaccgatgccgacactccgggaggggcagacgaacgcgtcagccgtgccgggatccgagagggtgaggattcgttcgaagtcatcgttctgcagcaacaggatggagagcttatgttgccgtcttggtgtgggttcaaagaatcagagcggatacttccatccggctttggagctcctactcgccaacaggtgcgtgacatcctgtcctgcacgatttcgctgagcagaacttctttgaagtatatggatcttgatgaagtcattaaagcctttgaacgggccacgccagacccttggtacgactacatgcagttggatcgcagtcttgccggtcagttgatgatcgccctcgacgaaaacgggatcgccacttatcaaatcccgaagtcggataaaaatggtacaaaaataagtaacaggacattgactgtccgctattcaatggagaagggatggcaggtagatgccgacgagtgatctttcatacaacttgatggatcgtccatggatcccggtgacgatgactgatgggtcgtttcaatgcctgtccatcgtggaagtcctggaacgggcggatcgcattcacagcatagatggtgacatcccgcttcagcgttttgctctggtccgtctgctgctagcaataatatacggcacgtttggtcacctttgtgtgtctgaacagtctgaccaggattatgatgacgtctcacactggaagatgttgtttgggagtggttcggaaagacgagaggatgtcctccctgcgttgttgaactattgcagctattaccgggaacgatttgacctgttcgacaatgcggcacctttctatcaagtttctggtctgcacaccgcgaaggacgaagtttccggactggaacgtttgatattggacgtacccaatggcgagaagttcttcaccacacgcattggcgaaggtcttgccacgatgagcgctgcggaggcggcccgatggctggtgaccttgcaggcgtttgatgcgtccggcatcaaatcgggtgcagtgggcgaccctcgcgtcaaggggggcaaaggctatcctatcggtgtggcatgggctgggcatctgggtggggatctcgttgaaggatccaacctgtggcagacactgatacttaactacgtcggcgtcggcgtactcggtcttgacgatgggtcggtgtggaacgataacgaggatgtgccaatatgggagcgtgatccgttgacggcacaggctgaggtgggacttgaccagcctgcggaaaagacgggccacacggtcagcttcttaggcccggcgacgctgctgacttggcagtctcgacgcgtgctgctagcccatgacggggagacagtcaccggtgtgttgatttgtaatggtgaccgtttgaagccacagaatgcacaccaatatgaaactatgacctcatggcggcgtagcgacgctcaggaaaaggcactgaagatgtcgctggtatatatgcctcgtaaacatgatccatcccgcgcgctgtggcggggtctaccgacgttgattgtggacgagcatgcaagggccgaacatggtagtgaacctccgaaagcattgcgaccactaacgttgcgatggctggacaaggtcaatattggcgaattacccatccggttgcacgcattcggcgttgaatatggcagcaacgaagcggtggttgacaccactgtggacgatgtgctcgatctgaacctgacggtgctgtcctcgcagcaccccgaattgggcggagtcgtctgcgacgctgtcggtatggtggataacggtgtacaggagctacggaatctggcgggaaacatagccatcgctgccgggttgccagtggatggaccgagaactcgggccgcagacaccgggtacactgctttcgatagcgcatttcgacggtgggtgcgtgggattgactccgatgccgatgtggaagaggttcggcagaaatggagtacgactgtgcgacgtatcctgttccgtctcgggaatcagcttgccgcccaagcatcctctcgcgcaatcgtcggtcgtgacatcactcgcagaaacccgaaaaccggtgcatcgacaactacgcattactgcgtggcacttgccgaaatttggtaccgagggagaatcaataagcttatccccgaggtcctcaacgaaggagagaacgaataatggaacagcatatggagcaatccaggcaaggcatgcctccgaccgtacgacttacgccactcggcacatgggtgtcgggacgagtacgtcgactagccaatggcggtggtagcgagaaaggatatttggacgacggtgcctacacgactgcagcaatagccaaacttcggaacagcgtcggccatgagatcggcgacaatcccgatgtgttcgcgtggactttgccggatacggatgatcgcgcgatcagaggatacgattccaccgattctggtacaccaacgcctcaggagcatgccatctatgcggctgtcacgctatttgcgctgcaccagcagtcgattcgtgacctgtcgatgcacaccgatgcgggggtttcgcttggtcttgcggtaggccgtatggcatacggcaatttcaatgagaacggcatccgtggtatgttcgaccggctgcagaccgccaacagctggaaggagctgattcgacatgcgcgaggcctgattcgactactccgacgcgagcgcatcgccatcaattacgggatgctcgctcaggacttggaaggactgcgttccggacgggcacgggccaatgcggttcggctgcgatgggggcgtgactttcagcgaggctatggagccgcgagggccagcgatgattcgaatagctagtgcaatgctctgagtccggggccatccatccattgactcatgacatctccatattgacgtcccatacacaaacaatatgacggcaagtgccgtcgtttccggaaaggaataagacatcatgtcaactatcaaccgcaccatcatcgaaatccacgcgctggagaccaccgccgccggcaacctcaaccgtgatgatacaggcagccctaaaaccgtggaatacggtggaacgacccgagctagggtgtccagtcaagcttggaagcgtccgacacgcgaactgttcaaggaattggtcgatccaaatgatctgggaatacgcaccaagcgtgtcgtggaggaactgacaggccgcatcctcgaatgccgcggagatctgagtgaggagcaagcaaccatgctcgccgaaaccgtattacaaggtggtgctggtatcaagctggaaaaaccacgtaagaagaaagctgacaaaatcgatgatgatgatcgtgtcaagcagtctcagtatctgctgttcttgggcaatcgtcaatatgatcagttggcagatcttgccatcgaggcgactgacactgatgatccgattaaaaaaattaaaggtgacaagaagcgcatcaagcagatcgtatccaacgaccgctctattgatgtgacgttgttcggccgcatggttgccgatgacacggatctgaatgtggatgcctgtgctcaggtggcgcatgcgatcagcgtgcaaacggtcgagcctgaatctgatttcttcaccgcagtggacgataatcagcgcaacgggggagaagatgaggcgggtgatgtcggagcagccatgatgggacaggttgaattcaacgccgccactttctataggtacgcgaatgtagacgccaaccggctgcaggatcggctgggcgatgtcaatgccacggcaaaggcagtctccgcatttgtgcaagcattcctgaccagtgtgccgcagggcaagattaatacgtttggacagaatgttctgccggacctcattgtggtcaacttgcgtgatacgcaggcagtaaacatggttggtgcttttgagcggcctgtcgcaccggattatgtgcagcatgcgaccgaggctttagtgcggcgccagcaggatctggacagggcctatgacatcgcaccggtgaagacttgggttgtgcgtatcggcgacgacaccgtggctgcggatgctttggtcgacggcaaaaccacgtcgctgcgtgacatggtcgtcgacatcgaacggactatcgcgaatcgtctgactcaggagtgaatgagtcatgccagttttactgatgcgattggctgcccccatgcagtcgtgggggtcacgaagccggttcactcggcgcgaaaccgaggcatggcccaccaaaagcggcgtcatcggcatagttgctgcagcgctgggagtcgggcgtgacgaatcgcttgaacggttcgacgggctacggttcggcgtgcgcgtcgaccagccgggcaccatcatgagcgattatcagacggcccgtaccgatgagggggacatgcttccgctatcgcgcagatactacctgcaggatgcggtgttcctcgccgggctagaaagcactgattgtgccgagcttgaacaataccggtctgcactggtgactccatactaccaactattcctcggcaggagatcgtgtccgccagacggtcctgtgcatgcgtggatatcggacgccgggttagaggatgcactgcggcaggctccatggcaagccacggaacgataccagtatcgggtgatgcatggattgaccttcgacaagccggacttcttgcccatcatcgtggaaccattgcccggggagggaagtcagctgggattcgtggatgagcttatggatgagccggtgagtttcagccagcagaaacggctgtggaagccgcggcgatacatgcgactcgatgatggagcgtcgcctcgccctactgttcccgaactagggcccgcggatggcgacgatacgtgtccgagtgaatccgagtcggtgctcgatgacgacacattcttcgatgcggtggcaaatgcagaagaggaagaggagcgatgacaatattcaccagagccatgattgacccgaggcatcgtcttgcgatgcgagcgttggcgtcactggagaggatgcacgctatcattgctagggctaccgatggtgataccgacttatcccgagtattgtggcggcttgacccgggacgtaccaggcaaccgagtcgactgtatatcgtctccccgaatgtcccggatgcggaaattatgcgtcaggaacttggagttggaactgccgatatttcgacatgctcatatgaaccgttcctgtcgagattggaatgcgggcaggaatggggattccgtcttaaggcgaatccgacacattccgagccgtccggagagccgggtaaacgcggcaagcgcacgggcatcatcagggtcgaagaacagcaagaatggttgttccatcaggctcggcgtgccggattccatatgccggtcaataggcttgagctacctgaggtattagttagacattcggttcaggagaagttcagacgtaagggctcgacagttacattgacttcggtcacctatgatggcgtactggttgtggatgatccggacttgcttcgacggtcgttgatcggggggatcggacgtgctaaaggctatggattcggtcttttgacattggtgcccttggctgacgatcatcgcaaggagcctcggtcatgagcggcatacctggtgttcgaccacctgagttgcagtcgttgctccgcgtgcaagatcgtttgacatttctgtacgcggagcattgtgtagtcaatcgtgccgacaatgctgtgacaataactgatgcacgaggaacggtgcatgtgcccgccgcgacgttgagcgtactgatgctaggaccaggtagcaacattacttatgccgctatttgtctgttggccgagtcgagatccacatgcatatgggtgggagagcatggtgttcgctactactgtcacggggcctctctcgcgcaatccacgagattgttggaagcgcaggccaagttggtgtcttccgagcgcacccgtgtgaaagtggctcggaagatgtatgcgatgcggtttcccgatgaatcaactgatggtcttaccatgcaacaactacttggtaaagagggaacacgagttcgccgagcgtatgagcgagaatcaaaacgtaccggggttatatggtcagggcgatcgtacaaagtcacggatttcgatgatgcggatgaggtgaatcgtgcgttgtctgccgctaatacgtctctgtacggtgtggtgcatgcagttatcgttgctcttgggtgttctcctggattggggttcgttcacgcaagaaatgagcgaagttttgtctatgacattgcagatttgtacaaagtggatatcacgattcctctggcatttgatttagtggcacagcaagttgatgatgtatccgtcgcggctcgtcgaggcatacgagacagaatgaaagatgggaaatttatgcaacgttgtgtgaaggatatacgttcgttgttattgactccagatgaggccgaatcggattctccggaagttgaagatattacgacgcagttgtgggctggggcttcgggatatagagcgagcggcaaaaattactcagtcgaatcggacatgttcatcaatgatgatgaggatttgcatgtagattttgacgtggaagatggcgaattctagtgcggacgatatgccagtataagatatagggcaatcgagcaaacaagcagaagcataggggctcataatgattgttatcgtacttacagtgtcccctccgaagctgcgtggacacttaacgcgttggctgtttgagatatcccctggtgtctatgtaggcaaagcttctgctcgtgttcgggagctgctgtggcagcagatattggagaatatcagcgaagggcgtgccgtcatggtgtactcttccaataacgaacaaggtttggacttcagaacacatgggcaagaatgggagccagtggattatgatggattaaagctgattatgcgaccaaactcaagtcaaaagcagaagcgtaatggagttttgaaaaccaagaaaaagactggttggagtagtgcctctcgatataggcgttttggccgatgactggaagcaggaacaatagcacgaagattggagccactgtgcgaatccaattattgagggtccagcgctcaagagttttcgcataaaatcggactgtttgccccgcacgcgcggggatgatccggagggcgacacctccatcaccatcaccgcagggtttgccccgcacgcgcggggatgatccggcttctacgctcaccctttggaggcgtggcttgtttgccccgcacgcgcggggatgatccggagaccgtatgagccagagatgtactccacgcgtttgccccgcacgcgcggggatgatccggtgtggagcaggccggtaaggcagcgactcatgtttgccccgcacgcgcggggatgatccgttgactgttttttctggtgctggtgaagcctcgtttgccccgcacgcgcggggatgatccgaggtgtcttgcgtgctatggctactgccgtccgtttgccccgcacgcgcggggatgatccggcgacggccaggacgattctcgccagcccactgtttgccccgcacgcgcggggctgatccggtgtc

SEQ ID NO: 3699 - DNA, 3098 bp, Unknown
  R150_10m  MAG No. k141_4202
gcttgacacgcgggcaaaaatcatttgatttagtccgcatggtggtgtagatttgaaactcggtgtctgaccgcaggctcggtgcgtgttaggcaaggtagctttccaaaacataaaaggaacgataaggtacgcgattgtgaaggccggtggccatcaggaaaaggtcgaggttggcgacaccatcctcgtgaaccgtctcgacgccaagaagggcgataccgtggagtttccggttgctctcctggtcgatggcgccaaggtgacccttgctgccgccgatctggccaaggtgtccgtcaaggctgaggttgtgaacgatgaagccaagggcccgaagattgacatccagaagtacaagaacaagactggtgttgctcgccgtaagggtcatcgccagaagctgactatcgtcaagatcacggcgattgcctgagttatagaaaggaccatgaatcatggcacataagaagggtgcgtccagctctcgcaacggtcgcgattctaacccgcaatacctcggcgtgaagaagttcggcggcgaagccgtcgtggccggcaacatcatcgttcgccagcgtggcaccaacttccacccgggccacaacgtcggcatgggcaaggaccacacgctgttcgccctcaccgatggctccgtgaagttcggtgtgcgtcgcgaccgcaaggttgtcgacgtcatcgcctgagcgatatagcgtcaagctttttcaagccgcgcccgtaaggacgcggcttttttgtaaggtaatcaatatgagtgattttgtggatcgagtaaccgtccatgtcaagggcggcgatgggggcaacggttcggccggcatccgtcgtgagaaatacaagccgttggccggtccgaacggcggcaatggcggcgacggtggttccgtggtgttcgtggccgaccgtaacgccaccagcctgctcgactatcgtttcatgccgcatcgtgtcgccggcagcggcaccatgggtttgggcgacaataaggacggctccaagggcgaggacctgattctgcccgtgccctgcggcaccgtcgtctttgaggcgcgcggcgaacagggcaaatccaagcatcccggcgcacagctcgccgacttgcgtcacgagggcgaccgctgcgtcgtcgcccagggcggtgccggcggcctcggcaacatcgccctggccaacaagacccgacgcgcccccggcttcgccctgctcggcgaactcggcgaggaacgcgacgtgattctggaactgaagtccatcgccgacgtggcgttggtcggtttcccctcggccggaaagtcgtccctgattgcggcgatgagttccgccaagccgaagatcgccgactacccattcaccacgctggtgccgaatctcggcgtcgtcatcgccggcgactctcgatacaccatcgccgacgtgccgggcctgattcctggcgcctctgaaggcaagggcctgggactggagttcctgcgccacatcgaacgtaccgaaatcatcgcccacgtgattgattgcgccacgcttgaaccggaccgcgacccgatgtccgactaccacgcgctggaaaacgagttggcactctacgccgacaagctcgaactgccattgggcgccatcccgattcccgaacgcccgcgcatcgtgatcctgaacaagatcgatgtgcccgaggccaaggaattggccgagttcgtgcgtccggagttcgagaaactcgggctgaaggtctttgagatctccaccgcctctcatgaggggctgaaggagctcaacttcgcgttgtctgcgctggtgcatgagatgcgtgaggaagtggccaaccgcgagcaggccgaagaggagacgcgcgtggttatcaagccattggagaccaagggccgccgtccgcgtcgcgctgatgagggcggcagtgcgcttgagttcacggtcgagcgccgcgaactcggcaatggcgaagtgttcttcgaggtgcgtggcgtcaagccggagcgctgggtcatgcagaccaacttcgacaacgacgaggccgtgggctatctggccgaccgcttggccaagctgggcgtggaggacgagctgcgccgcaagggtgctcaccccggcgacgaagtgcgcatcggtcgtggtgcccgtatggtcgaattcgattgggatccgaccatctccgccggtgccgaaatgctcgacggctccaacctcggtgcccgaggcaaggatctgcgtctcgaagagcaggacccgcgcacgcaccgccgctccaacgccgaacgtcgtgcccaataccacgagatgatggacgcccgtgccgccgtgcgcgacgcgatgatggccgaacgcaaggccggccactgggccgacccgaccgttgacgacgatcgccatgacgaaaccagtctgttcggccacggtgagtccagcgaagatggtgaaaccgaggaataaatgagcactccgagtcaggccgaggtgcggcgcatggtcgcagcagccggaaccattgtcgtgaaagtcggctccagctcgctgacccagccgagcggtcacctcgacccggacaagctcgacgctctggccgccgcccttgcccagatacgactgatgggcgggcgtgtagtactggtttcctctggtgctattgcggccggcttcggcccgctgggctttgacgaacgcccggccgacgtggctactcagcaggccaccgcagcggtcggccaaggtttgcttatggctcgctacgagactgcttttggccgtttcggtattcgcgtcggccagattctgatcactgccgaagatacgattcgtgccacccagtaccgcaatgtggaacgcacgctggaccgattgctggaccttggtgtggtccccattatcaacgaaaacgattcgctggcgtccaacgagattcgtttcggcgataacgatcgactctccgccttggtagccaatctggtgcgggccgaagccttggtgctactgaccgacgtggacgcgctatacacggcaccgccttcccagcccggctcccgccgtgtggaatatgtgcccaacgttatcgatgcatttggcga

SEQ ID NO: 3700 - DNA, 70510 bp, Unknown
  R150_10m  MAG No. k141_4407
ccgataaaggtctagaaattgaaattgtcaggatcagcaccgttgcgcttgccggtgttgatggcggagatggcggtcatatcatcgactgataggttgaagtcgaagacctcgaagttctgcttgatacgctcggcatgagtggatttcggcagcacgacgataccgcgctggatgtgccagcgaatcaccacttgggcaggtgacttgccgtactcggcaccgatctcggccaatactgggttgctcagcaggttgccgccggtaccgccgagcggactccaagcctcggttgcgatgcccttggcacgcagctggccaatgagctcttgattggtgaattgtggggaagactcaatctggtctacggcaggtaccatatcgctgtgggtcagcagctcatcaatatgatgcttttggaagttactgacgccaatggccttggcacggccagaggcataaatctcctgcaagtcatcccaggcctgctgccagccgtctgccggccagtgaatcagatacagatccacataatccacgcccaagcggtcgaggctttcttggaatgcatccttgccgtggcgtgcgcgaacatcgtcattccacagcttggtggtcaagaagaaatcgctgcgcggcacaccagcacggcgaataccttcacctactgaggcttcgttgcggtaaatcattgcggtatcgatatggcggtagccattctccagagccgtctgcaccgcgttcactgtagtatcaccatccggtgtctggaatacgcccaagcccacctgcgggatgacagtgccgttgttcagcataattgtcgattgaattgccataatgcctcactattcgtagtgttcattcaatttcctattttagaaacaagacgatgcaatgagccgcgtttctcgggcaaagaattgcgtaatgatggcgtgattctcgttcattaggtcattattgcattcattaggtcaatgggtccagggtcttcggcatcagaacccagtcattacgccattcctgaagagccgtcttacggcataccgacctaatgaacgtgaaatcgacctaatgaatgcaacgagtaagcggctacgataataaccagtagaatcacaacccagattgaaggggagagcacgtggcagaggaatatgtggctgcattcgatgcagggaccacggcgttgaagggtgccttggttgataggcaaggccgtatcgtagccagtgcgagtagtgagcttaaccttattatcaacggcgactatcgggaacagagccccgatcaatggtggcaagctttctgctcggcctccaggcacatgattgagcaggcgcggcaatccgagtcagacttcaatgtgactcgcattcgtggcatcattttcagcggtcagatgcaggatgttattgctttgaacggcgagctcaatcccgtccgcaatgccattctgtattcggatggccgagccgaggaacaggccaagcaactcgccaagacatatcagggtggagtagaacgtttcctgaacaccgttggcaaccggctcgaaggctgcttgccgttgcccaagttgatgtggctgcgtgaacacgagccggaaacgtacgcgcgcattcgtcatgtattgatcagttccaaggactacttgatcgcccaattgaccggcgaatgcgtgggcgatgtggcggcttgttccacagccggtgccatgaatatccgtaatggccaatgggatgccgaattgtgcgaggccgcaggaatcgacatggccatgttgccacacctgcacaatccgcaagacaacattggcacagtgacggaatccgctgcacaacgcaccggtttctccgccggaactgcggtatacgcgggcattggcgatgcgggtgccaccacgctggccagcggtgtcagccgccctggtcaatacaacatcaatatcggcacctcaggttggatcgccaccgtttcgcccgaaccgttcaccggcaagcccggtgctgcgaatctggcatttggtgtggaagaagtcttcgtgaatgccgtgccattcctcaacgccggtgacgtgcataaatgggttaccggcgtattcgctgatggcgattacgcggaagcacatcagcttatcgaaacatccaaacccggctccaacggtgtgatgtgcctgccatatctggtgggggagcggttccccgtaatgaacccgaatattcgcggggcctatgtaggcctcgatccagacaccaccaaggcagacatgatgcgtgccgcgcttgagggcgtggccttctccattcgtcaaggtatggaaagttttgacgccaaacccagcgagatttccctgattggcggcggagccagagaaaatgcgtggtgccagattctggccgatgtgttggagcatcccatcgaagtgttcgccaatgccgatattctgccagcagtggcaatggcctcgttggtattcaatgtaccagacctgctgcaatcagtatgcgaatgcactgtataccagccgaatcctgacaccgcacgcacatatgccgacgcataccggcgattcctgagcctctacccgatgctgcgaacgatggattaggaactgagcatcatgaggcaatcagcgaatttggtccgcaaacatatagcggtcaccggactggtgcaaggcgtgggattccgttattttacggtgactcaggcacgtcgacttggtgtacagggctgggtgcgcaattgccgcgatggctcggttgagctggaagcacaaggcagtagcgacgcagtgcaagccttggttgagcaattagccattggtccgcgatggtccgaagtgagtcacgtcgccgtacatgacatgccgattatcgatgagaccgctcgggcatttggcgcgcgtcaataacctgcatcacgaatccacatcacgcacgataatctcacgatacgggtgaacatgggcgttcctcgccgcttaggccccgcacgttggtacgatggggcgttatgagtgagaacatcatgcgaatcattgacctgcgtggtcagaacctgtcccgtgccgaactgctcgccgcgatgccgcgtgctgcaatgggcacttccgaagccaccgatctggtgcgtccgattctggacgatgtcaaggagcgcggcgccgctgccctgcgcgacttcgaggagaagttcgaccacgttcgtccgaagaacctgcgcgtgccggccgaagcgatccagaatgccctgaccacgctcgaccccgaagtgcgcgccgccatcgaggaatccgtgcgccgcgcccgcgccgtggcggccaaccaggtgccgaaggacttctacaccgatctggccgaaggcgctcgcgtcgccgaacgttggattccgatccagcgcgtcggcctgtatgtgcccggaggcaaggccgtctacccatcttccgtgattatgaacgccgtgccggctcaggccgcgggcgtcgaatccctggccatcgccaccccgcctgcgcgcgatgatgcggagggtctgccgaacaagaccattctcgccacctgcgccatcctcggcgtcgacgaggtgtacgcggtcggcggcgctcaggccatcgccatgttcgcctacggcgccaagggcagcgagccgcaggacggcgacgtgttgtgcgacccggtcgacaagatcaccggcccgggcaacatcttcgtggccaccgccaagtcgctcgtctccgcattcgtgggcatcgacgcggtcgccggcccgaccgaaatcggcatcatcgccgacaagaccgccaacccgagcctgctggcagccgacctgattggccaggccgaacacgatgagcttgccggctccgtgctgttcaccgactccaccggcatcgcggacaaggtacaggagaacctcaactatcgcgtgccgaagaccgagcacgccgaacgcgtccacacatccctgtccggcacccagtccgccattgtgctgaccgacggccttgaccagtcgatcgacgcggccaacgcctacgcggccgaacacctcgagatccagaccgaggatgcggatgcggtcgtcaagcgcatcaagaacgccggcgccatcttccgcggcccgtactccccggtgccgctgggcgactacatgtccggttccaaccacgtgctgcccaccggcggcaccgcccgcttcgccgcaggcctcggcgtgcacacgttcatgaagccggtcgaagtcatcgaatacgacgaggaaggcctcaaggctctcgccgcccgcatcaacgccttcgcggtgtccgaggacctgcccgcccacggcgagtgcgtgctctcccgcttcgtcaaggatccgtatgacaaggccaccctgcgcgagcaggagaggggagccggtctgcgatgagctcgattcccgaaaacctgccgctgcgcaacgacctgatcggtgaggagccgtacggcgctccccagctggacgtgccggtgtgcctgaacgtcaacgagaacccgtatgcgccggacccggccgtatgcgacaccatcgccaagcgtgtgcgtgaaatcgcccccacactcaaccgatacccggaccgtgagcacattgaattgcgtcaggcattctccgattacctggcccgtgaatccggtacccgtctggacgtggacgagctgtggggcgcgaacggctccaacgagatcatgctccagctgttccaggctttcggcggcccgggccgcaccgcactcggtgccgacccgacgtactccatgtacccggagtacgctcgcgacaccttcaccggttggaagctcgcccaccgcaacgccgacttcacgttgaacgtcgacaaggtgcttgaggccatcgccgaggtcaagccctcgatggtgctgctcaccagtccgaacaacccgaccggcaccccgttgccgatggaggatatcgagcgtattctcgccgcctgcgaaaccgccgaagtggccggcgcgggtgagggcgtgcacccgattctcgtcatcgatgaagcgtacgtggaattccgcaagcccggcaccccgagcgccgtgagcctgatcaaggaccacccgaacctggccgtaagccgcaccatgagcaaggcctttgccttcgccggcgcgcgagtcggctacctagccgcatccaagggcatcatcgactgcgtgcgcatcgtacgtatgccgtaccacctgtccgccgtgacccaggccgccgcactggccgccttcgaacacaccgatgaacagctgagccgtgtcgagcatctgcgcgaaacccgcgaggccaccgccgcatggctcaaggaacagacctacaaggaccagccgcttgaagtggccgaatccggctcgaacttcctgctgttcggcgggcacttcgacaagcgcgaagccatcttcgacgagctcctgaagcgcggcgtactcatccgcgtggtcggaccggacggttggctgcgcgtgtgcatgggtaccgacgaggagatggaaaccttccgtaacgcccttgttgaagcgcttcgtatagtggaagcagcataagggacgtttctttccgattgcggcgagacccgaagcgattcgagtcccgccgcaatccaatatgacgaatcacacaggagacatgatggcaagaaccgcgcacatcgtccgcgaaaccagcgaatcacacatcgacctcgaactgaacctcgacggcaccggcaaaaccgatatcgatacatccgtgccgttctacaaccatatgatgaccgcgctcggcaagcattcgctgatcgacctgaccatccacgcccacggcgacaccgacatcgacgtgcaccacaccgtggaagatacggccatcgtgttcggcgaagctctgaagcgggccctcggcgacaagaaaggcatccgccgcttcgccgacgccaccgtgccgctcgacgaggcgctggccaaggccgtggtcgacatttccggccgcccgtactgcgtgtgcagcggcgagcccgaaggctacgaattctgcatgatcggcggccacttcaccggctctctggtccgccacgtcatggaatccatcgccttccacgccggcatctgcctgcacatgcaggtgctcgccggccgtgatccgcatcacatcgccgaagccgaattcaaggcgctggcccgtgcgctgcgcttcgccgtggaaatcgacccgcgtgtagacggcgtgcccagcaccaagggagccctgtgatggccgacgacaagttcgatccggacgaatcgcacttctccgacgaggagcttgaggccgcgctcgccggattcgagaaagaattcgcggacgattcggcatccggcgatgccagtgataccagtgatgccgataaaacggcggacgctgcttcagcgaagtccgattccgacgcgaatgatgatacggctgataaggcttccgctgattccggccagcctatgaccgacgacgtcaccgggtcggtcgctgatgcggtgaatgaggccatggccgacgtggtcgacccctcgctcggcttcgacaacgaactcgctggactgttgggtaacaaggcgaaggtggcgctgatcgtcacccgtcttgcctccgccgaactgttggccgcgttctgccagctgtcggacatctccgccgcatgcgtcggtgccaatcagggggccgtcgcggtgctgaagaatctggacggcgacggcccggaagccgcagccaaggacctgaccaccgtggtatccggcatggccgtgattcttgcagtcaatcgtgccgacaagctcgaagtggccatgtacgtgcagggagaggccggacagagtttcgcgccgcccgtgctgttcacctccacaccgcgcttcgtcgaggacctgatgctcggcatcgtaactctgaaccaactcaagacccaagggtttgaagtggtggattccgctggactcgaccatgaccaggcgatgcagattctcgccaaccataccaagcgtgggcgtggcggacgcggctcccgcatcgaatagacgccaaccaaccggtaggggataggagagaatatgaccacagcggttgttttcgattacggtttcggcaatgtacgttccatggtgcgtgcgctcgccaatcttggcgtcgacaccaccctcacctccgattatcgtcaggcgctggaggccgacggtctggtcgtgccgggcgtgggcgcgttcgccgcatgtatggagggtctgaagaaggtcgacggcgaccgtgtgatctatgatcgcatccgcgccggccgtccggtgcttggcgtgtgcgtgggcgagcagatcatgttcgaacacggtctggagcacggggcccatgccgcgggcatcgggctgatcggcggaacggtgaacctgctggacgccgacgtggtgcctcacatgggatgggacacgatcgaggccgcccccgattcggtgctgctcaacggcgtggagaatgaacggttttacttcgtgcactcctacgccgcgatggaagtgaagccggcggatacgtcccgcttcgacattgatctgagcggtgcgcccgaacgcgtgagctggtgctcgtacggccggtcgcgtttcgtggccgcctacgaacacggcccgctgtccgccacgcaattccacccggaaaagtccggggacgctggctcccagctcctcaagaactggatcgccacgctgtaaaaagcatgaagctcccctctgacgagagagctcaaattatgtataagtaactgaagaaaggctcttcttatgtcgttgactctgctgcccgccgtcgatgtacgcgatggcaaggccgtgcgcctgcgccaaggcgaatccggttccgaaaccgattacggttcgccgtttgaggccgcccgtacctgggttgaggccggtgccgaatggattcacctggtcgaccttgatgccgctttcggtacgggcaacaatcgcgatcagctgcgtgaaatcgttcatgagcttggcgaccgcgtgaacatcgaactgtccggcggcgtgcgcgatgacgcttcgttggacgcggcccttgaggccggtgccgcccgagtgaacatcggcaccgccgctttggagaacccggattggaccgcttcggtcatcaagaagtacggcgaccgtgtggctgttggtctggatgtgcgcggtcacacactggcggcgcgcggctggacgcgcgaaggcggcgacctgtttgagaccatgaagttccttgactccgtgggctgctcgcgttacgtggtcaccgacgtggccaaggacggcatgatgtccggcccgaacatccaactgctgcgtgaagtcgccgaacgcaccgacgccaaggtcacggcctccggtggtatctccaagctggacgatttgcgcgccatcaaggaactggccgagatcggcgtcgattccgccatcctcggcaagtcgttatacgtacgtgcgttcacgctccaggaggcgctcgcagtcgcgaagtaggcaaaggactcgccttagcgagactgttaagctacctttgctcagctatcgcttcactcaggcctcgcctacggacagcccattgggctgtccgcttaacggctcagcacgggaggtcgccggatttgaggagtttcttgaagacggcgtagtcttcatcattctgttcggcgtagctgacggcgaatgaggcgatggcctgatcaaattcgtcggtgccacccatgtaattggcgatcgcgatcgaatcgccggtgcgggcgtgggcgtgcgccaacgaccatgcgcacatgcgtgacagatcgctcaatcccgaagcgttgagattgtcgatatcaatcgaccccttgccattccacaactggcgcacgtaatagtcgcgcggtcggccatcctcggccataaagctcgaccaacccaacagcacatcggccgtattctgaatcagcttctgcccctgaaccacgtgctcaccgtgcgtggcgtacggcgacgcgccgcagtaatgctcgagcacggaatacgtggcctccttcatctgaatcatcatcggatcgtcgatatcacgcgcgatccacaccgacgtccacgcgcgctggcccaccgagcccacgcccaccaccttgcgggccgcgtcctgatagcgcaaatgatcgaaaacccaacggcgatcgtcgtacagggaatgccggtagctctcgaacagcgtgtctatacgtgcctgcaacgcatccaagtcggcgtaatcatccagctgatatcggcaccagctcgggcggattggcggatggggtgagatgatcttcgcttatagtcactaccatagtgccgtgccggcacgggcccgaaccatgcctgacatgcggaccggggcatgttgatgaaatctcgcgactcgctggtgacgaacagtgagatgttaacgcccctcgtaacacggttatggaacgataggcgactatggataaacagcaggagtttgcgctgcgcacggtcgaagaacgcgacgtgcgctttattcgtctgtggttcacggacgtgttgggaacactgaagtccgtggcgattgctccggccgaactggaagccgcgtttgaggaggggctcggcttcgacggttccgccatcgagggcatgacccgcgtgtccgaagacgacatgatcgttcaacccgatcccgcgacgttccagatcctgccgtggcgcggtggcccgcaaggtaccgcccgcatgttctgcgacattctgaccccagacggcgagccttcgctcggcgatccacgtcacgtgttgaagcgtacgctcgccaaggccaaggacaagggcttcacgttctacgtgcatccggaaatcgagttctacctgttcgaaagccaggacgactggtccaaggccccgaccccgatcgacgagggcggctacttcgaccatgtgccgcgcagcccaggcatggacttccgccgcgccaccgtgaacatgctcgagcaaatgggcatctcggtggaatactcgcaccatgaggcggggccaggccagaacgagatcgatctgcgatacgcggacgcgctcaccatggccgacaacatcatgacattccgtacggtggtcaaggagatttccttggagcgtggcattcacgccagcttcatgcccaagcccctggccgacgcgcctggttccggcatgcacacgcacctgagcctgttcgaaggcgattccaacgccttctacgaggccggtcaggagttcaacatgtccctgaccgcccgccagttcgccgccggcatcctgtaccatgcggccgaaatctgcgcggtcaccgaccagtacgtcaactcgtacaagcgcctgtggggcggcaatgaggcaccaagctacatctgctggggccacaacaaccgttccgcgttgctgcgcatcccgcagtacaagccgggcaagggcaactccgcgcgcatggagttccgtgcgctcgacccggtggccaacccataccttgcctactcggtgctgctggccgccggtctcgatggcatcgataagcagatgcagctgggcgaacccaccagtgatgacgtgtgggagctcaccgacagcgaacgtcaggctatgggcattcagccgctgccgcgctcgctggacgaggcgctgaagatcatggagaaatccgacttcgtggccgacgtgctcggcgaacacgccttcggctacttcctggacaacaagcaccaggaatgggaggagtacaaccagcaggtcacgccttacgagctgaagaagtatctgccgaagctgtaatcgcaagcgttgcacatgtgccgaaccccgtcgatgattggtcatcggcggggtttttatagcgtgtcgtggtggtgggtagcgggcagaggtgggaatagtgttgtcgctgagttgatacgaaaaacgattgacgtaaccgacgaatcagcttgtagtacgagcgagagcactcaagagagcacccatgacgaacacacctgcgaacaccgcgcgcaccgaccgcttcttcaatctgccggtcaccatcctgatcttcgccagcttcatgctgggcatgagcgaattcgtggtagtgggcatcctgccggacatcgcatccggacttaaggtctccgaagtgaccgtgggtaatctggtggccatcttcgcattcgtgtacgcgccctgcacgccgctcggatccgcattatccgcccgattcccgcgctttctcacctatctgacgttgatgggcgtgttcctcgtcggcaatatcctgtgcgccttcgcgccgaactatccggtgctgctcatcgcccgactgctcatcgcctcggtgtccggcacgctggtggccatctccatgaccttcgcgcccgacgtgaccaccgacaaataccgcaccaagttcattgcctgggtattctcgggtttctccatcgcctctgtggtcggcgtaccggccggcacttgggtggccaatactttcggctggcgtgtcacctttgccttggtttcggtgctcaccgccgtgctgatggcatcgatggcagtgtctctgccacgcaactcacatccggcgaagatcggtttcctgaggcaattccgtctgttcttcgaccgccgcatccagctcggcgtggcggatgtggtctttggcgcagccgcctcctacgtcttctacacgtatctctcgccgatcatgcgcgacgaaatcggtgtgcccgaacgctatatcagcgtcggcttggtggtctacggctgtgcctgcctgtggagcaacctgtacggaggcaagctggccgatcggggcaggggggtcgagccgctgacccacattcgaccgatctactgcgtgcaggccgtctgcctgtgcctgctggctttcgcctcgctggtgccggccggcggcgcactgctgctggtggcgcttggcatgctcatgtacctgcagaattccgcttcccaggtgctgtatatggatgtggcctaccaatcccatcccggttcggtgaatctggccgcctccctgaattccatgtcgttcaacatcggcatcgccatcggctccgcggtcggcggcctggtcaacgacctccttggcctgacctggctcggcccgttcggcgcgatttttgcgttgctggcagccggcaccacgacactgctgcgtccgtacgtcagcccggtcggggaatgacgggtggcgtgacgcgcgggaacgaagggtttttcccgcgtgtccccgcggcatgccttatccgccgattgccgtccattgataacctgctatccaaataaccgataaggccacagcatgtcatcctgctgcgaaaccttaatgttaggacaccggctgcagggggacccggctcacgggcgcccacctgcgcggattgatgattatcggcatgttcagcgtgaaaatggggatgacaatatgacggatgcgactgcgaaagccgcgccgaaggcggaaagacggcggcgcgttctccgttccggcgctcgctcatcgatagtggtcggcggcgccatcgtgctgttcttcgtgctgctggcgccgctggccgggccgttgtcggccatcaccggcaacgacccgtacgccgagcatcccgaggccttgggtgccgggtcggtgccggccggattcggcggcggcatcagtgcccggcactggttcggcgtcaccccgctgcgcggcgtcgacctgttctccatcgtggcgtacggctcacggatctcgctgggcatcggcgtcgtctcgtcggtcatctcgctggtcatcggcgtggcgctcgggctgctggccggctatttccccgggttggtcgatgcgctgatctcgcgcacgatggacgtcttcttcggcttcccgttcctgatcttcgcgatcgcgctgtcggcggtggtgccgcagggcttcccgaggccggtgctgctgacgctagtgctcggattcttcggatggcccggcatcgcgcgtcttgtccggggcagacgctgacgctgagcaagcgcaatttcgccgtcgcgtccaaggtgatgggcgcctcgcctgcccatgtgctgtggcatcagatcctgccgaacctcatgccgctgctcatcgtcaacatcacgctgtcgattcccgggcgcatcggcgccgaggcgggcctgtcgttcctcggcgtcggcatgaacccgccgacgccctcatggggccggtccatctccgacgccgtgcagtgggccctggtcgacccgatgtatctgatcttcccgggcgccgccctgttcctgctgaccttcggcttcaacctgcttggcgatggcctgagcgacgccatcgacccgcgcaagggggtgcgtgcatgagaatcctgcaatacatcggcaagcgcgtggcgagctcgatcgtcgtcatcctgctcatcacgctggcgctgttcctgatcttcttcctgctgccgaccaatccggcgcagctgtcgtgcggcaagccgtgcacgcccgagcagctgcagcgggtctccgccttcatgggcaccgataagccgtggtacgagcagatgggcaattacgtggcgggcatcttcgtcgggcgcaccttcggcagcggcggcggcgccgtggtctgctcggcaccatgcctcgggtattcgttccgtctcaacgaatcggtgagccagctgatcctcgaccgcttcccgatcaccgcgtcgatcgcggtcggcgcggccgtgctgtggctggtcatcggcgtggcgaccggcgtgtgggcggccctcaagcgcgatacgctgatcgaccgcacgctgctcgggctgtcgatcgtgggcgtttcggcaccgtcatacctgatcggcctgctgacggtgatcgccttttcgctggtgctgcagatattccccagcggcgggtacgtgaacttccacgacgaccctgtcggctggttcacgcatctgctgctgccgtggctggtgctggccgtgctcagcgccgccggctacaccagggtcacccgcacgcagatgattggcgagctgagccaggactacatccgcaccgcccgctccaagggcgtgcccgaatcggtgatcatcttcaagcacgcgctgcgcaacgcgctgctgcccgtgatgaccatgttcggcctcgatctgggcgggctgctcggcggcgcggtgctcaccgagaaggtgttctcgatgcaggggctcggctcgctgctgctcgattccgtgtcgaacctcgacctgcaggtgctggtcggcgcgacgatgttcgccgccgtgctggtcatcgtcgccaacctgatcgtggacatctgctacagcctgctcgaccccagggtcgcgctcggcacgaagtagtgcggctgcggccgcaacacgcgatacttgccggtctgctccacggaccggcaccgatagagaggaaaaccatcatgaagaacaacgcatggcgcgtattcgcggcgggggcttgtgccgcggtactggcgctgtccggctgcggcacgtccaacgacaacgccgccaccggctcggcgagcggcaccaccgtcaagggcggcacgctgaacgtgctgctgtccagcacggagatggatctggacccggccaagagccagggtctgccgaccaccacgaacggcaacatcttccgccgcctgaccgcgtggaagatcaccgacaagggcgagacgaaggtcgtgcccgatctggccaccgacaccggcaagtcgagcgacgacggcaagacgtggacgtacacgctcaagaacgggctcaagttctccgacggcacgcccatcacctccaaggacgtcaagtacgggctggagcgttccttcgccgactcgctgaccggcggcctgagctaccacaagacgctgctcgagggcgcgcaggactaccacggcccgttcgacggccaggagctcagctccatcgagacgccgaacgacaagaccatcatcttccacctcaacgcgccgttcggcgactggccgtgggtcgtctcgctcgccgcgttcacccccgtgcccgacggcaagggcccggcgtccggctacggcaagctgccggtggcctccggcccgtacaaggtcgagtcgaacgaggccggcaagcaggccgtcttcgtgcgcaacacctactgggacaagaagaccgatccggtgcgcaccgcgggccccgacaagatcgtgttcaagatgggacaggacacctcggtggccgcccagtcgatcatgcagggcaccggtgaaggcaagaactcgttcctgtccggattcgtgccggccgcgcagctcgcgcaggcgcaggccaacccgaactacaagaagctgctgaccaccagcggcgacggcgcgctggaatacctcgccatcaacacccaacacgtgaagaacgcgaagattcgccaagcgctgcagtacgcggtcgacaagaaggcctaccagacggcttccggcggcgagatcgccggcaacttcgccaccacgctcattacgcccggcatcgagggccgcgaggactacgacctgtacaaggccgatccgaccggcgacgtggacaaggccaagcagctgatcaaggagtcgggcgagcaggccccgaccctcaagctcatcgccacctccgctcaggccgaaaccgcctcctcgatccagacgagcctcaagcggaccggcgtcaaggtggacatccagacactcaacgacgatgtgtattccgatacgttgaccaacgacaagggcgactacgatctggccatcagctcgtggcagcccgacttcccgtcgccctacgccaacatctccccgctgttcgactcctcgcagatcggccacggcaactacaacctggcccgttacgcgaacccgaaggtcgacgagctgatcaagaaggccaccgagaccatcgatcagaccgaggccggcaagatctgggccgaggccgacaagacgatcatggccgacgcgccggtcgtgccgctgatctattcgaagaacacgttcatccacggatcgaacgtgaccaacttcgtcatcggcaacttcccggcgtacccggactacacgcaggtctcgctcgccagcgcgaactgagccggcatccgcatccggcgcgcgccggcggcatggtccgctggcgcgcgcgccggacgcattccaacgcttgtgcatccaaggagcttccaatgagtgaaccacgcgcgatcgtgaccgtggacggtctggccgtcagcttcgacgagcgggaggtgacccacggcgtcagcctcaggctgttcccggggcgcatcaccgctctggtcggcgaatccggctccggcaagtcggtgacggcgatggcgctgccccgtctcgatccgtcggtggccagcgtgaagggccacgcgtacctcgacgacgcccttgtggatgacgggccggactccggtccgggcggcgacggcaaggacgccgccggccgcggcatcgatctgctggccgccgacgcgccgctgcaacgcatccgcggcgaatacatcggcacggtgttccaggaaccgtccaccgcgttcaatccggtgttcacgctcggcgtacaggtcgcggaatcgctcaaataccaccagaagcagctcagcgccgccgagcgcaaggccaaggtgctcgaacagctgcgcgaggtcgggctcgacgacgccgaacgcgtgtggtcgtcgtacccgcatgagctgtcgggcggccagctgcagcgcgtgatgatcgccatggcgatcatcaaccgacccaaggtactcatcgccgacgagccgaccaccgcgctcgacgtgaccacgcagaaggcgattctcgccctgatctcctcgctggcggtcgacctcgatctggccgtgctgctcatcacccacgacatgggcgtggtgtggcaggccgcgcaggacgtgtacgtgatgcacaacggcgtgatcgtcgagcaggggagcgtcgcgcaggtcttccgccacccgtccgacgactacacgcggatgctgctcgacgccgtgccgcgcctgcgcatcgacgagcatgcggcagacggcgaacatgcggccggcggcgaacgcatcacggaaagtgacgcgctcggcggcggcaggcgcatcacgcaggtgaacgacgtggccgtgtcgtacaaggccggcagcttcgccgtcaaggacatctcgttcgatctggtggccggcaggacccgcgcgctggtgggcgaatcgggagccggcaagaccacgatcgccaaggtgatctccggccagctcgcgccaacctcgggcacggtgctcatcgagggggaggatctcgccaaggcgcatggcaggcgcaagcgcgagattctgaagcatatgggctatgtgttccaggacagcggatcggcgctcaacccgcgcaagtccgtggcatggagcatcggcgagccgatgctcgtgcagggcgggctcagcgagacggaccggcgcaagcgcgtccttgaattgcttgatcaggtggagctgcccgccgatgtggccggccggttcccgcaccagctgtcgggcggccaacgccagcgcgtcggcatcgcgcgcgccttggcgctcaacccgtcgctgctcatcgccgacgagccgacgtcgtcgctggacgtgaccgtgcagcgcaaggtgctcgacctgctgcgccggctgcagcgcgagcacggtttcgcatgcctgttcatcacccatgacctgggcatcgtgcaggagatgtccgacgtgatcacggtgctgcgccacgggcgcgtcgtggagagcggggagaccggccgcgtgctcaaccatcccaaggccgagtacacgcgtaccctgctcgacgcctccccgaagatcgacctgtgagccgtgccgctcgtcatccggccggttctccggccgtgcggcggggcggcgacggcgcggatgacacctagccttaccgtggtttcggttttttgccgttcccgcccctatcggcgcgcggcaccgaaccagttggtgtatatgagggcgaagttgcggttgccgtagctggagcatgagtcgccctcgccgaacccggccgccagcgaggcgtcgttcggctggtagggcgtgtagatgtagagcagcgcggtcgccttgttctcgatgtacacgttggtgccgccgcacccggcatccgggtggtactggatgtagttcagcgcgttggcgtgatagccgtaggcgctttcatgcgccacgtagtattggtagcggtgcgccgccccgtacacctgtctgaagaagccggcataggccggatcgcagttcgcgttgtccgggcagctcagccccatggcggccttgtactggaagtccgtcggatcgacggccgtgaccaggtgctgctccttctgcatcacggtgagcagcaccttctggctgatgccgcacgcgcgcgccgacttgtcgatgatcgcggccgcggtctcctttctcgcgccctcgtacgccgcgcaatactcgttcgccgcctggtcttcggtgtcgaaggtcatggttttcaggcaccgggaaccgctgcacgccgcgccctgcttgtcgaggaacgactggacctcggcctcgctcatcgcattggcgttgaagaactggccgtccgagatgatgtcgccgggattgaagtcgtattgctgcgtcagctgcagctggcgggcctcggcctcctgcacgtcgcgacgccactggacgacccgcacagtgcccacgaccagcgcgaccacgcatgcggccgccaccacggtgaccagcacagccgcgacgcgctgcgccaacccggcccgcttccaccagcgcgccgggctgagcggatacctgcgattgcgcgggcgtttgcccgggcgacgtttgcgattgccgcctgacacgccccgccccgcgacaatcacgttcgccctgccgcgcggattggccggcttgcgccgttgcgtcgtcgccatcgctacgccagtgccttcttgatgcgctgcaggctcaccggcttggcggtgccaagctcctgcgcccatagggacacgtagaactcttcaagcatccaacgggcctgttcggcctgcttcatcaatgcctcatgcttcgggccggccggctccgccttggcacgggccaacgccttatcgaccacctgacgggcttcgtcggcctgccaggcccacttgacgtcacggttcttatcggtttttgccttattgagtcggctcagatcggctctcaaatatcggctcaacgacttcagcgcatccgggggagtacgcccgatgaatccggggtagacgagcgtggcgatatggtcgcgaatcgactgcaacaccgaaagcatcggcagatcagccttgccgccagtggccttgtcgacttcggcataagccttgagcacggcgatcacgtcatgcgccacctgatagacggtgtcctcgtacacttcgcgcacatcgagcaccgcattggccaacgcctcatcgtccgagagcctgtcgacattcggcatcagccgtttgaccgtggccagctgcaggtcttcgaccagatccttggtgaacttgtacggagcagaagccagcatcaacgcctcggtacccagccagcgcgacgaaatgcgttcggccggcaaccgcagcgcatccaatgcgccacgccagagcatcgtggcccgggactcggtggtggcacccgccttatgcaacaggttcgcctgactgaccagcttgccctgttctccagcctgatcggcctgcttcttgaccatttgacgggccgacgcctccgcctgcgcggcgaacttgcgttgcagcgccttcagatccttggacacacccagcaccttgacggggccgcgcgcatgccggcgtccacgagggtgcttgccggccggcagttgctgctccaccgagaacgtgaccctgagatacggggaaagacgctcgaccagttccggccccaacacttcgggatgaatctgcgcacccttggtggcgatggccgccttggtgaacacatgtgccaaatcaggccagccaacggtcgtgccatcctcatccaccggcggcagattcggcttctgctgcgagcccgagcccggcagatccgggtaatgctcgtcgatccagtcacgaatcgcacgcgcggcatccggggccggcacgaactggacgcgcagctgcttgggcagcgccttgatcatcgacagaatcagctcatccaacaggcccggcacattccatgtgaactggtcgggcgtgatacgcgagagcgccttcaacggcacatgcacggtgacgccgtcggccgggtcggccggatcgtatacgtagctcaaacgcaggtcgatgggttggccgtccgatccggtcgtatgccaatggtcggggtaatcgtccagactcaccgaatcgctggatgccagacgctccaccttggccgggtcgaaatcaagcagattcggctgacggtcatgctcggacttccaccatttcgccagatcggccacgctggtcacatcgttgggaatgaccgcgttgtagaagtcgaacagatcctcgtcggacacggtgtccgccagctggcgggtgcggctcgcgtcatcggcggcatcctcgagaatgtcacggtttttgcccacaaagtcgtcgtaactgaagcgctgctgaatatcgccctcgaccagaccctggcgaatcaggaagtcgcgcgcctcaagcggattgatgcgtccccactgcacggcacggtcctgtacgatcggcagaccatacagcagcacgcgcgcggtggccacagccgagccacgcgaacccgaccagtgcggctccgcatacgtggtgcgggtcaattggccggccaacggttcggcccacgccgggtcgatggccgccgaatagcgggcccacaggcgagaggtctccaccagttcggtgctcatcacccatgacggggtcttcttggccacggcggaggcggggaacagggcgaaacgggtgccgcgcgcgccctgataatcgttcttcgactgcttctgggcgcgtttcatcgcacgggcgcgcgccgcaccggtcagccccgcgaaatcggaggccttgggctcacgcaccacctgcatgcccatcatcgacagcaatccggcgagcatcgacttgtggatgccatccgcatcccacgagcagcacagcgaatgcgcggcctgctgattcaacggcagctggcgaatctccaagcctgggcgggaggcgggcaacgggtcgccgaccttgaacttcagctccttgcacatctggcgtagctgggagacgagatctttccactggcgtatcctcagccagctgagatactcggttttgcagatacggcgcagcgcgttgttgctcgggtcgccgtccgcttggaacacgcgatcccagatgttcagggccgtcaggaaatcggaagtctcatccgcatatcggttgtggatacggtcggcatcctcacgcttgtcgtccgggcgttcacgtgggtcctgcaagctcaggaacgccacgaccacgagcacctgggccagaagattcggcgaaccggttttcgcggcctcgataaccatacgtcccagacgcacgtcgatggggatgcgcgccagctgacggccggtatgggtgagcgtcacctcgccgcgctttcggccgatggccttgagctcggtgagctcattgaaaccgtccgacacggccttcatatccggcggatcgatgaacccgaagttcgtgacgtcctcggccgtgcgggccacgcccaccgacagcatgtgaagcaccacggcacccagcgaggtacgcaggatttccggctcggtgaagcgcggtcgggtctcgtaatcctcacgcgaatacaggcggatcgcgatgccgtcggccacgcggccgcatcggccggacctctggtcggcactggcctggctgatcggctcgatcggcagacgctggacctttgcggtcttcgaataccgggagatacgggcggaaccggggtccaccacgtagcggataccgggcacggtcagcgaggtctcagccacattggtggcgatgacgatgcgctgatgcaaatgcgattcgaacaccttgtgctggtcggcggcggacaatcgcgcgaacagcggcatgatctcgatggcgtccggtcggcgcatgtcgtcggcgcgcggaccgtaatgatgccgcagtgcggcctcgaactcgtggatgtcgcgctcgccggaagcgaagaccagaatatcgcggggaccgcgctcatgggaggagtggatcaccagttcggcgcaggctcgagccacggccgtgggcatatcggtgatgccgtcatcggcataggagtcgccggaccggccgcggggccggtcggaatcggattccgcgatggcgctggccagctcgtcgtaatcggcgtcgccggggcgggcgcccaccgcgaatcccggcacttcgcgcatcaacgcgggcgcggtgccaagcggctcatagaccacctgcacggggaaggtgcggccggaaacctcgattaccggcaccttctcatgcaaggcgtgctcgaaatgctcctggaacttgaccgaatcgatggtcgcggaggtgatgatgagcttcagatcgcggcgctgaggcagcagtgccgtcagatagccgagcagaaagtcgatgttaagactgcgctcatgcgcctcgtcgatgatgatcgtatcgtattgggtgagtttcggatcgcgctggatctgggcgagcagaataccgtcggtcacgactctcaatcgcgtgctgggcgagctttcgtcggtgaaacgcacctgatagccgacctcgtcaccgagcttcacgcccatctccgaggcgatacgttcggccaccgtgcgcgcggcgatacggcgaggctgggtgtgcacgatctgcttgccgtgcgcgccacggccaagctcaagcaggatcttcggcagctgtgtggttttgcccgaaccggtctggccggacacaataacgacttgggaacgtttgaccgcgctggctatctcatcacgcgcggcagatacgggaagttctgcaggatactcatatttcatgacggacttcaatgatacggaagcccttggagctcgcgtatttgctcgcagtgaacccctcgccgagcgcatcgtccagccaggggatcagcgaatcggagccgagattcttctgcactacgagataggcggcgccgcccaccttgagcttcggcagccaagccataagcaatgtatgcagcgcttccttgccgacacggatcggtggattcgaccaaatcgcatcaaacgtgaggtcgcccggcaccgtctcgcagaacgccggctggttctcggcgggcaggggagtgctggactcgtccacctgagccgcatgaatgttcgtgcggccgttcgcctgtgcgttggcatgggtcaggtccagcgcgcgctcgttgacatccaccgcccacacgttcgcttcgggcgactcaaacgccaatgtcagggcgatagggccccagccgcagcccaaatccaggaaatcgccggtaagcggcggctcgggcgcatgcttcagcaataccgatgtaccgaggtccacgcgcgagccggagaacacgccgttcgacacctgagcggtcgcctcatggccgcgcaacgttacgttcaatgtgcggcgcacgtccttcgacgcgggttccgcagagaaatactgttctgccatggtcgctccatttctgcgggattcgccgctctcgtatgccgacctgtatcagccggcctatgccggtacgtgccgatctatgccagcatgtcacctcatgtgatgataataaaggaccatagaagaatcgtgaaccattccaaccaaacgaggcgcacttgaccgacaacacccagtacaccgacatcgaccgcggcaacaacgacgttacccctgaaggtgtgctggccgggcagtccgaagtgctgctcgacgacagccagcgcgcgaccggctggcacgaggacgccaaccaggaatgggaggagcgcgaggcccgcaacgagctcaagcatgtcgctggtctcggcgagctgcaggacgtcaccgaagtcgaataccgcaaggtgcgtctggaacgtgtggtgctcgtcggcgtctggtcgtccgccgtcaccacgcaagccaaggccgaggaatcgttgagggagttggcggcgctcgccgaaaccgccggtgcggtggtatgcgatggtttgctgcagcatcgctccaagccggatgcagccacgtacgttggttccggcaaagccaaggagattgccgacatcgtggcgcgtgaggaagccgatacgattatcgtggacgacgacctgccgccgtcacagcgccgtgcattggaggacgcagccaaagtcaaggtggtggatcgcaccgcggtgattctggacatcttcgcccagcacgccacctcgcgtgaaggtaaggcgcaggtggagttggcgcagctcgaatacatgctgccccgactgcgtggttggggtggttcgctgtcccgtcaggccggcggtcgcgcggcaggcgcggatgcgggcatcggatcgcgaggcccgggcgagaccaaaatcgaaatggaccgtcgtgtaattcgcacgcgtatcgccagactgcgccgtcagattcgtgagatggctccggcacgtgaggtcaagcgcggttcacgccgtcgcttcggcctgcccacagtggccgtggtcggctacacgaacgccggcaaatcctcgttgaccaaccgtctgaccggttcggccgaactggtggaaaacgcgctgttcgccacattggacacggccgtgcgccgcgccaaaacccgcgacggacgcgcttacgcctacgtggacacggtcggcttcgtgcgccgcctgcccacccagctgatcgaggcgttcaaatccaccctggaagaggtggccgaggccgacgtgatcctgcacgtggtcgatggctcccaccctgacccgttctctcaggtcgacgcggtcaatgacgtgttggcggacatcgaaggcacggcctcgattccgcgtattctcgtattcaacaaggccgatcaggcggacgaggcgacacgtgaacgactcgccgcactgcagccggatgcgttcatcgtctccgcctataccggtgagggattggacgagctgcgtaccgcggtcgaaagtctgctgccggtcccgcatgtgcatgtcaacgctctgctgccgtataccgctggctccctgatctctcgtgtacgcgaatacggcaaggtggacaaggtggagtaccgcgatgatggcatacagcttgaagcggacgttgacgcccatcttgccgctcaggtggtcgaacagtccattgactaacgtgataaacatcacagtttgtttgtgagcgctaacaaccgttggaaacattaccataccgttatcagacagggtggtgtgctggtagcaaaacgtcttagcgggtttatagagtgaaaaccgttagttacaaggcctgccattcatcagcagaccgcctttgaagagaggttcatccatcatggcggaaactaccgttaagcccacgaagcttgctgttattggtgccggtgccgttggctccaccctcgccttcgccgctgcccagcgtggcgtcgctcgcgagatcgtgcttgaagacatcgccaaggagcgcgtggaagccgaagtgctcgacatgcagcacggctccagcttctacccgaccgtgtccatcgacggttccgacgatcctgagatctgccgcgacgccgacatggtcgtcatcaccgctggtccgcgtcagaagccgggtcagtctcgtcttgagctcgttggcgctaccgtcaacatcctcaaggccatcatgccgaacttggtcaaggtggctccgaacgccatctacatgctcatcaccaacccggtcgacatcgctacccacgtggctcagaagctcaccggtctgcccgagaaccaggtcttcggttccggcaccaacctggactccgctcgtctgcgcttcctgattgcccagcagaccggcgtcaacgtcaagaacgtgcacgcctacatcgccggcgagcacggcgactccgaagtcccgctgtgggagtccgccaccatcggtggtgtccccatgtgcgactggaccccgctgcccggccacgatccgctcgacgccgccaagcgcgaggagatccaccaggaagtcaagaacgccgcttacaagatcatcaacggtaagggtgccaccaactacgccatcggcatgtccggcgtcgacatcatcgaagccgtcctgcacgacaccaaccgcatcctgcccgtgagctccatgctcaaggacttccacggcatctccgacatctgcatgtccgtgccgaccctcctcaaccgtcagggcgtcaacaacaccatcaacaccccggtctccgacaaggagctcgccgctctgaagcgctccgccgagacgctgaaggaaaccgccgcccagttcggcttctgataaaaaatcgctgtacggagcgcctttcacaccgcacaaggttcgaactacctttgtaggccttcaccttgtgcggcacgaaaaatcgcacacgtacagcgattttttataccctgctgaatgcttccagagggagcattttttattcgtggaattcgttggaggagggggagctatagccctcgggctcaagctggaaggtggtgtgggggaccgagaccgggaagtgctcgcgcaggcaatcctgcagttgggtgaggattgtggcggcatcttccatggtgaggtctttgtcgactaccacgtgggccataagaatcggcatgtcggtggacaccgtgctggcatggaggtcatgcacggcaagcacatgcggcacgtcttccagatgctcgcgtaccttatcgagatcaagaccatccggtgtttcctccagcagcaccttgaccgcgttgtgcagcagcttgatggcgcgcggaatcatcatcagtgcgatgacggcaccggccacggcgtcgaagccattccatccggtggagatcattaccagggcagaggccaccacagacaccgagccaagtgcgtcgttcattacctcgaggaacgcggccttcatgttcatgttgtcttcgcgctgcgaggcaaggatgaagatcgagatgatatttgcgacaagacccagaatgcctacgaacagcagcaagccgatatcgtcgatttccgctttggagccgccgaacagacgcatgccggcctctaccaacgcatagatgccgacgataagcaatactacggcgcccgcggcagcggtgagcacctcaagcctggcccagccccaagtacgagtgttgttgggcttgcggcgcatcagtatggcggtgattgtggatgccaccagcacggacatatcggtgagcatatgaccggcatccaccagcagggccagtgagccggttaagacggccgacaccacttcgatgaggaagaccgaaccagtgacggtcaacgtggcaatcagcctgcgctggtgcgcggcagggtttacggatgtggatggtgcgggtgtatgggtatgggccatatgtactccttcgctctatcgagttgaaaccgcttctcaataccatttgcgatatggtctgaatacgacgaaaccccggcgcgaggccggggtttcgtaagcagtgtgcgactatagcacgaccagcgcgattcagcgcacgctgatcagctggtggcgaacaggctataatttgcgcagtacggtgaccaccttgcccataatcgtggcatgtgtgccgtcgatgggcgagtatgcggggttgtgcggcatcagccagacatggccgttttccttgcggaaggtcttcaccgtggcctcgtcatccaacagagcggcgacgatatctccgttgacggcggaattctgttcgcgcaccaccacatagtcgccatcgcagatagcggcatccaccatggaatcaccgtggacttccagcatgaacagggtgccggagccggtcagccgttcaggcagacgcatgacgtcgtccacatgctgttcggcggtaatcggcacgccggcggcaatacggccaacgagcggtacgtcatgtgattcggcaatggcttcggcggggaattggtatatctccgccacattgctggcgctggttgcctcttcgctggcttgtgatggcttttcggcattcgggacggatcctgccatcacctcgatggcgcgacccttgttcgcgttcatgcgaatgaagcccttgtcttccaaaacttgtagctgatgcttgaccgaagacggacttttgagcccggcggcatttccgatctcccggaaagagggagcaaagccttgttcgtcgatatgcgtgcgaatggcgtccaacactttgcgctggcggtcggtcagggtggactcgtccggcttctgcttgggggagaggggaatggtgctcacgtcagggctcctttcgttatgtcaccagcataacgtgttgttcgtgtgaaatcaaacatctgttcgagtttcgacttgaccgtgtcgaacatttgtgccattataagaacagttgttcgatagaacatctgttcgagagaggtggtcgtgatgactggttcaatggtgatggccccggcccgtagcgcacgtgtagctatgcagcatgctggaacgtcccgccggaatgtgcgtgggcggattatcgcagtgatgatcgccttggcgctggcctggtgtggtttcggcgcgcttaccgctcagcgggcccaatcagatacgggtgccacgcaggtgaccagctatatcgtgcggccgggggatacgctctggtcatatgcttcggctattacacctgctggccatgatgtatcggaaacagtggatgagctgattacgctgaacaatctcgagtccggaacattgcaggccgggcagcgcattattgttccggttgagtaaatgaaacccgagcggcatggtttttccgcccgtacacgttattctggagagcatgcattgccctttttgccagaaccccgacaccaaagttattgatacgcgcattagcgatgacggtcattccatccgtcggcgtcgcgtatgcccgaaatgcaacaagcgttttaccacggtggaaaccagtatgctgctggtcactaaacgttcgggtggcgtggagccattcagcagagacaaagtgatttccggcgtacgtaaagcctgccaggggcggccggtcagagaagaggatctgaagctgctgggacagaaagtcgaagaggatcttcgctcccgaggccttgccgaagtcacctcagatgaagtgggcaaagccatcctgaaaccgttgcgtgacttggatgtggtggcgtaccttcgattcgcgagtgtgtaccagaactttgcaggtctggaggatttccaaagcgccattgatggtttgcgtgaataatatgcgaatgccatgcaccgtgatatgcgagtgattcgcaaaccatggtgcgaaccaatcatgaagccctgcacttatgaaagagacccgtcagcgacgggtctctttcatatcaatcgaggatgagtcgtcagctgatgacacgcatgcgaacggtgccctcgatgttgcgtagtgcttcaagcgtggcggcgctgggcttctgagccacgtcggtgaccacatagccaagttcgccttcggtggccaacgactggaaggaaacgttgatgttctcttcgccgagcacgcgattgacatgagccagcacaccaggaagattgtcgtgcagatgggcgatacggcacacgcccttgcgttcacctaggttgatctgcggtaggttcacggacaatgaggtagaacccttgaaccagtaatcctcaagacgctgagagacgaaatggccgatggattcctgagcctccaaggtggagccgccaatatgaggagtcagaatcatattgtcttcgttggccagtgaggtctcgaacggatctccgctcttcttcggctcaacggggaacacgtcgaccgccgcgccagacagatggccggaatcgaggtgctgcttcagagctcccagatcggcgacgaaaccgcgcgaaaggttaatgaaaatcgcgtcctgcttcatgtgggcgaattggtcttcgccgaagaagccggtgttcgacttgcggccatccacgtgcagggtcacggcatcggactgttccagcagttcgttgagggtatcgcaacggtgggcgttgcccagtgccagtttctcctcaatgtcgtagaacaccacgcgcatgccgagggcctcggccagtaccgacagctgggagccgatgttgccgtagccgatgatgccaagggtcttgccgcgcacttcatgcgagccggaagcggacttgtcccacaggccatgcttgatgtgatgcgtgtgtgcgggaatgcggcgcatcaagcagatgatgtcgcaaatcaccaattccaccacggaacgggtgttggagtagggggcgttgaacacggcgatgccacgcttgccggcatgtgccagatcgacctgattggtgccgatgcagaagcagccgatggcgcttagcgtaggacgcgcatccagcacgcgggctgtgacgttggtcttggagcgtacgcccaccaagtccacgccatccagcgcgtcgatgagttcgtcctcgctcagggctcccttcatggtctcgacttcgaaaccgtgatcacgcagcgatttggccgcgtcggggtgaatgttttccaataacagtgctttgggcatgcttcataccttagatgttcagggacttttcgtccgttcttgtccgaactataaccagtttctgggtcggcctggtcattgccacgtacaggtccgaggcggcgaccaggcggctcggcgcgtcatcctcgatgagaccgggctcgaccaccacgacggcatcgaactccagacccttgaccgtttcggtgccgcagacgctgatttgctcatcccattcgggctgctcgatgagccttgcgtattcggccgggtcaagaacggcggccagtttgcggcgcacggcgtcgcgcaccggggcgatgagatcatccggacagatgacggcgatgcggccggtgccgtctgccgaaacgaattgttcggcaagctgcgccgcctgctcggccgtcgtttccagcaaggacgacatgtcgggcaccacattgcgggacaccgaatcggggatggtgcgcaccgcattgaccgtggagatgtagaggccttccttctcggcaaatcgtgaggcgagttcggaaacttcctgcggattacggtagttgatggtcaactcgttcagatcccagtggctttcgccgaacaggcggttcatcgatttgctccagcgtcgggtgccacccagcgccgaggtctgcgccacatcgcccacgatggtgaacgagcgggaggggcaacggcggatcaacatacgccagtccatggcggtcagttcctgcgcttcgtcgaccacgatgtgcccgtaggtccattcacggtcggccgcggcccgctgcgcggtcagctcggcgtcgtccccgttcatctggtcgagcagcatctgactggagacgatgcctccacccagaccggtcgcggccagcgtgtctttggcatactgctcttcggcggcacgacgtgcgtcggcggcggactggcgggccaccgtcttgggatcggggcccagcatatccatcgcttcgtcgagcagcggaatatcggagcgggtcagcggggagcccttggggcgggcaagtgccgcgatgtcgttgtcggtcagccaaccagccagagacttcagacgttcgggatgggcgaacagctgatcgatgagccatggggcggtcatcggcagccagcacaggttcagggtcttgcgcacctgctcgttcatacgcagcaacgacatcgcgcggttcagctccgcctgatccggcgtgtaatcaagctgttcggcataacggttctgcatgctggtcagcatcgaacggataaaggtctcgcgggccttgttatgaggttgccgggtgcgcttcgcgtccgcctgcgcctgctcgatatcagtggccagcattggtacctgaatgccgctaatggttactgtcggcagaacagcgggaacacgcacgcgcgcggcgatggcattggccactacggaggtcatgcgtcgatcgcccttgagcttggctgcataaggggagtcgaccgccgtggcggtgatgccgggaatcagatcgctgatggtgcgtgagaccacgccggtctcgcccaaggagggcagcacctgatcgatgtagtgcaggaacgccgagctggggccaacaaccagcacgccggaacgttccagcgtgcgccggtgcgtgtacagcaggtaggcggcgcgatggagcgccacggccgtcttgccggtgccgggaccgccctgcaccaccacggcacgattcatgtcggagcggatgatgcggtcctgctcggcctgaatggtggccacgatatcggtcatcttgccggtgcggcgtgagctcagcgaagccagcagcgcaccctcgccggtcaacgtgccggcggaagacgcctggccgacttggtcggaatgcacgtcgagcacctcatcctcaacgcccacgacttcgcggaaactcaaggtgatatgcctgcgcatcacgatgtcgccgtgattggagggggtcgcctcatagaaaggacgtgcggcttcggcacgccagtcggtcagaatcggctcatggtccgggctcgacaggccgatgcggccgatgtaatgacggtcgccgttcttggcgtcgagacgaccaaacaccagccgatcctcaacgctgcgcaattgcgtgaggcggttttcgtacattgtggcaaaggagtctcgttcgctgcgttgcgtgggggatccgtgggagccggcggcgcgtacggtgtccaggcgttgccacatttcggctcgcagatcatccaatcgtccataggcgcgatcgacggcctgctgctcctcatgcagctgggaggcgtaactcgacatgctgttctcttcgttccatttccgtggggcagaaaaaacttaaggcattcaaatttaccgcacaccccctacgtcagtgatgcggacaacccggaataggtgaattcagcgtgaattcgccatgctgctcggtcggtggagtgcgcaacgtggattggatgtgcggagcgcccattcgtgcgacagtcgtggccgacacgcgcaatccatcggtaattgccctaaaagggtgagcaaatcgtgcatgagtggggagaaatggggaatcgtggggtagagtggtgaaccagttggccgaagtgtatcccacgtaacgatgaaggaggtggagccatggttgccgatcagacgattcgcgacgctgatgccaacgcacaaggctccaccactatggctgatctcatggctggtctgccgccgctgcttctcggcacatatacgccgaagatcgacgccaaaggccgtatggcgctcccggccaaattccgctcccagctggggcagggcctggtcatggcccgaggccaggaacggtgcgtgtacctgctgccgttcgatgaatttcgccgtatcgcctcgcagattcagcgtgtgtcggtgggaaacaaagccgcccgcgaatacctgcgtgtgttcctttccggtgccgtcgatcagcagccggacaagcagggccgcgtgctggtgccgcagatgctgcgcgattacgccaatctgggttccgacgtcgtggtgatcggcgttggcacccgtgccgaactgtggaataaggacacgtgggagtcctacctcgccgagaaggaagagggatattccgatattgctgacgatgtgttgccggaggtggaattctgatggttgatgtggcgaatattcatctgccggtattgctggacgattgcgtgaacctgatggcgcctgccctggaacatgagaacgccatcgcagcggattgcaccctgggccttgccggccattccatcgccttcctcaaagccgcgccgcaggctcggctcatcggcattgaccgtgacagtgaagcgctggggctggccaccgaacgcatggaacgggaggggctcgccgatcgattcatcccggtgcatgccgccttcgatcagctcgatcaggtgttgacggaccgaggcatagaacgtgtggacgccgtattcatggatctgggattatccagcctgcagatcgacgaaaccgatcgtggcttctcctattcgcatgatgcgccgctggatatgcgcatggacgtcagccagccgttgacggccgaacggattcttgccacctatgatgcggcggaactggtccgtatattcaaggaatacggtgaagagcgtttctcgcgtcagatcgcccgcgccatcgtggcacgtcgagacaaggagccgtttaccaccaccgcacagctcaaccgtctggtcgatgaagtggtgccgcaagcccaccgcccggcgggcaatcccgccaaacgcgtcttccaggcgttgcgcattgaagtcaacggcgaattggacaagctcgcctccacattgccgcaagccgcgaaccgactgcatgtcgggggacgactggtggtggagtcctatcattcgctcgaagacaaaaccgtcaaatcgttcatggcacaagggctgcgagtggatgttccggctggtctgcctgtcataccgccggatgcccaaccgtttttcacggatctcacgcgaggtgccatcaaggccgacgaacatgaaatcgcagccaacccgagatcggcttcggtgcggttgcgggcggtggaagtcagccgtgatattccgtcacgatggaggaaacgctttacgcaaaccgcgcagggcctgaatgacgtcaagatacaaggctccgcgtctccgggcagagccaaaaacacagcgcgaattcgtacaaggaggggataacggcatatggcaaccgcacgtaacattcggtcgaacgcggctccggcctcgaaccgaccgcacaccaagcatcagtcctcctcccgacctgagctgcgggtggtctccaacccgcgtggagacgagcggggcaatgtcgtcggacgggtcatcgaatggaccagaacaagaagcgcaccgctggtgcacgtggccatcgcagtgatcttcctcgtcggcaccttgttcggtgcgctgatgttgcgtacccagatggtgcagaactcgtttgaggcggcacagatcgaaaccaatatcaacagacttacccaagatgtcgaagacgatcaggccaaactcgatcaattagtcgcgaacctgcccgacaaggccagcgacatgggcatggtcccgcagcagggatcagtgtccatcgacttaagcggataccagtccaacaaaggcggaacccagtgaacaccattcgtcgcatcgtagagttcgccaaggtcaagaccttcgcgttcaaatgcattgccatcggcgccgcattggcgttggtggcgtcggcatgcgtgattcagctggcctccacccagctcatcggcggccgtcaaaccgcacaagcggccacggctaaccgcaccctgaccgtgacgttgagcgccaagcgtgggcgtatcctcgacgccaacggctccgtgctcgctcaaagcgtggagcgttatactatcgtcgccaatccggaggctgcacaggagttcgagccgattacttgcaatgacaacacccgtgattactgccacgaaattgacggcaaacccgtgggtgctaccggagcggcggccgtgggccgactgctggccaaagtcctggatatgaacgccatggaactgggcgctgatctgtccggtaccgggcagtatgtgattctgaagaaagacgtgaccccacaggtcaagcgcagcatcgaggcgttgcacctgggcggtattgtctggggtgagctgagcagtgaaagactgtatgcggatggcgatctcatgggcgcgctgcttggcggcgtgaacgacaacggcgatggcgtcgccggcatcgagcaggtcgagaacaagacgcttaccggaaccgatggccatgaaacctaccagcgtggtaatggcggcgaagagattcccggcaccatgaccgaatcggtggcggccaaaaatggcgacgatgtcaccctgaccattgaccgtgatgtgcaatggtatgtcaaaaaggccttgaaggaggccgaatccaagtatggtgcagcgtgggcgatcgccgtggtgcaggatgtccagagcggggagattctcgcactggccgatagcgatgaagtacaggctggtaccgatgcggcgaagatgagcccgtctcgggccgtgtccgaaaccttcgagcctggttcggtgggcaaggtcatctccatgtccggctatctgcagacgggactgcataagatgagcgatcaattgtcggtcccggaccacatcacacagaagggccagacctacaaggactcattcgaccatggcactgagcgctggacgctcgccggcattctgcagaactcatcgaacgtcggcatgattatggccggggagaactatccggatgagcaacgctacgagtacctgaccaaattcggcatcggacaaccgaccggactgaacctgcccggtgaatcgagcggtctgctcaccagcccttcggcatgggatctgcgtacgcgcaacaccatcctgtttggtcagggctacaccgtcaacgccctgcagctcaacaacgtggtggccaccatcgcgaacaagggcgtcaagcagcagcagtcgatcatcagatcaaccaccgatgccaatggcaagaccactgagaccaagaagggcgaagccacccgcgtggtggatgaaaaggtcgcatcggacatgatgaatgcgatggaatcagtggcggagagctacaacaagttcgtcaaggtcgatggttaccgcatggccgccaagtccggtaccgcagaggtgcagggttcggatggcgcgctctcgtccattatctccgattattccgtggtgattcccgcggacaacccgcgctatgcggtcaccgtggtgctgaaggatccgaatggtgtgttcggcggtctgacggccggccctgtttccgcacagatttgtgagttccttatgcagaaatacgaggtgcctgtctccagtccacgcaaaaatgctattccagtcacgtggtaaggatcaggggagaaaggcgatagcccatgagtgcagtgagcgaatccatcgcccagcgggtgaccttgggaatgctggtcgaacggtacggttttgaagtcgatccacccttcgccaccaatgtcaccattacctcactcagcgatgccgtggataccgttattcccggctcgctgttcatctgcacgcatgagcaggaacccgatgtgctgcatgccgcacaggcaggtgcctatgcggcgttgctgccacgcgcgtccaaagggcagatcgccaatgccgatataccgttgctctacggcgattgcgacgatcgcgtactcggcgatctggccagcggcctggccggcggaccatccaacgccatggcggtgttcgcggtgaccggtgcggatgagcaggccgttgacgcaggcgtgtcccagctctccgaattcctgcacatgctgggcaatccggtggcggtaatcaccgcatccgggtccacgtcgatgacacgtaccatgaacctgaactatcctctgggcatcctcgatatgcagcgcgcgctgtccgtgtgcgccgaagacggtgtggcggccgtgatcatcgccatggatgaccgcacattggccgagcatgcgttggaatcggtgaacgtggatgtgctgggcacggaagatgtcaacgcaagcgcaagcttggacgaattgaagacacgctacgcattcgttgcggaacatgacatgtccatgacctcgtcgacacccgaatcggatgaaatggctgcggattcaccggcaatgtacgaccgcgtccgactcgggcacatgtccttggccatcgccatggtactggccgccggcgtgaggaaaaacaacatacgcagtgccctgcatgtggccaacaatctcaattaagtccgtggatgcgggacgaagcgtaatcgtaaaggagtttgaaacaccatggttccgatgagtgtggaggagatcgccaaggccgtcgatggtcgattgatcggagacgccgattccgagtctcgagccaccaatacggtcagcgactcgcggcaggccggccccggatcggtgtttgtggccatccgaggcgagcgtgtcgatgggcatgactttgtggcgaaaaccgctgaacagggagccacggtggccatcgtcgaccatgaggtggagtccgatggcctgccgcagatcgtagtgaaagacacggtcgacgcccttggcgagctcgcccgacacaacatcgttcgccgccgcgagctggacggcgacttcgacatcatcggattgaccggttctgtgggcaagaccaccaccaaggatctgctctcctccctgcttgccaccgtaggcccgaccgtggctccggtgggatcgttcaacaatgagatcggcctgccgctcactgcgttgcgggtcgatgagcacacccggttcttcgtggctgagatgggtgccagccatatcggcgaaatcgcgcgactgacccgtatcgcaccgccgaacacggcaatcgtattgaaggtcggcgtcgctcaccttggagaattcggctcccgcgaacgcatcgcacaggcgaaaagcgaaatcgtgcagggactgcttcccggaggcaccgcggtactgaacgccgatgacgaacacgtggttcccatggccggcctggccagcggcgatgtgctgtggttcggcttgggatcgtcgcaggagcccgaggtgcgggccattgatgtcactgccgaccggtccgatcatgctgaattcacgttggtcgatgcggacggcaaccatacgccggtgcatctgggcattcctggacgtcacaacgtgatgaacgcgttggccgccgcaaccgtggcgatgcgttacggtatggcacccgaaacggtggcgcggattctggcctcgcagcacaccatcagccctcatcgcatggcattgtccacggtgaatcgcgaggggacttccttcacactgatcgatgattccttcaatgccaatcccgactccatgaaagccggcctgaacgggttgaaggcttggaactcaaatgacggcaaggatccgttccgcgtggcgctgctgggtgccatgctggaactcggcgccgatgagacggcattgcacacctctatcggcacgtatgcggccgaattgggcatcgacgcgatcatcgcggtcggttccgcccaagaccaacatctcgatgcactggcacaggctctggcggacggtgcccgtcagagccaatccgcgtcggtggattgcgtacacgacatcgatgcggccgaacagctggtcatcgacttggcgcgcaaccattccgacgctgtggtactgctcaagggatcgcacgcgtcaggcctgagcgctttggctgaacgctgggcaaagaactgacccgataaccaccccaagaaaccgacaagaaagagaagctgcacgtgattgctctgatcattggaatgctggtgtcgctcatcgtcaccttagtcggcaccccgctgctgattcggctggtccacaagctgcactatggccagtacatccgccaggatgggccgcagtcgcatctggtcaagcgcggcacccccacgttgggcggcgtggtcatcaacttcgcgattctgctcggttgggcatcctccgcactgtaccgatacctgcgttcgggcgacgtgccctcctggtccgcggtgctcgtactgttcgccatgctgtcgatgggtctgctgggctttatcgacgacttcgccaaggtgcgtaagaagcagaacgaaggcctatcggtgggcggcaagttcatcggccagttcatcttcgccaccatctacgcggtacttgcgctgctgattcccaccaaatcgggattccccagtgcgcaggcgggcatcagcttcatcgaacagccgttcttcaacttcgacttcgccggccgtgccgtaaccatcatcctgttcgtcatctgggtgaacttcctgatgaccgcatggaccaacgcagtgaatctgacggatgggcttgacggtctggcggcaggttcgtcgatgatcgccttcaccggttttggcatcatcgcattctgggaaagctaccacatcaagggcggcagccatggcggctattcctatgctgtgtccgatcctctcgatctgaccgtcatcgccgtatgtgcggccgtcgcctgcttcggcttcctgtggtacaactcgaaccccgcatcgattttcatgggtgataccgggtccctggccttgggcggcctgttcgcagccctgtccatcgccacgcacaccgaattcctggcggtggttctgggtggactgtacgtcatggaagccatgagcgacgtcatccaggtcgggtacttcaagatgacccacaaacgtgtattcaagatggcaccgatccaccatcatttcgaactgaagggttggaccgaaaccaaggtggtggtgcggttctggatgatcgaactcatcttcgtgctgctcgccctgacgattttctacggcgactgggtcacccgctccggcctgctgttcagctagcggaaatctgggtgggattatgctcacccacggaattcctatatcaggaggaacaatgcaagtagcggataagacagtggtgattgctggactgggtgtgtccggcacctcgttggcggaggtattgagggaatgcggcgcccacgtgattggcgtcgacgagaggaagcccgaggccggtctccgctcctttgatgacgtggactgggaccatgtggactacgtcatgtcgtccccggtgttcaacccccgcaccccgttcgtgctggaagcccaacgccgtggcatccccgtgatgagcgaggtggaattcgcatggcagctgcgtgtgaataacgagcgcaccggtactccggctccatggatcggcatcaccggcaccaacggcaaaacctccaccaccgagatgacctcggaaatgctcaccgcctgcggactcgacgcgccgaccgccggtaatatcgcctccggagacatgagcatgagcctgtctcgttgcgccaccaatcctcagcacgacgtactgtgcgtggaactgagctccttccaattgcacttcaccgattcgctggcacttgactgcgcggcgatcaccaatatcgccgacgatcacctcgactggcatggcgggcgcgagaattacgccgccgacaaatccaaggtgttccacaacgccaaacgcgccatcgtctacaatgcgcaggacgccaaagtcagcgaactggcggccgaggcccaaaccgccgaaggatgccgcaaggtgggattcacgctcgaggccccccaggccggtcagatcggcattgaagatggctggatcgtggacaggagcggcgtggccggcggcgcagtgggggagccggtcagactggccgccatcaccgatttcacgcatctggcagagccggacggctcactgtacccgcatctggtggccgatgcattgacggcattggcgttggtgctgggacttggcgctgatcgagataccgcgttgaaggcgcttacctcgttcaagccgggcggccatcgcatcgaaaccgtggctgaggccgcagtcgagggcggctccgttcgtttcgtggacgattccaaagccaccaacggtcatgcggcacgcgcctcgctgtccagcttcccggccaagtctgtgatctggattgccggaggtctggccaagggcagtcgattcgaggacctggtcaaggaccaggcacataccatcaaagcggccgtcatcatcggcaaagaccagcagccgatggtcgaagcgtttgccagccaagctccggacatcccggtgaccatcatcgatcccgaagacaacgataccgtcatggatcgtgccgtcgaagcctgcggcacgtatgccgccgccggcgacatcgtgcttatggctccggcctgcgcctccatggaccagttcaagtcctatgcggatcgaggcaatcgattcgccgccgcagccaagacgtggagcgaggtgcatggcctccactgatacccataagcgtaaggcatacagagcccctgacaggcccgcactcgagatcaccgactacacgggttggcgaagcttgctcaacccgctatggtgctaccacggattccgcatggccgtggtggggctgacatgcttcggcctgatcatggtgttctccagctccacggtcaccatggccgcactgggcaagtcgccgttccttcagcttctgaaccagggcgcgttttgcctgatcggcttggtgctgggcttcgtggcattgacgatgccggtgacgttctggaaacggaccggcgtgttctttgtggtgggtgcctgcctgttgcaggcgctgacctttactccgctgggtatcgacgtctacggcaacaaaggttggctgaacctcggcttcaccactatccagccggccgaattcatgaagttcgcgatgtgcatatggctgccctcgtcgttgcatgcctgcagcaagatgtaccacaagaagggaatcaaagcatatgccgcgccgttggtgttgtatgcgataggcgtggcgctggtgatgggcggcaaggacctcggcacggccatgattctggtctccatcggaggcgtggccttcctgatcgtcggattccccggcaaatggatgggaatcggcgtattgggcgcggtggttatggtcggtgcattggcggtttccagcccgaaccgcatgcgtcgtattctggccacatatggtgattgctcggccgctgacgcgcagagcgtatgctaccagtccattcacgccaagtacgccatcgcctccggaggctttctgggattgggcatcggcaattcgcgtgagaaatggaattacctgccggccgcccataacgatttcattttcgcgatcatcggcgaggagaccggattcgtcggttgcgccatcgtattgctgttcttcgcgattctcgcctggtgcatgatcgtcatcgcattgcaggtcaccgatcgttatgttgccatggtgctgatgtgcgtcaccatttggatcgtgggccaggccatggtcaacatcggcgtggtcgtgggtgtgttcccggtattgggcgtgcctatgccgttcgtctccgcaggtggctcatcaatgatcatgtgcttgacggcggccggactggttgtgggacttatgcgttctcaaccgcagataaaacagtcgcgtcagagcgcgtaagtagactcggtaatcatgaatcaaggcacaccacatatcgttcttgctggcggcggtaccgccggacatgtcaatccgctgctcgcggtcgccggggcgattcgcgacatcgaacccacggcacaggtcaccgtcatcggcactgcggtgggtttggagaaggatttggtgcctgaggccggctacgagctcgacaccatcgaaaaagtgccgttcccgcgtcgccctgacctgtacatgcttcgcttcccggcaaaatggaagcgagaaaccgccaaggtgcgctccattcttgaaacacggcatgcggatgtcgtggccggattcggcgggtatgcttccgcccccgtctacgccaccgcacacaagatgggcattccgattgccatccatgagcagaatgcgcgtgccggcatggccaataaactgggcgctcgttgggccgatttcatcggtaccgtgtacgaaggcaccggtctcaaaccgcgtgccggagccgacgtcgagcgtgtcggtctgccgttgcgcccggccatcgcctccctgaccaaacgcatcggtgacgatcgtgccgccgtacgccgtgaatcggccgcgcagcttggcgtcgatccgaaccgtccgctggtgctggtcactggcggatcgctgggagcgcaaagcctgaaccgcgccatcgcctcctccgccgcagacctgttggcccacgcacaaatcatccacttgaccgggcgaggcaaaatcagcgaagtacgcgaactggtcacggcctcggccggcgcggacgtgcttaccggcatcggccccgaatcggccggacaaggtgactaccataccgccgaatatctggaacgaatcgatctggccttcgcctgtgccgacttggtgatttgccgcgccggagccggatcggtatccgagctggctgcactgggtctgccggccatttacgtgccgctgccaatcggcaacggcgagcagcgtttcaatgccgagccagtggtgaacgccggcggcggccttctggtcgcagacaaggacttgaccccgcagtgggtgcatgagcatgtgcccgatctgctcgccgatcacgaacgacttgccgaattcggccgcaaggcatgggaatacggcatcagaaacgctgccgaaatcatggcccggcacgttctgcaattagccgaaccatccaaatagtattcagatatcatcccgtgcgcgatacgggccaatcccgtcccgcaacacgagatacggtcataatatagggtgctggaatccccaaaggagttttgaattgtctcaagatcagcccatcgtgcttgaccccacgtatgcctcgttcgatgctgcggcccgccccgcggatctcggcgccacccatttcatcggtatcggcggcgccggtatgagcgttctggccgaaatgctgcacgccgaaggagtcgcggtggacggctccgatcgcgcgcacagcgccaaaaccgaccgacttgaaacgctgggcatcaccgttgaattcgggcagcgagccgaaaatgtcgcccaggccgagaccgtggtctactccagcgccatcaaaccggacaatccggaaattgtcgcagcgcacgcggcaggcaagcgcattgtgcatcgcagtgacatcctcgctctgctcatgaacggcaaacgagccgtcaccgtggccggagcgcatggcaaaaccaccaccagctccatgctgtcccacattctggtgaacgccggtgctgatccaagctacgccatcggcggctttatccaaggcccggacggcaccacgctggacggtggacacgcgggcaaaggcgatattctggtggccgaagccgacgaatcggacggcagcttcgccaaataccatccgaccatcgccattatcaccaactgtgaagccgatcatctcgaccattacggcgacgaagcccactaccgtgccgcgttcgttgcccacgccggccgggccaccggtcacgtgatcatcagtatcgacgaccccgacggacttgccgtgctggaggccatgcccgccgacgtgaaatcccataccgttgcctacggcactaccgcgcgtgaatccctgcccgatttgggcggtgccgcgtatgtctggatcgcttcggaaagcgagaccgcaggcagcggcgtcgaacagctcaccctgcatctgccggccgcggtgacggcgggggagccggtgtctcagagcgttgccctgaaggttcctggcgtgcacaatgcgcgcaatgcggccgccgccatcagcgctgccgtgctgctgggcgtgagccccgcagacgcggccaaggcggccggcacattcctcggtgcggcacgccgcttccaggtgcgtggcacggtcaagcaggtcactgtagtggacgattacgcccaccatcccaccgaaatcgcggccctgctggatgcggcccgacgccggtaccccgattcgaccattcgtgtgatcttccagccacacctgttctcccgcaccaagttcttcgcgcaccagttcgccgaatccttggccaaagccgatgacgtcattatcaccggcatcttcccggcccgtgaaaagcaggccgatttcccggacatcagcccctccaccatcgtggacgcggctgagggactcaaggacgcttccgcaggcacgtggattcagccggtcgaggatatgtgcctggccgccaagatgatggccatgcgcgcccaccacggcgacgtgatcttcaccgtgggcgcgggcgacatcaccgacatggatcaggtgctgctcaccgcacttgaggcccatcgggaaagctgcgagtgatgtccgggcgcacggtcagatccgggggcaatgacaacggctcacgtcgttcgtccggaagtccccgcaagccgcgcaccatcggttcacgcggaaacacgggtcactcgtcgaagtctcgcgctccccggtccgtgtcttccgggcatgagatcaacgagccggagatcatcgacgatgtgacggtagccaagggccaggccggtgccttcgtcgatgcacgacggctgcacagcgaggattacgttgccgaaacgctgcaccagaccaccggctccctaggagtcgtatcacgcccgaaagtggtgaatttcaccgaacgcgccaaagaacgcaagcgtgcgaacgtacgtgtcgttgcgttacgcgtgttgattgctgtcgtcagcgtggctgtagtgacggggctaacgtggctgctgctcttctcgtcggtgtttcgtctggaaaccagcgagatcggcgtatccggtgccaacgaatgggtgagcgcgcagaccatccatgccatcgccgataagcaggctggaaagtcgttgttcctggtctccacccatgaggtcacagagcaactcaagtccattcccggcgtcagcgaggccaaggtctccaaacagttccccaagtcgatgagcgtggaagtcaaggcgcaacggcctgcggccatgctgaaaagaggcgataccctgaccgcggtggattcccaggcgcgcgtgttgaactcggtgaagaacgccaacgtggatggcatcccggtgatcgaggtcaaggatatagacgccagtctcaagaaccgttcggtgaaggaggcgctggcgattctgggcgcattgccggaatcgatgcgtaagtccattaccaaggtcaccgctgagacgcaggattcggtgaccaccacgcttaacgacggtgaccgcgtaatcatttggggagactcctcgcaactgaagctgaagctggcggaagtcgaggaaatcgacaagaacatcaccgctggcacggctggctttgccggcaaacatcagattgatgtttccgcatcccagaagcccatcatcaagtgacggcgattcagttggttccgttggttccggggcggcgttcgctccgttggtcctgctgacaacgttggtcccgtcaatgccggggcgatgttcgctgccggcgatttgcgcgagtagcgccatagggtgtatgctgaaaagtccggccgaaaagccggaagcttgataactcaagattgggggcgatcggtttcgacggtgacctgttcgctgcagggaagcgtgccgagaacgccgggtccgctcgtggatgaccccggcaaaagaataagtgctaaatctaaccgcactgagttcgctctcgctgcctgatttttagtcaggattaaccagtgagcagccgctccgttcactcctcctcgtctttgggaggatgctgagcgtcgtttagaagacttgctgatgcagttgagcctcagggctgcatcgggactttaactgcggatatgctcgccatcagttgtctgcgacatcgatgggggcagaaaaatcgccaacttggccagcagactacgcacgtagaagactgtgggctcggtcatcggaccggggttcaattccccgcgcctccaccaatccgcctcggcggaaacaagccgcttggctttacgaaagtaaggctgagcggcttttcttattcccgtcgattccctcgtattctctcggtttcacgggataatgtgggcaaaatgtgggcaaaaatcgagcccgcgaagccctctgtcacaacgcgagaacggccccgaccggcaagtaggccgactcgggttgagtcgtctgcgatgccggacggggccgaactgtgcgtggtggtcatgcggcgaggtcgaggcgctgtttgatggcgctgacgccgatgagcgcgccggcgaggatgccgagcgcgttgagcgtggtcactatcgcgtccacgtgagtccagccccatgcggggccgaccgtactgacgaacagggcgagtgcgggcaggacgatgaggcccaaccatttgaggatgtcgtagacgcggctggggattgcgcggttggcttcgatccgacgacctgcggttttggagaccgccgctctaccagctgagctacgcgcataggcggtcatgccggttgattgccatggcacatgaccattgggtggatatgagtaaagcccctgaaccggttgattcagaggctttcacactaatcctgatacggagtgtgccacggggtggattcaccctactcccgcttgtgttttgttttcaggcggcttggatggtgaggcgtccgccgagggcgtggattaccttggcgatggtttggaagctggggttgccgtccttgctgaggctcttgtagaggctttcgcgccccacgcccgcgtccttggcgatctgggtcatgccccgggccttggcgacgttgccgagcgcggcctgcatgagtgcggggtcgtcgtattcggctatggcgttgaggtaggcgatgatgtcctgttcgttttcgaggtattcgctggtgtcgtagtcggtgaattcggtgctcattgtcgttgttccttgtagtcgttgaggatgtcgtgggcttgtctgatgtcggtctgctgggtgcttttgtcgccgcctgcgagcagcagcatgagcacgttgccctgcatggcgaagtagacgcggtatccggccccggtgtggaaccgcatctcgctgaccgggcctcccacgggtttgatgtcgccgaatggcctgcctgcgagcttgcagacatcgagccgggcttggatggcggccttcgctttgtggtccctgagtttcttgaaccacttgcggtattcggcggattgcttgatttccatacctctattgtatcctacagactacatcatgtcaagccgaatggccgctggagcccatagccaacgcaagaatctcccgtatgttgaactcccggtagccgtcatcgacgggtctcgagctggggagtttgccccggttgagccagttgctgatccgcttacggctgacctcgtacccgtagtttcccttgagccattggctcatgcctgccggtgtcttggtcaggtgtattgcctcggccttgtcgcggctctgctcgcgcagctcctgcacgttgatgggattgccgcatctgcacaggcgcagcgccttgcccttcgcggccatcacttcgcgtccgcattcggggcagacgccgattatcctgcgggtgcgcggcctgcggtcaaccttggcagagcgtccatggtgcctcgacctgctggctgccgcagtattggcatggttcggtggtgatgactgcacacgttgtactgtagggaaccatgaaagtcgtattgcaacgagtgtccgaagcgtccgtggacgtggtcaatgaattgggcacgctggatcccacgttcgagccgcagcagattggcccgggattcatgattctggtgggcgtcaccgatgaggacggcgacaagcagatcgcctggctggcccataagattctgaatctcagggtgttcgaggatgcgcagggcaagatgaaccgttcgatccaggatatcggcggggagattctctccatctcgcagttcacgctgttcgccgacgtgcacaagggcaatcgcccgagcttcatcaaggccggcaagcccgagcatgccgatttcatgtggatcaagttcgacgaggcgttgcgctccgggggagtgccggtgaaggaaggtcgtttcggtgcgcatatgcgggtcggactggtcaatgacgggccggtgaccatcgtcatcgacaccgagcatgacatgcctgacggaacacgctgaattgcgatagtaatttgacatcatatcccgttccctccaatatgttactaaagcgctttagtcttctgcgggcgagggcgcatgtcgatatgtttcccatgaacgggcagcacaatgatgtggccgcacaagcggcagagataaggggagtgaacagcagatgttcctgaaacctgaacagcaactggagcggtgcaagcgcatagtgcgccagcgcgtggaccctcatatccacccatcgatcgcacagcttgcggtggagtcctttgacattcccggagagccgatgcccactgacgagttcttcgagaagctcaatcgaggggacatcgacttcaagccgtttacgctcggcggtgaatggggcaccacatggggcacagtctggttccgcctgaccggtaccgtgccggccggctacccgaaaggcaagccgctggagctcatcctcgacctcggctggtacccgcactcctgcggcggccatatcgagggcctcgtctaccgtgccgacggcaccgccatcaaagccgtacacccgctcaactattgggtgccgttcatggatgctgagggcaacgcgcaagtgccggtcgccgaagacggcagcttcaccctgtacctcgaagccgccagcaacccgctgctgctcggcgtgcctccgttcattgagaccgaactgggcgaccatgccaccggcaagccggacgagccgtacgtattcaagtccgccgatctgaccgaattcgatgaacgctacgagaactactccgtcgatctcgacgtggtgagctccctgatggaattcgccgacaaacagtcgccgcgctactggcaactcgccaaagcattgcagcgttcgctgaacgcctacgacgagcgcaaccccgaatccgtggaagccgcgcgcgcagcactcgccggcgtactggccaagccggccaatgcctcggccatgaacgtcagcgccatcggccacgcgcatatcgactccgcatggctgtggccggtgcgcgagacccgccgcaaggtggcccgcaccgtatccaacgcattggcgctgatggacgccgaccccgacttcaaatacgcgatgagctccgcccagcagtacgcctggctgcaagaggatcatccggacatcttcaagcgcatgaagcggcgcattgaagaaggccggttcatcccggtcggcggcatgtgggtggaagccgatggcatgttgcccgccggtgagtcgctgatccgccagattgcatatggccgcaaatacttcaaggaacatctcggtgtggagcccaagggcgtatggctgccggacagcttcggctacaccggcgcatggccgcagatcgcccgccgtgccgggtacgaatggttcctcacgcagaagatctcgtggaacgacactaccaagttcccgcaccactcgttcatgtgggaaggcatcgacggctcgcgcatcttcacccacttcccgccggcggatacctatgctgcttggtgcaaggttcaggaactcgactacgccgagaagaacttccaggacaaggatctctccgaccgctcgcttctgctcttcggtttcggtgatggcggtggcggccccacgcgcaacatgatggagcacctgcaccgctacgagaacctcgaaggcgtctccagggtaactattgagagcccgaacgatttcttcgacaaagcccaccgacagatcgaaaagaacgccggagaggaaatgcccgtctggaagggcgagctgtacctcgaactgcaccgtggcaccttgacctcgcagcaggacatgaaacgcggctgccgccaagaggaatcgctgctgcgcacggtcgaatacctgggcgcggccgccacgttggccgacccgaactacgcctatccgcgcgaagagctggaccgtatctggaagaccctgatgctgaaccagttccacgacatcctgcccggctcggccatcgcatgggtgcaccgcgaagcccgcgaggactatcgccgcgacctgaagcgtctcgccgaaatcgcccaagacatgtgcgccgtgctgcgcaaggccaacccgcaggccgacctgctcgccgaagcccgcatcagccagttccgcaatgacggcgcgtcttggcatgccaaccgcatcaacgaaccgaccaacgcgctttccgtactgacccagacattggacaacggccgtgtactgctggccaacggcgtactgtccgtcaccatcgaggccgacggtacaatctcgtcgctgcttgacgaggagcatggccgtgaactggttccggccggcacccgattgggccaatacgaactgttgagggacgaacccgccgtttgggatgcctgggagatcgaacgcgaatccctgctcatggcgaatgccatgaccggatcaatcgaatcggtcgataccgaaaacggtgcggcacgagtccgtgtgcgtaccgccgacgatgacaccgtcatcaccaccaccatcacgctgcgccccggttcacacacgctcgatttccacgccgacattgactggcacgaacgtgaacgcttcctcaaagtcgatctgccgctgggtatcgtggccgaccaagcaacatacgactgccagtatggtctggtccgccgcccaatcgtcaaaaacaccgcatccgacgaagccaagtatgagagcagcacgaaccgtttcgccattatcggcgatgccggttacgccgcggccgtcatcaacggatcggtatacgggtccgatgccacgccgatcgccgggaatgccgccgaaggtcgtgactcgggcactatgttccgactgtcattgctctccgcgccgaccttccccgacccgcgcaccgatatcggctcgcacgagttcgactggtccgtggtgaccgacgccacggtgggccgtgcgcttgatgccgcttgcgcactcaacgcaccgacgcttcatgacatgcccgacttagcgccgctcgcctcgatcgagtcagcaaacggcaccgtggtgttggactggataaagctggccgacgatggctccggagacctgattgtgcgcgcctatgaggcggccggcggcagggccgatgccacgctgcacgtctgcccggcgctcgcaggcgcttcggtgcatgagaccaacgtgttggaaggcgacgatttggccgccgacctgccggtcgcgctgcaagacggcacacagaacgccgaaggcgccacactgcacttcggcccgttccagctcgccaccctgcgcgtcacgcgctgaattctcgcctgacgcttctgcctccttgtaccatgaggggacagaagtatgtcgtattacggtttctccaattaccatcactcccacccctaccaccagacacagcaaaggagttgaactctccatgtttcttctgcccaatcagcagttggagcgctgcgaccgcgtcatgcagcagcgcgtcaaaccgcatatccacaccacactcgccgcatgcaccttgcgttcgttccacaatcccggcgaaccggtgccctccagcgaatttctagccaaagtgcgcaacggccaagtgcccttcgaacctttccgcgttcccggagtctggggcaccacatggggcaccacatggttcgaggtgaacggccatatcgacatggcggcggtcaaaggacgaaaagtcgaactcatggtagacctcggctggctcgatcaccgcggccccggattccaatccgagggacttgtctatcgtgccgacggcaccgccatcaaatccgcgaacccacgcaaccactggattccactcgtctacgcggacggcagcagcaccgtagaactcgatgaacatggcgacttcaccgtctatatcgaagccgccgccaacccattcgtcgaaggccccaccccgttctcacccaccgaactcggcgaagaggccaccggcacctgtgacttcccatacacactgagtcgtatggacgtcaccatcttcaacgaagacgtgttcgcctactacatggatctggaaaccgtctcctcgctgattcgtgagctcaaggacgacgacccacgctactggcagctcgccaaagcactgcaacgctccctgaacatctacgatgaacgcgacttggaaaccgtgtcggcagcccgtgcggcgctcgccggcgtactcgccgaaccggccgcctccagcgcaatcaaacacatcgccatcggccacgcgcatatcgactccgcatggctgtggccggtgcgcgagacccgccgcaaggtggcccgtaccgtatccaacgtgctggctttgatggacgaagacccggacttcacgtatgcgatgagttccgcccaacagtacgcatggctggaagaggagcatcccgacctgttcgcacgaatgaagcggcgcatcgaagagggccgcttcatcccggtcggcggcatgtgggtggaatccgacaacatgattccttccggcgaatcattggtgcggcagatcacgttcggccgccgatatttcaaggagcatctcggcgtcgcgccgcgcggcatctggctaccggacagtttcggctacaccggctcttggccgcagatcgcccgccgtgcaggattcgactggttcctcacgcagaagatctcgtggaacgacaccaccaagttcccgcaccactcgttcatgtgggagggcatcgatggcacgcgtattctcacgcacttcccgccctcggatacctactgctcgtggatgagcatgcacgagctgatgtattcgcagcgcaacttcctggacaaggacctctcccgtaacgcgattctgctgtacggcttcggcgatggcggtggcggccccacccgtgagatgaccgcgcgcatccgccgcgaccatgatctcgccggcgcgccgaagatcgaattcggtactcccgaccaactgttcgaccgtgtgcgtaaggatatcgtcgacgatgcgcaaggggagaccccggtgttcaagggcgaactgtaccttgaactgcaccgcgctaccctcaccgcccagcaggacatgaagcgcggctgccgccaggaggagtcgatgctgcgcgtcaccgaatacctgtgcgccgcggcccgcatcaagaacccggactatgtctatccgcgcgaagagctggaccgtatttggaaaacgctgctcctgaaccagttccacgacattctgcccggttcggccatcgcatgggtacaccgtcaggcgcggaccgaatacgcgcgtgacatcgctcggctgaacgagatcgcccttgaagccgggcgcgcgatcgcagccgtggaacccgatgacgcaaccataaccgacgccgtaatcgccccatattcccgccaagcctgtgagacgtgggtggtacgcccggcttcgagccgagccgaagcgggaaccgcatccatggctcgggtcgccgttacccatgacggcgatacgattgtgctcgacaacggccgactgcacgtgcgcattgaagccgacggcaccgtttcgtcaatcgtcgatcagcgaaccaatcgtgaactggtgcccgccggcacccgactgggccgctacgaaatgctcaaagacgaacccttccactgggacgcttgggatattcaacgcgatgcattcctcaccgccaacgcgctcagcgaggcatcgattgcaagcgtggacgaaaccgccaacggtggggccgtcgtgcatgctgtcactcgcgcgaagggcgttgaaattcgtacgggcattgtcttaaggccgggctccgccacactggacttcgccgccgatgtggactggcatgccgtcgaacagttcctcaaagtggatatgccggtcaccgtgcaagcggtgaacgcgcaatacgaatgccaatacggtctggtcgaacgccccatcaacaagaacacgcgcagcgatgatgccaaattcgaaagctgcacgcaccgcttcgtgcgtatcgccgacgccgactatgccgccgctgtggtcaacgcctccacctacggctccgacgtcagccccatccacgccgatgcggcacatggcaccggccgcggcaccatggtgcggctctcgctgctgtccgcaccgctgtaccccgacccacgcaccgaccaaggcgcacactccttcgcgtggtctctggtcgctgacgccgatatgaatgcagtgctggacgaagcggcgcgacttaacagccccgtaataggggagttgcctgatatggcgccgctggtctcgctcgccgacgccaccggcgtcatcgtattggactggatcaagctcgccgatgacggttccagcgatctgatcgtgcgcctgtacgaggccgccggcggcaatgccacggccacactgcgccttgacgccgctctctccgatgccaaggccagcgtgcaggaggtgaatctcatggaggagccggagctggatgccgaactgccgcgcgcgctcgccggtgacgaaccaatgcctgccgacggtgcggtcgtttcgttggcgccattccagctcgccacgctgcgtattcgccgataagggatattgggcctaggctcgatattttgggtcgcgcccaaccgtaacggaaccggaacagaccggctctgccatacggttgggcgcggcccattattgtatgagaagagggagagcgatcccgttgggcaaatatcaatgcgacacgcgacgatgaattcgttgcgtgcatgtttcgattgtgttatgtttttactaaaccgatttagttaacaggttcgcgactgaccggaagctaaaacggtttagtctcagcgatgagaactgaataaaggttgtgataccacgtcaatcaccgcgacgggtgactgtgctggagcacaacgattaggtttctccgtccacagcagggcgggatgaaaaaggaatcaaaaggaaaggaaaacatcatgttttctatgaagaagatcctcgccatcgccggtgccggtgcgatgctcgtatcggtggctgcctgtggtagcggaactgcgggggatgacggcggcaagaaggagatctccttccagacctggaacctcaagaacgacaagtacaccccgtatttcgaggcgctgatcaaggcctatgagaaggaccacccggacgtcaccgtcaagtggcttgacgccccgtccgatggttacgaagacaagctgtccagccaggctgcggccggcgaactgccggacatcgtcgacggcggcaactccatcctgtacggtcttgccaaggccggcgcgctgctcgatgtctccaagcaggctccggatgcggaaaaggactactacgaaggcgcatggaagtccgtgaccatgcagggcaatggcatcgagaagggtgcctacggcctgccgtggtatgtcaacgatggcccgacctactggaacaccgagctgatgcagaagtgcggccttgatccgaacaagattccgaccacatgggatgagtacttcgccgccggcgacaccatcgtgcagaactgcaaggatgtctacctgggcaccacgatgggttacaacaccgaagatctgatgaccgcaggcgtcaagtccttcatgaacgatgaccacagcaagtacaccttcaatgatgaggccggtgtcaagcagatcagccgcttcgttgagctgtacaagaagggcggcatcccgccggaggccctcgactcctcctggagccaggccgccgatctcttccagcgtggcaacctggtctccatggccggctccgcctactccgctgacggcttcaagcagaacgctccggacctttacaagaacctcgcagtcggcccgcgtatcagcaacgacggcaagtccgcttccgtggcctacgagatgctcggcatcagcgccaactcgaagcaccccgacgttgccattgacttcgcccgattcgtgaccaacgagaagaaccagatcgagttcgacaagaaggcctccgtgttcccgtccgccaaggggggtctggatgacgactactacaagagcatcgacgaaagcacccttgagggcaaggctctgaagatcacgctcgaccaggtcaaggacggctacggctctcgtccgtccgagttcaccgacaacaacggctccaagaacttccagcagcagatcgccctcgctatgcagggcaagcagaccgccaaggaagcccttgacaagtccgtcgagttcgcaaacgagaagctcgcacagtgagcaacgcggcactcgccgctgacaggtcggaggcccgcacggcctccgaccggcctgaaccgatgaacctcaaccacggcaagaagcagaatcgtagcttcggcaccatcattgccccctacctgtttgttctgccagcgttcgcgattgtgtttgtattcatcgtccttgcggcactcaacactttcaggcttgctttcaccaactccacactgctccgtccgggaaccttcgtcggactcgaaaacttcatcaaactgttccatgacgagtacttcctcacggcactgctgaactccacactctacgtgatctgcgtagtgccgttcatggtgatcctcccgttgatcctggcctatctggtcaagggcaactcccgcatcatgggcttcttccgcaccgccttctacatgccggtggttatgtccgccgttgtggtgggtatgatctggaccaacctgctggattccgccggtctggtcaactccgtgctcaaggcattgaagatcatctccaagccggttccattcctcaccgatcgatggggcgtgctcttcagctcgatgttcgtgacaatctggctgggcctcggctactacatggtcatctacctgaccgccctcgccaacatcgatgaatccctttacgaagccgcctccctcgacggcgctggccctgtccgccagttcatctacgtgacaatgcccggcgtgcgctccacgatgatgctcatcatgatgctgtccaccatcgccgcattccgagtcttcaacgaaatctacgtgttgaccaacggctccgcaggccccggcggcatggatatgacgatgtcgatgcttatcaagcgcgaaggcaccggtatccaggcccgcactggttacgcgagcgccatctccatcgtcgtgctcgtcatcgtcggcgtcatgctcatcgtgcagcagatcgtacaaaagcgaggtgaggactgatgaataccaacacgcataaggtcaccgtcggcaaagtcgtccagtatctgattctgattctgatgttcctgctgctcgtcggcccgttcgtctgggaactgtccctgtcgttcaagggcaagggcgacaacgtctacgccgtgcctccctacctgatgccgaagaccccgacgctggacaactacatttccgtgttcaagcaggtcccggtattccactacatgctcaacacgctggtggtctgcctgatctccatcttcggcaacgtggtcttctccacgatggccggctacgcactgggacgcctgaagtggcgtggccgcggactggtgttcaccatgttcatgggcaccatggtcatcccgatcgaaggcgtgatgatctcccagttcctgatcattcgctccatccacctgcagaacacactgctggcagtcgcactgcctggcctgtgcggcgccatcaacatcctgctcatgaccaacgccttcaaatccattccaatggaactcgaagaggcggccatggtggacggtgccaacctatggcagcggttcttccacatctgtgtaccgcaggtcaaaggcacgatgaccgttgtcggcatcttcgcattcgtcggtgcctggaacgacttcctgtggccgttgatcgcgatctccgatgaaagcaagtacaccttgaccctcggcatgaaccgactcaagggcatgttcatccaagatccgcgactgatcgccgccggtgcgctcgtctcgcttatcccgatcatcgtcttcttctgctgcttccagcgctacttcttccgtggcttggaacagggtggactcaagggctgagcggactggaaaaaggaggtactccaatgaaattcggagtcaactacacgccgtcgcatggctggttccacgcatggctcgacccggactgggacggcatcgacaatgatctcaagcagatcagcgaactgggtatggaccatgtgcgcatcttcccgatctggccgtatctgcaacctaatcgcacctggatcaacaagaagggcgtggcggatgtgcgccgcatggtgcacatcgccggcgagcacggtttggatgcctatgtggacgtgttccaagggcatctgtccagcttcgacttcctgccttcatggctggtcacctggcatgcgggcaacatgttcaccgatgcggacgccgttgcggccgagcgtgaactggtcaagaccatgaccgatgagctgtccaaggaacccgcgttcaagggtctgaccttgggcaacgaggtcaatcagctgtctgacaggccgcatcccacgaagatgagcgccacggaccggcagatcgacgcatggctggacgcgctgcttccgaccgccgccggtgaagggcacaacgcgctgtacagcgtcaacgatggcacctggttcatcgatgggcacccgttcactccggtgcagtccgccaccaagggtgatatgacagtgattcactcctgggtgttcaacggcatcgcgcaaggatacggcgccaccagtgaggagtgctcgtcgtacgcactgtacctggccgagctggccaaggcgttcggcaaggattccgagcgcccggtgtggctccaggaagtcggtgcgccggagaatgtgctggaaaccgactacacgccggaattctgccgcaagaccgttgaacgtgccatggattgccggaacctgtggggtgtgacgtggtggtgctcgcacgatgtgcccgccagcatggaagacttcccgttcttcgagcactctctgggcttgttcgacgagcaaggccagctgaagccgatcggccgtacgttcggggaactcgccgcacagtaccgttccgcattgccggctcagccgaagaccgtcgccgtggtgattgatgtggatgaggccggaaacccggtgaaccgcagtgcgctcggcccgggaggctcggtgtgcgacctgtggatgaagctgcaggtggcgggccagcgcccgaccatcatcacctcgcaggtggcggccaatcaagaggcgctcgcgcagcgtggcattctggaattgcacgctgacgaacacccctatgccgcccgttactacactgcggtttcggacccatcgttcgaaacggctgattaaaccgatatccggttgtggaatcatctactccttgttccacaaccggatattttcaattgcagtgcgcacaattgcagtgcgcagggcaaaacataagatccggtactcgccgaagagcgagaagaacgagaagacaatatacgagaagggggagcgctcaatgagcatcaactgcgccgcagtggaccgactcattgattcgatgagcttcacgcagaaagttggccagttgaaccagcgtctgctcggttggaagtccgtggaacgcaatgctgcgggacggctggtggcctcggacgagctcaagcaggagattgaccgatggggtggactcggcaccctgtacggtctattgcgagccgacccatggtctggtcaacattggggtaacggcatacgccctgaggagcggactgaggcgattgccgtggtgcagcaaactgtgctggaacgtggcgcgcacggcatcggcgtattacttagcgaagaggcgcctcacgggcatcaggcgctgggcggcacggtgctgcccaccaatctgggtttgggcgctacgtttgacccgcagggggtgcaggaagcggaagccgcggttgccgcagaactggccgccagcggcattcatatcgcattggtatccggtttggacatcgcccgtgacccacgctggggccgttgcgaggaatgcttcggcgaggatccgctgatggctgcccgcatgtgcgaggccatcgttaccggcatgcagggtgagcatcgcagcaaggtcggccacgggggagtggccgtggtgctcaagcatctggcggcgcaaggcgaggccgtgggcggccgcaacggacagtccgccgtactgggcccgcacgatcttcatgaaattcatctgccgccggtggccgccggtgtgcgcgccggtgccttgggctttatggcagcctacaacgatatcgattctgtaccttgctgcgccaacccgtggctgctcaaggattatctgcgcgaccagctcggtttcgacggcatcgtgatggccgatggcctggccgtggatcggctcgaagacatggccggctccattcccgcggcagggcgcgccgcactgctcgccggcgtggacgtctccctgtgggatgaaggattcacccgcctcgaagaatatgcggatgacgaacaggtagtggccgctgtcgacacggccttgcgccgggtgctggaactcaaagccatgttcggtctcttgcccgaagacggtgccgataccgccgcaattgccatgccgagcgccgacgccatcgcgcaggccactgcggatgggcgtgagcaggccaagcgcatggcccgcgaggcgataacgctgatcaatgatggccagtctgccgccacgctcgacgatatccgcagcgtcatagctgatgctcaagccggccctgtgattgtcgccggcccgttcgccgacgatttcggctgcttcctgggcgattacaccgcccctctgcccgccgatgaacagtcaagcgtctaccggcaattggtggcacgtctcggggaggaccgggttctcttggccgccaagccgagcgatgcgccggccgatcaatgggcgcgtgcgtcgaccgtggtattcgtatgcggcagcaccagcgaacgcagctatgacagtgaattcgacgacaatggcgcggcgaaggccgtaaccgaatacggtgccacctgcggcgaaggcgtggacttgtctgacatccgcctgccctggcgtcaggatgacatgctaggtgaagtcgcggcattgaccaccgctccaattgtttcggtggcggtgtgcggtcgcgcgcatgtactgaccgatgtgctggaacgctccgccgtgacgatctgggccggatatgccggccaatatgggccgcaggccgtagccgacgtattggttgacggagccgacatgtctggccgccttcctgtgaccttacccgcatatcccgcagccattcccgttcgatacaatgaccgccaaagtgccgcgcatgtctacaaggatgcggcggaaccgatattgcgcggcttcggctatggagccggttcgctggcggcggtgacgttcagcgagatgcacgccgatacgcaatcgcatccaggtgaagtgctggtgcaggtgacggcacatgctgacgatcacggggccgcgggtgccgtgaatctgttcgcgcatgtcagcggcggccgccgcatcccacgtttggcaatgcttgtcgattcggtatacatggacttgaacgcgggagagcgtcgcgatatcgcgttccacgtgccgtgtgatcgtctgcgggatgtcggtgacgggcaagttcaggtgacctgcacgctggatggagattcgacgcatacggtcacggcgacgctgccgggggaatattaggggcatgtatgaatgtggggtgcgaagcactggaaccgcatcacacccccggatggagcctgaaaccgcaaggcatccatcctcgcaacctgcaagtctgcgggttgtcacccgatagaggaaacaacaaaggagattatatatgtgttgctcacaaggtagtgaagggcgctcgtccatcggacgcagactcgccgccgtcgcggcgggcgtagtcgccacggcactgatgctcggatgttcgctggccatgggaacggttgcgaacgcccaggagggggattcccccgttgcggcgtcgcaggagggtaacggcaacaagcatttcatggtgtattaccgcgcatggcgtgacgtgaccatgaaaggcgtgaacaccgatttaccggatgacaattggatctccatgtacgacattccatacggcatcgatgtcgtcaatgtgttcagctacgttcccagtggccaggaagcggcggcccagccgttctatgacaagctcaagagcgattacgcgccgtatctgcatgcccgaggcatcaaactcgtacgaggtttggattacagcggtgttatggtagacggtttcaagacgtggattgctcagcagggcaaaaacgtcgatagcgcgaccgaatcggattatgacgcgtacgccgatcatgtcatcgaaacgtacatgacctcagttggcctcgacggtcttgacatcgatatggaaactttcccggatgccgcgcaggtggcgatttccgatcaggtcatcacagccctcgccaagcgcatcgggccgaagtcggataacccggaaggcacgatgttcctttacgacaccaatggcagctacactgctccgtttaagaacgtttctgattgcttcgactatgttgcctaccagcagtacggttccgattcgaaccggacggccaaggccgctgccacctacgaacagtttatcgactcgaccaagttcgttcccggcctgaccttccccgaagagggtgacatgaataaccggtggaacgacgcgaccgaaccatacctggacagtcatttctatgatgtggcctcatactcgtacgaccacaatctcggaggcatgttcgtctacgcgctcgaccgcgacggacgcacctattccgacgatgatttggcacacatcaaaccgtcgaatctgatttggacgaagacagccatcgcacaaagccaaggcatgagtctggaaaacgccaagcaggctgccaaccacttccttgaccgtatgtcctataccaaggatgttccagccgaaacgcgccaaaccgtggcagcggccaccaacctgtatgaggtgaacaaggcggtgctcggcgcggattggaacgacggatacagcaacacatatgatccgacgctcgaactttccctgacctccatcgacaccacggcacttaccggtgccatagccaaggcggatgcattgctagctgacggcgcaaccgataccgatgtgcggacaacgctgaccacggccagaaacgcggcggtcactggcctgaccagcaagctgtataccggagctgacgttgtctcctggacggcatcgctcaacaccgcaatcgcagatgcaacgggcggcaagcccaagccgcaacagccaggcacaggcgaaacggacaaacctagttccggtgacgcatcacacaacaagccacagtctgcaaccggacgtctggcaagcaccggttccgatggcaccgtcgtgctatcggtcgccgtgattatgacgctcgccggtatcagcgtattcgcagtccgccgtcgcggataacaccggttcgaatgaatcgaaaaacagtatttgggatacggcgcgatatgcgaagcgccgtatcccatggcccacatcggtagggacgaagtagtacgcagacggttgatctccggcgtaagccggaagaagtcaaaggagattatagatgagattgtcactaggcgatcccgctgggtgtacttctgcccgggctcaacacaggaaatggctgtgcagcggtctggccgcggtattgtcgatgaccacgctggcggcgttggccgcaccggccagcgccaccggcacaatgacatgggggtgttcctatgtttttgtcaactccttggggagttgacgtgtcgggattccggttggctgtcgtgggcgcgcttcgccctgccggtggcgtccggcgtcctttcccgtgtggcccgattcaggctacgagggctggttcctggtagaggacgccgtttttgagcatgctgtagattacgtcgcagcgtcggcgcgcgaggcagatgacagcggcgttgtggtgcttgccctgttcgcgtttgcgcttgtagtaggcgatggacggcgggtgtttggcggacgcgacgaacaaggactgccacagcgcgttcctgaggcgtttgttgccccgtctggagggtctctcgcccttgatgctggtgccggactggccggtggccggagcgatgccggcgtaggcggccaggtgggccgcgcttttgaagttggcgatgtcgccgacgatgttccagcctaccaggacttcatgaagcagatcgtcgatcagggcatttacatccagtggtacgactcagccacatacccgggtggcggcgtaggctaccaagacatgttcaacggcagcaattcgccgtatgtgcaggatacggacaagggcaagatctctgattccatcttcctgaactactggttcagcggcaacatgcttaaggattcggccgctcacgccgagagtttcggcatcgatccgaaatatgcggtgtttgctggcatcgagtccggacagaagaagttcgacagtatcggcagcaatgcgggctatatgaacgtcaatctcgacgatacaggtaagccgtatgtgagcctcgccgcgctcggcaccgacttcgtctcccgcgaactgggcgacgacaagaaggtctatccgaaataccagaaccaggtgttcgaccgcgaacgccgactgtggaccggctcgtccaccggcgagaagggcaccaccgacatcgccgacaattacatcgacgacggcacgagcaatgacggttggaagggcttcgcttcccagatcgccgaatgctccgtggttggcggttccatgttctctacgtcgttcaacaccggtcacggtctcgaatggcgtgatggcggcgaacggaccagcgaccagcagtggggcaacatcaacctgctggatattctgccgacatggcagtggtggatcgatgccgactccgacccgctgcaggccgacttcgactacggtaaggactacgaggcggtatcacgcttcaagtacaccaaggtcggtggttacgaaggcggcgattcgctggtgctgagcggcaagctctccaacgacaacaccattcgcctgtacaagaccgacctggatgtcgctgccggctccaaggttgacctgacctacaacaagctcaacagcgatgattccaagttgcagcttggcctcatccttgccgacgaccccgagaccgtggtgccggtggacgtgacggacggttcggcaggcaacggctggaagaccgcgagcgtggacctgtcccagtacgcgggtaagaagatcgccacgctgggtctgatcgtcaagtggaatctcgccgactactccaccatcaagaactacttgctctacctggacaataccttcctcggcggccgctacgacgacaccctgtatgtcaagcacctgcccgccaagaccggcacgctcaagctctacgccgtgggcgcggacggctcgcgttcgctcgccaccgaagcgccgctgaacgaagcggcggccgtctccgacgtgaaagtcgaaccaggcaaggacggcaacgtcaaggtctcttggaccaatccgcaggtatccggcgagaaaaccgtgaccgtcaaatccgacaccggttcgtggcgttacgccgcgaagccgtattcccagaccgtcaaggtcgccgccgacaagagcaaagtgacgattgccaatgcgccggttgacagctcccgctatgtggtgaacgtcgataatgcaggtggcactaccgctacggcaacaggtgcatttgccgatgccgccattgagccgtatccggcttgctcggtgatctggaatggcgataatgtgacgctggcccgtcctgagactcaagactggcgctacctgtacatgaccgagaagtggatcggcgagaatggcaagcagcagcaggagaaccagctgggtgctagctacacctactcgcagaacactccgccaatcactggtattatccgtggtcgtaccacacctgcctcatacaccaggtccatcccccgccagtcatgaactgcgggtgcaggtcgaggattacagcggcaacaagaccgatccggtgaagattccgaccgccgacgaactggccaagtgcacggtcgccgaccccacccagccggatgccaagaagtccacgctgccgcggtcgacggttcggccgtggccgacggcaaggccatccgcacggtgcaggcaacggtcaaggattcgttcggcaatccgctggccaatgccgaggtggcgtttgaactgcccgaaggcgtctcggccattggcggaaacaccaccgtcaagaccgatgccgccggcgtggcttcgctgaacgtcgtgtccacgaaggtcggcaagtacacggtgaaggccgtgctgaacggcaatgccatcggcaagggcgtcaccgtcgaattcaccaaggtcgcggtgacgccgaacaagcccggcgaccagaacaagcctggcgataccaagccgaacaagcccagccagaacgacaacaagaacaatgacaagaatggcgcttcgttgagtgccacgggttcgtcggtcattgcgattgtggcggccatggtggtgctgcttggcgcgggtgcggtggtacttcgcgctcgtagcaagacggagtagttcgtcgcaatacgggtgttgatactcgtgccataagcgggatttaggggttgcccaatgggtgcccccctaaatcccgtttgttttgtcgcaagacatatgccgagaccagtgactaaaatgctttagttatttgactaaaattattgatatcataagagttagcgcacggttgatgcatatggcccaatgcgggggtgccgtcaaccgtatcgcaatagtcgcaatgcggtcgtaaaaaggagtgttcatgagatctgctcgcgaggcatcgtcgtcgtctgacggcacgcagcgtgtgagcctgaaagacatcgcagatgaattaggcatctcgcagaccgcggtatccttcgccatcaatgatcggcccggcgtttccgcggaaaccaaacgtcgggtcaaagaggctgcagccaggctcggctggacgccggtctacgccgcacaagcactgggatcctcgaagaccatgaccataggctttgcccccgcacgatccacgcaggggctcacggatgaaagcttcatgctgcacttcatggcgggtgtgcacgcctcgctcagccccaaaggctatggtttgctgtaccgcccatgccgattcctgaacgaggagatgagcgtatacaaggattgggcgtcgcgcaagcgcgtggatggcgttatcctcgtcgatttgcgagccgatgatccacgcccggaattgttgaagaatctgggtgtgcgcgcagtgcttgccggaggacccgacccgaacaattatgtgccgtcactgtccatcgatgattcacgcacgatgggaaccgtgctcgaacatttgtcgtcattgggacaccgccgaatcgcctatctttccggcgatccgaacctggattattcacaggggcgtgtcgcggcattccgcgcatttgccaaacggcgaaagctggaatccatcaacatcgaattcaccgattttgttgcggaacaggccgcgatgctcacattggagatgctgcattcaccgaagccgcctaccgcgttcatctatgaaacggagatcctcgccgcggccagtcttcacgccatggccgaagattattccgctcggcagatggaggcgggggagggccatgcggaagtctatccgaatgggctgcccgccattgtcagttttgaagacagtttcatttgtgaggcggcgtatccgtcaattaccgccgcgcatcgtgatgccagcgaatacggtgccaaagtggccaaactgctgctcaaagtgcttgccggagagcaggtgagcggcaaccggcgaatcctcaccccgaaactggtgattcgggacagcaccgccaagcccatggataccatggcgtagaacggtcattgcatcggcttgcagacaatgacatgcgaccagtacggcgttggggcccc

SEQ ID NO: 3701 - DNA, 26679 bp, Unknown
  R150_10m  MAG No. k141_4427
aagaatgtacctcatccagattttcacataaggcaattgtattttccatatcgattgtggtgtgaacgcgtaaggaaaccaatccgtttggtcttttcgcagtatatcgattcaatatatcacttatatgaatatgaatttgctaaagaggatgattattcgtcaattcatctaattcaacagagaaattattcttttcagtcttctgcaatttcatgggacgacatacaaagaattatcgattcgaattcaccagaaatagacgacaattacgacgatacatcgataccatttattcaagcagatttattcacacggttgatttccctaatagaacaattagataaagtacccaatatgacttctgctgaaattgcatcatctatggaatttgacattcgtcaagcatcatattattcatcggcaggagaatatctcggagtaatcgagagaccgttgcgaggtcattcacaactttccttgacaggcatcaaattaatgcgcttgaaacttcgcgaacgcagattagagctcattaagttaatcgtcagacataacatttttcacgatcttctttcgcaaatcatcgacactggggagttcccctctcgcgaagctataattgataggatgaggcgctataatgtttgtaaagatgcaactactctatatcgtagagcttccagcgtctctggctggctacgatggatagtcacgcttcccgatactactgaggaatttgaataattcattgtacgatatatactaagtcatagtatcagcatcaaaaggaggcttgatcatggttaatgataaacgccctgtaattcagactcaaggatacaacggcagtgagcctacgcgcatgtgccctcattgcggaaaagaaaaaccactaagtgatttcggttaccgaaatatggggaatgatactatccgtaaccagtcatggtgtaaggactgtcgataaaagtaatgcaccgcgtcatgaacgcggtgcattactttttctggttataggttatttgcccagcgtctgagcgtaggagttgcagcgggccgcaaaaccggagaacacttgctcggcgagcggatgcagtagctgatcgtattgggcgaactgctcgcgcaattgggacttggacccacccgcggccttgagatccttgaccatgctcggctcatccagccattcgtccagcagcgagccgcacacctcaagatggaactgcatgcccagcgcggatcccagtcggaatgcctgcaccttggtggaagacgaacgtgccagcagctggcctccctcgggcaagcccaccacgtcgttatgccagtgcagcaccgtcagctgcttatcccacatggagaagaagtcatgcttgtccacacgcttgatcggcgcgaacccaatctccggcgcatcgcccttgcgcagctgcgcaccaagcgcagtggcgataatctgatgccccaggcatacaccgagaatcggcttgcctgaagccacggcggcacgcgccaacttggcttccgccttcagccccggatacttgtcgtaatcaagcgcgcccataggcccacccatgattaccacgccagccagttcgccgaaatcaggcaagtccggtttctttttgtcgacgatattcatcgtcaccgtctcaagaccgatgtcctcgaggttcgacaatatgcgtcccggacgttcccatgggacatgttgcaaaatgagcacttgtggtgtggccatgacttctattgtggcacgagcgttccccgtttgcgtaacgagcagggcaaatccatgaatctcgcagtttccgcagcggtcaaagacgtattctcgcgagactgttgtcccgcttcacatccgtctgtcacctcgttcgggccccgcctgtgaagcgttcatcaaactcttcgagtaacgattcagcatgtctggttcggaccctacgcttgagcgttatgggaaacagccaagaaccgcaggatttcaacatttccgtcatgccttcaagcctgacgccggtgcatgttgccaaggccgcagaaggcctgaatctgtatgacaccgcctcgcaccaggtcagccatttcgtgccgctcaagccgggcgaagtcggcatttatgtgtgtggcgccaccgtgcagtcgtcaccgcatatcggccatatccgtgccgccgtggcgttcgacatcgtgcgccgctggtttttgaagctcggctacaaagtcacttttgtgcgtaatgtgaccgatatcgacgacaagatcctcgataaggccgcggccgccggccagcgttggtgggcccgcgcctattattacgagcgcgaattcaccgaggcgtacaacacgctcggcgtgctgccgcccaccgtggaacctcgcgccaccggccacatgtcggacatgatcgacctgattcagcgcattctcgacaacggccacggctatgtggtcacggatgcggacggcaagcccaccggcaacgtgtacttcgatgtggcatcctggccgcattacggcgaactcacccaccagaagcagacttccgaagtcgatgaggccgctgccgtggccgaccgcatgggcccgtccgtggacgccaccggtgccgacaagtacaatccggtcgacccggccgacgcctcccccgacaagcacgacccgcgtgatttcgccctgtggaaggcccccaaggacaccgatcccgaggacgcccgttggtcgacgccgttcggcgtgggtcgccctggctggcacatcgaatgctccgccatgtcccaccgttacctgggcgatggcttcgacattcacggcggcggtttggatctgcgcttcccccaccacgaaaacgagatggcgcagacctgcgcggccggctacccctctgctgcgcgctggatgcattcggcatgggtgaccgccaagggcgagaagatgtcgaagtcgctgggcaccggcctgtccgtgccgagcgtgctggccgagcattccgcttgggtggtgcgttacgctttgggctccgtgcagtaccggtcgatgctcgaatggtccgatcaggcgctggtcgaggcgcaggccgcatacgaccgtatctcgaacttcatcgagcgcgccggtgtggcactaggcggtcagccttctcgcgaggaggttgctgccgtctccgccgacgacctgcccgccgatttcgtggccgccatgaatgacgacgtcaatgtgtctggtgcaaccgccgcgatcttcaccgccatccgttccggcaatacgttgctttcacagctggctgaccgcgccgattccgaaaccgccaaggccgaggtgcgtgaggcgctgctcgccgtgcgtgccatgctcgacaccttgggtctcgacccgctggccgagccgtgggtgtctgctggcggtgccgctgatggcacggccgagtcgcccgaacatgcggcgctggaggcactgattgccgagcagctcaacgcccgcgccgaggcccgcaaggccaaggacttcgccaaggccgaccagattcgcgacgccctgaccgaggccggcatcgccatcgaagacggcccgcagggttccacttggagcctgaagtagccgcttcaaacccatcaatcagtcaaacacgaagtccacgtccacgatgtgcaggcgcttgatgagctccttctccagcgagcgcttgcattcgatgaggtcggctacatcaatggtttcgccgatgccgctcagatacacgtcaacggtgtagttcatgccggtcttgaagatcagcgtctgctcgtagtcggtgttggcaggcagatggcgctgtgcctcggcctccacgtaggcgttggtctcatcgtcgtcatgcacgccgccgaccaattccacgaacgcctctttgagcacgctgaacggttccttgatggtcaatgccaccaaagccacggtgatgaagaaatcgccggtgtagtgcaggaagtcaagcggaccgccggccggtagcagcatcaggaagatggcaaccacgccgatgccgaacgacattgatccgtcgaccaacgtgctcttgcactcggcggtgagcatggtgctggaatcgccgatggagcggttggagcgccggtaatacatgtataggctgaagcacactattacggtcaggatctcgtagatgaccaccgggccggtttcaatgcgttcgccggacccgaacacgaagtagtcgtacgctactcggcacacgtcaatcagcgaatacaccaacaacgacatggtgaaaatggccttgcagatcgcgtagatgggttccagtgcgaacatgccattggggaagcgctcggtggttcgcaccgtgcgcgacgagaggtacaccgccaccattccggacaggacggaaatcgcggtgaaggagaagtcgaggaacatggccttgaggccggtcatgaagaacacggccacgccggctaagacctgcagcacgttgatgacgatgccaacgatcagggctttgcgttcgagtagtttttgggtgggcatcagtgggccttccttattgcacggcatgtctgcgttggcccgaacgtcatggttcggagcgcacggcagtctgcgtataagcggtgtccagcgattttcaaaacagcgtaagcattccaaaaaacacaggattctttacggtttccatggtatcggaagcactcgattggcttcgccacgagcggacggcacggcatttgccgtctgaatgcccaacatccctgactactccgcgacgcaatccccggaaagagtcgtccccaacaccgcaatttcccgcgtggcggctagactgttgcccattatggcagctttttcatctttgacagacagactctcgaatgcgttcaagcatctcaagagcaagggcaagctttccgaggcggatatcgacggcacgatccgtgaaatccgccgcgcgctgctcgacgccgacgtggcgctcgacgtggtgcgttccttcaccggcaaggtgcgtgagcgcgcactgggcaccgaggtgtccgacgcgctcaaccccgcccaacaggtggtgaagatcgtcaacgaggagctcaccgacgtgctcggccaaggggtcgatcgtccgctgaacttcgcgaagaacccgccgacgatcatcatgctcgccggccttcagggtgccggtaagaccacgctggccggcaagctcggctactggctcaaggattccggccacacgccgctgctggtggcggccgatttgcagcgtccgaacgcggtgacgcagctgcaggtggtcggcgaacgcgccggcgtgcccgtctatgctcccgaaaagggcgtccaatccgatggcggcgaggccgtcgcagctccgggccagatctccggcgacccggtgaaggtggcccgcgattccatcgaactcgccaagcagaagctctacgacacggtgatcatcgataccgccggtcgtctgggcgtggacgaggagctgatgaagcaggcccgcgacattcgcgatgccgtgcaccccaacgaaatcctgttcgtcatcgacgcgatgatcggccaggacgccgtcaagaccgccaaggcgttcgatgagggcgtggacttcaccggcgtggtgctgtccaagctcgatggcgacgcccgcggtggtgccgcgctgtccgtggcgtccgtgaccggcaagccgatcctgttcgcctccaacggtgagggcctgaaggatttcgaggtcttccacccggaccgcatggcctcgcgcatcctcgacatgggcgacatcatgacgctcatcgagcaggcgcagaagcagttcgatgaggaagaggcccgcaaggccgccgagaaaatctccgaaggctccttcggcctggacgacttcctcgatcagctgcagcaggtacgcaagctgggctcgatgaagtcgctgctcggcatgattccgggcatggcccagcaccgcaaggaactcgagcagttcgatgagaaggaaatcgaccgcaccgaggcgatcattcgctcgatgaccccggccgagcgccgcgatccgtcgattatcaatggttcccgccgcgcccgtatcgcctatggttccggcgtgacggtttctcaggtgaacgctttgctgcagcgtttcgagcaggccgcgaagatgatgaagcgcatgtccaatcgtggcggcatgggcggcggcatccccggcttcggcggcccggctatgggcggcggcaagaagaagggcaagaacaagaagaaaggcggcaaatccggcaatccgatgaagcgcgaggccgaggagaaggcattgcgcgacaagctggccggcaaatcctccggttcgaccggcggttccgccttcgccaagaagccgcagaacccgcccctgcccgccggccttgaacagatgatgggcaacgtcgatggtggcactgaactgccgccgaacctcggcggaggccttggcggactgttcggccgctgatctcacaacttggctcccctcgcagaggggagccaagttatatctcggttcaatttatatttcgaaaggaacttccatgacgacaatcttcagcgcggtggcaatcatcgcactgttatggacggccttaagcgcgctgcccgccggtctcgaggcccgtatgccgcttccgtacatgattgccctgactccgctgctgtgggttcctttgatgattctggccgcggtcgccgcatggcaacatgaatggactgcgatgtcgtcgcttattgtggtcgcgctgattgccagctcacagcgcatcaactactggggtacgtcaatcgacccagccggcaaacgcagagaatcccaccgtgaaacagcccgtgaaacaacttcgccgacgctgtcaaaaagccataacagcaatacatcgagcacctcaaacactccgaaggaaggacccgaaacagtccccgatgggcaccgtgaaacaacgcgtgaaacactctcgccccagttctcggttatgacgatgaattgtcgatacggacgcgccgacgccgctgaaatcattcgcaatattcgcgaacgcaatatcagcgtattggccttgcaggaagtcaccgacgacctcatcacacgtcttaccgaagccgacatcaacgaactcctcccctaccatcagttcggagacgccaaagagaccgataatggcggattcaacgtgatctattcccgctacgagccgagcgcagcggtgcccaacgtggtctccatccctgccgccgacgttcccgccatcaccctcaaaacctccggtactcgcacggtgacgctttgttcggctcacccgaaatcgccgatgcgcggctgcgcggattggtcggccggcattctgggtctgcgagaactcgcccgtgcaaaatccgtcagcaatcgcaacatcgtcgtcgttatgggcgatctcaactcgagcaccgaccacccgagcttccgcgcgttgctcaagtccggattcaaggacgcgagtctgattcaagccgccggaccgaacctcaccttcccgcgctggctcaagtggccgcgcatcgaactggaccatattctgttcacccaagggctcagaccgtccggcgtgacgtccttcgaagtgccggacaccgaccatctggctttggccgcaacgctcaccctgcggtagcgggcgcggcgatcgatcgggccttggccgtgtggcgcgaagcgggcgggaacgtctggaagacccccgcccgcagccgggtggttcgccgtcagaggtccatggagcggatcagattcaccatttcgatcgcgccctgcgcgcactcggaacccttgttccccgctttggtgccggcccgttcgatcgcctgttcgatggaatccgtcgtcagcacgccgaacagcaccggcacaccggtgtcgaggctggtctgcgcgattcccttcgagacctcgttgcacacgtaatcgtagtggctggtgctgccccgaatgaccgcgcccaggcagatgatcgcatcgtagcgcttgctcttggccatcttcgacgcgatcaggggtatctcaaaggcgcccggcacccaggccaccgctatgtcctgttcgcggacattctcccttttcagggtgtccagcgcccctgccagcagttttgaggtgatgaactcgttgaacctcgccacaacgatgcctatcgtgatgttttcggctaccagatcgccttcgaacgtgtgcatttattcctcctccatgttcaggatatgtcccatgcggtttttcttggttttgagatagaaactgtcgtaagcattggcttcgatttcgattggtattctgtcgcggatctccattccatagtcttccaattgatacactttgtcgggattgttggtcagcaggagcatggaccgtatccccaaatccctgagaatctgcgctccgatgtagtactccctcgcgtcaccggggaatcccaacgcgagattggcgtcgagcgtgtccatgccctcgtcctgcagacggtaggccttcagcttgttgaccagaccgatgccccgcccttcctgacgcatgtacagcagcacgcccgagccatgctccgcgatcgtccgcatcgccgcgtccaactgctgaccgcaatcgcaacgcaacgagccgaagacgtcaccggtcagacattccgaatgcacccggcacaacacatcggtcccatcgcccagattccccatgaccagcgcgacatgatgctcgccgttcaacctgttcacatagcagtgcgccgtgaattccccgtatcgcgtgggcatcgccacggtcgagacacattcgacgagcgtatcgtgcgctttcctgtattcctgcagttccttgatggtcaggagcgggatctgatgctcctgggcgaaccgggtcaggtcgggggtcctcatcatccggccatcgtcgtccatgatctcgcagcacaggccgcattcacgcaatcccgccaaccgcatgaggtcgacggtcgcctccgtgtgcccgttccgttccaggacgccgcccttcttcgccaccagggggaacatatgccccggtctgcggaaatcgaggggttccacgtcatcggagacgcacatgcgagccgtcaatccccgttcttcggcggagatgccggtcgtggtgccacggtaatcgatggacaccgtaaaagcggtttcatggttatcggtgttgtgctcgaccatgggcggaagcatcagcttgtgggccagttgctcgctcatgggcatgcagatcaatcccttggcgtgggttgccatgaaattgacgttccatgtggtggccgactgcgcggcacagatgagatccccctcgttctcccggtcctcgtcatcgatgaccagaacgagcttcccttcccgcagcgcctgcaacgccgcttgcaccgactgatggttcatgattcatgcatcctttctcagaacccgcaccgggacagcagatcctgcgtcagtcccgtccgggtcgtcatcatgttccgcacgtattttcccaatacgtcgttttcgagattgaccacgccgccgacccgtttctcgcccagcaccgtctgcgccaaggtgtgcgggatgatcgataccgagaagtccctttccgtgatctccgcgaccgtcaggctgatgccgtcgacggcgattgagcctttctcgacgatgccttcgagtatctcgtttcgcgccgcgatccggtaccacacggcattgccttcgcgccgcacggaggatatgctgcccgtgccgtcgatgtgcccggtgacgatatggccaccgaaccttccgttcaccggcagggcccgttccaggttgacgccgttcccgcggcgcaatacgccaagcgaggttctgcgccacgtctcattcatcacgtcgacggtgaagcgtcgccggtcgaaatcgacgaccgtcagacagatgccgttcaccgccatgctgtcgccgatatggaggtcctccatcacgttcgtggcatcgaccgacagcgtgcagttggcggcgctcctccgtatgtccgccaccgttccgacttcctccactattcccgtgaacatgaatacaccacctcgctttccaccagataatcctctcccactcgggagcaggcgcggggccggagcatgacggcgtcggaaggcagggcgactccttggccgcccaccgggcttttcgcggtgccgccgaatatcttcggcgcgatgtacacgtgcgcctcatcgacgatccgctgttcgagggcgctccaattcatcgcgctcccgccttccagcagcacgctgtccatccgcatatcccccaggcgccgcaccacgtccgccagatcgacgtggtcgcccttccttccgacggcgagtatttcgcagccgtgccgccggtagtcctccgccttgcgttcgtcatcgcaggcggtggcgatataggtcctgacgtcattcgccgtctgcacgatccgcgaggtgaggggcgtcctcaatcgcgtatcgcagacgacgcgaaccgggttccttccgtgtgccatgcggcatgtcagcaacgggtcgtcctcgatcaccgtgttcacccccaccatgaccgccgcgacggatcgacggagctgatggacccgacgcctcgactcctcgccgctgatccaccgtgattgattggtatgggtcgctatcttcccgtccatcgtcatggcgtatttcatgatgacatacggcgtatgcgtggtgatgtatttgctgaacacccgtatcagatgccggcactcgtcggccagcacccccacatcgacccgtatgccgtggtcttcgagcatgcgcacgcccttgccggacaccacgggattgcagtccaaggttccgacgacgacccttgcgatgccgctttccacgatcgcctccgtgcatggcggcgttttgccgtaatggcagcacggctcaagcgtgacgtacaacgtcgccccggcgggcgactgcgtgcaatgccgcaacgcgttcctctcggcgtgcaatccgccgaactcctcgtgatacccctgcccgatgatccgatcgtccttgacgatcaccgcgccgaccatgggattggggttcacgtatccggcccctcgcttcgccagctcgatcgcgagtcccatgtactgcgcatcgtccatgtacgcctccaagcatgttgcgcccatacgctatccaaggcatacaaaagaaggttcatgcgaacacgaaaacgccctgaaatgatatggcatcatttcagggcgtacgacgaagcatgaacgtactttcatcttctctcatccagactgtactgtcggctttggaatctcaccaaatcatgccttgcggctcgtgggctgtaccaccggtagggaatcgcaccctgccctgaagatagttattcgttttgcccgtgattgtactcgccgacgctccccctgtcaacggaagcggcctcacgcagcgcccgggccttctgcatcgtctcgtcgtactcgaagtcgaaatcggattccacggtgatgcctccgcccacgccgagcgacgtctcgcctccctcccgcacgatggtgcggatcacgacgttgaaatcgcaatcgcccgtatcggagaaatacccgatgctgcccgtgtacaatccccggggcgcgcgttcgagctcgtcgatgatctgcatggcgcgaaccttcggggcgccggtgatcgaaccggtggggaacgcggcgcgaaccgcgtccacggcgcaacgatccttgcgcagcgtcccctcgacggtcgcgacgagatggaatacggaaggatacgtctcgatggcaaagtcggggtccgtgccgacggaacccggttcgcagacgatcgacaggtcgttgcgttcgaggtccacgaccatcagcagttcgctgtggtccttctcgctgcgggcgagttcctctcggttcgcccgatcctcgtccggcgtgccgccgcgcggccgggtccccttgatgggccgcgtcaccacatgccccgagcgaatctccatgaaccgttccatgctcgaacagcacacgtcgagacccggtgcgcgcagataggcggaaaacggggccgggttgtgggtgcgcagataacggtagatggcataggggctcccggatgtctccaggcgcaggcgctgcgccatgttgacgacgtaggcgtcgccggcgcgcagatgatcgacgagacgggccagggcgtcgccgtacccggcccgcgtgaaatcggaggagcatggggcgagcgaacgtcggcgcgcgggatgaggggcgggcgggcatgaatccaccaggtcctgcgcccatgtcagggcgtgggcggccgtcatcgtccgcccctggcagcaacagaacaacgaccgcgaccggacgtcctcgatgagtagcaggtcgtagaagaccatgctcgcctccggtgtggccgcgacgggatcgtgcctagtcggcacgccgcacgattcgcggccgaaatcgtatcccagatacccgatcgcgcctcccgtgaggggcagacgcggatcgcgcgcgccatcgcagggtccaagccgcttcttcacgacatcgaggaaatcaccctccacggcaacgccgtcgacgaggcatccgccccgcccgtgttcgatcacaagataggggaagagtcccaggatcgagtagcgcccctgcgcccccggcatcgaggagtccaggaacgcgaagcgttcctcgccgcgcacgcgctccacgatgtcggcaagcggtcggaacgtcctgagcttgaacacctgcgcgctcaccggaactccttcgtctgcgcccgggcccgcgtccgcgccaccatgcgggcataggcgtcgttcacgtcgcgcgacacgctccccggttcgaattccacgccgccgataccggccacgggcatggcacccatcagggagttggtgaggaacacctcgtcggcccgaagcagctcgtcgggcatgatcgggcgttcgacggcccccgtgaacccgatcacggcatggcgcatgaccccgggcagcagaccgcaggagacgggaggcgtcacgacgtctcccccgatgacggcgaagatattggagacggccccttcggcgacctcgccccgcgtattgaggaacaacggctcgtcgacggcgcggtcacgggcgcgacgcttctccatgatgttttcggcatacgccaacgtcttcatgcgcgcgaggggagaggattcgttcctgcgcacatcggcgaagtcgcagcggaagacgcgcttcgcccccggcgcggcatacgggttgcgtctcaacgagacgacgcggttgcgctcggtgaccgtgagcttgagggccgaatcgtccgatgcgccgagtccggcgcatgcgcggagaaccatcgtctccagatcggcgcgacgcgcctcgatgccgaggtatcgcaacgtctcacccaaacgcgtcagatggtcgtccagaaacacgggcgcgccgccggataccgcgatggtctcgaaggcccccatgccgaagaagaatccgtcatccgcatccacacgcgcccgggcaccggggccgatcacgcactcacccatcgatcagcgccccctttcccgtctcgcactgccatcaatcaggctatcagtcatgaagacggtaggtgcgccgccgacacgccgtccgtccggcgattccgtgcgtcacgaccggaccgatgcgcaatatccggcttccgcgttacactagtacggttattcgcgcgcgcgtggcgccctctacaccccgagccgcgaggacacgtggattccggccggtcatgccccacatggcaaaccgagaacccgcacacctagcattacaaggagagccattttggcaaccaagattcgtctgaagcgacagggcaagaagttctacgccttctaccgtgtggtggtcgtcgattcccgcaagaagcgtgacggcaaggtcatcgaggagatcggtacctacaaccccaacaccccgccctcgaccatccagatcaagtcggaccgcgctcagtactggctcggcgtcggcgctcagccgtccgagcccgtcttcaagctgctgaacatcaccggcgactggcagaagtacaagggccttgaaggtgccgaaggcaccctgaagaccgttgaggctggcccggacgccgaggcccgcatcgcggccgttgagaaccaggctcagaagctgaaggccgccaaggccgaagctgccgccaaggccaaggctgaagccgaagccgctgccgccgctgaggaagccccggctgaagaggccgccgaagaagctccggccgaggcctgagcggaaacgaaaggctagctatgcttgcacaggctgtggaacacctcatcaagaacatcgttgattttcccgacgatgtttccgtcaagtcccatgagaacgcgcgcggcgaactgcttcgcgtacgcgtgaacccggaagacatcggccgtgtgatcggccgtggcggccgcaccgccaacgcgattcgcaccgtgattcaggcactgtctgaccacaaggtccgcgttgacatcatggacgtccgtcgataaccgataaggaacaattcacagcatggcacagcaagacatgcacgacgaccctcagcagctcgagttgctgagggtcgctcgtattggccgcgcacagggcctgaagggcgaagtcaccgtgcgcctgtacaccgatgatcccgagtggcgcttcgagccggactccgtgctctacagccaggatggcgagaccgagtacatcgtcgagggctcgcgcacgttcaaggatcgttggattctcaagcttgagggcgtcgacgaccgcaatgccgccgaggccctaaacggtgtcgaactctatggcgaggccgacgacgcagaagatatgctcgaagccgacgaatggtatcccaaggatcttattggccttgaggcccgtctagtcgagggcaacggtctgggactgcccgccggccaagtggtcggcaaagtggtggatgtggtcgactcccccgctcagtccctgctcaagattcgtttgaccgagccggtggtaaccggccagaattccaagggcgaggatgtggtcgagaagaccgcattggtcccgttcgtggaggccttggtccccgacatcgatctggaggagcaatacctcacgctcgatccgcccggcggtctgattccgggattgtaaacctcatatacgcgtgagaccaaaggactttctggctatttgttggcagaaagtccttttgcgtatgagcagaaacatcgagacgctaaaccttcctcattccggtatcgcatggcagataatcaatagtatactagtgaataaatgattttattcatggaaaactatatgttataacactcggagtatcgcaatgaagtatgtgcccaccaccaccaaacgcgatttacgcatcctaggcgaacagttctcgcaacagcgcaaactactgatgttgacggttgcggatgtagcacaccgctctggtgtcagcccgaccacagtgtcaaatctggagcaaggcaaggctgtccggtcagattcgctgttaaccatcgcgcgcgtgttgcaacttgctgacacactcgtagccgcatgcgacccctattccaccgatcttgggcgtctccgcgctggccaacaactcccgaagcgcgttcggaggtgaatccctgatggcaaaaactatcgaatcaactgtactgattacgctagggcctggaatggaagctcctgccggcacattgtatgcgactggcgacgacctatcgttccgctatgattcgacgtacacaatcagcagcgattccttcgacctcttcccatctatgccccgctcgctggccccattcttcttctctggacttggtccattttcggattccgccccagaccgttggggcagaaaggtgttttcccgcagtcttaaacggacgcgtgtcagcgagtcggaatatttgttcggcgtcaacgatctgacaagacagggtgccattcgattcattgttgatggcaagccagcggcaggagatgaaggagtacccgtactgtcaaagctgccggagttattggacactgcggatgcggtggaacagaaccgcgaggtaagtgatgtctccttacgcaggttgtatcgggcaaccggctcactcggaggcgcacgacctaaagcttcggtgtcggatcgtaatgcgctgtggctggccaaatttccgaaaccgaacggcgatgattgggatgttatcggctgggaagccgtcaccttggaaatcgcgaacatggccggcatcaaagtgcccgaacatcgcgtcattgcaataaaggattcggaggagagaagccggaccgtgctattgactcaccgttttgatcgcgtgtctgcaccatcagttgagcgaatggagcgattaccttatatatccgcaatgaccgcgctggaagcaagagatggggacggcggagactggttggatctagcagaatttacgcgtagggcaggaggagacaccatagagctatggcggagagcaatgtttggcgcggccatcggcaacactgatgaccatctacgaaaccacgggtatttgcgtaagaataattcctggcaattggcacccgcttttgacatgaatcctgaaccattcgatccgtcgctacccgactcacaccagatgtcattattaggtgacaccgaagtcgatatagataaattgatgtccgatgagagtctgtctttgttcggtgtaagccgtaaatatgcggatcattggttgccgacattgcgatcagccttatctcaggcattatctcgagcagcgatgcgccgcattgacatgcattccatcaatctgatggccgaacgttttgataaggcggttcatgctctgcagtagagcgatggggatctaccgcaaactgttactcgtctcgtggctccggcctcggtatgtctctggtatcgcttaaaaagtcgcggcggtcctcataccggagagcaacgattgcgatgactgcgtggccgacacgtcatacggcagctgattggcatcggactgctaaaggtcagttcaggcagatgacaaagttccgagaattctttccttacgttttctccatcggttacaggcacgttcgatacgtttatagccaattagctcggacggcaccaaatgaaaaatccttgcctacttccctattcgagcatccccaaaagggcacgccaccgctgcaatggcgtgccccgaatagagcgccgctgggctcagagcgcagagaagccctcttcggcaatcatgcgcatccagatattgagatgccagtcctgatcattggccaatgggtcggcctgatgcatggaccgcccatcgacgttggagggaaacacataggcacacgtggcggaaccatccgcgccatagttcgccatattggcctcgaaaatcgccttggccaaatcatcggtacgtgcggagcgcctttcttgcggcaaccgtgccagcacttcggcggtcaacgtggaccaataatgagggaacacatcaccgaattgtcggttgatgccgaaccaatacccatcccaatgtcgaatcgccacaccgtagagacgcgagtccggctgcgggccgctgaacgccaatagccaatccaatcgctccacggcaccatccaggtattcggcgcgcccggtaatgcgatgcgcttccaacagcagactcaccaacggcgcagtgatggactgttcgtaagacacctcatggtagggcaggtcgatacccaatcccaggaagtagtccgcactgaccaccacacgatcgagcagacgttgggtctcctcggttcgcccggtctgcttaagcacacgcgccaaggccgcactggattcggcgaactcgatgctcaggaagtgttcgccgccaatttcggccgcccgatcggcgatgttcaccgccatatcgagatcgtgcgcatccttggtggccagataatgttcggtgaagaaactgataatccacgggcagtcatagatacggcctccgaatttggattccggcagccccgagccgcgacgtaccgcgccgctggcgtcgatgagcgcggactcggcgaacgtgcgccacgcatcggcggcacgctgggccggctctcgtagggactcgtcaagcagcccaagattcagcgcacgttgtagcaataccggcatggcgatacgctcggaaccatccgaccagtcatcccaactgggatccagcacatgctgtccggtgcgggtatcggtagccacgatggccccagccaacgcgccgacgcgctcatacgccacctgatgctccaggatgtatcgcgcacggtcgttgacggtatccctcaacgtcttgtggaagagtacttcggtatgtgcacgatggtctccatccacaagctgcagttggtaggtacccgcctgttcggccgtcaaccgaactccgctcacagtccgttcgacggtaagaccgtcatccagcgccgtaacagcacgattcgtggcgatatcgatatgcccgcccacagtggcgcttaacgaggagaacgatgcaggagcaatcgtagcggccaggaatgcatcctcgtccgcataccatcccagttcccacgtcagcgcatacgaggcccccggctccagcgtgatggtcggctgcccgccgaacgcatcaggattcagcgcataatcggtgacctgcagcacgatgtgcccgcggatatccgaatacgtgacctggttacgcgattggatggcataggcattgattgcgccttccgtaacgatcagccccaagcgcgcaccgcggccgtccatcggctcggccagcacccagctccagtcgcctcccgcgaatatatgcgcatgcacacattccctcaacgctttgcgagcgcccggataccggtcgttcaatggggtctggatgcccaagcctgtgatggtcaccggctggttcgaaacgttgcgccattcataacgctcggtcagccgttcgccgctactgcgggtaacgtccaggacgagtcccgcaccgcacagtgcgaacgtctgctgttccagaccattggttatgccatatacctgcggcgtgttccactgcgagccaccactggtagtgaccacatagccgctgccccaatactggtccgatgtgtgccaagagacactgtcgtccagcagataatgacgattgggattatcttcgttcacaaaagcgatgggagcaccggtggattgatccagaagaacctggccattgccgaacggcagcgaacttccagcgaattgagagaaatccgttgaggcaccgacttctgcagtagcacgttcgatagcggcttgctgtgcagcattctgtacgtcactcatgactgatctcatttcgtcctcagcccttaacggagccggcaaccaacccggagacaatccacttctggcagaagcagaagaaaatgaacaccggaaccagggcaagcaccgtgatggtcatgaacagaggccagttcgtggagaactgctgcacggcgttgtatacctgcagcacgacggtctggttatccgtggagctgaggaacacactcggcaggaggaagtcgttccaagtgcccatggtttggaatacgacgacggtggtcaatattggggtgatcagcggcaacacgatgcgcgagtagatgcgccatgggccggcaccgtcgattttggccgcttcgaacaattcctgtggcagggacttcatgtagccgacgatcaggaagtagcagaacacacacgagcccatatacagcacaatcaagccaagcagcgaatccacaagtccggtctcggactccatgcggtacagcggcagcattgtggcctgcacaggaatggcgaaggtgaccatcagtacgccaccgacgatggcggtgaacttggatttcttgtataccacgccgaatgcggccatcgaaccgaccagaacctgcagcagcaccgccaccacggtgacaatcagcgtgttgacgaacgcacgaatgatggtgccgtcggcgaaggcctccttgtagttctccagcgtccactgctccggaagccccaatgggttcttgatcatatcgattgaggtcttgaaggagctgacgatcacatagtacagtggcacggcgcaaatcagggccaggccaagcaccacgatggtgcgaaagattttgcgaacgagttcacgctgagacggtgtcattggaacctcttttccacggcgttggcaatgccggtctgcgcggcgatgacgagaatgcaggcgatggtgaagcatacggacaacgccgagcccagtccgtactgactttggccgatacctttgaggatgatggcctgggacagcgtattggtggcgtatccggggccaccgccggtcaaggtgtacggcagatcgtagattttcagtccgccggtcatcaagaggaacatcgagacgacgatgccggggatgagctgcggcagagtgatatggaagaactgctgacgggaattggcaccgtcgacacgagcctgttcgtacaggtccgccgggatggtttgcagataggcgaggtacagggtggcgtgccagccgacctgcatccatacggccacgaaaatcacgcagaaccgggcccaattgtcatcggccagccaagggatattcggtataccgaataccgcgatgactttgttcatcacaccggaacccagtggagagaagatgtactgccaaattagaccaatgatggcctgcgccgggacaccaaggaagaagaacagcgaacgggcgaagctacgtccccacatggctttgttgagggtcacggccagcggaatggcgaaacaggtgaccaacagtgtggtgccgaaggcatacagcagggtgaagcccagggcggatagcagcgacgggtccttgaagatcgcagcgtagttgctgaaggccacgaagctgaagttttcggagtatccgtcgtaatcggtcagtgaatagaagaacgactgtgccaacggcacgacggtaaggatgaagaagatgatgatgattggcagaagaaaccagaatgaggagaggttttccgcccataaggatgatgcacgcttggattttggtttggaagcatgcccaatggttgcagcggtcatgggaagtccttgagaattatggtcgatttgacatagcaaggccgtgcctgccgccgaacgggcgatcggcacggccttgtcaggaggagagaaaggaactggtggtgtgatgggttacttcagcgtcgcccacttggcgtcgagagccttggcagcctccttggcggaaatctggccctgcacgatcttctgctgctgggcgatgtcctcggtggacatcaccgtaggggacttcggccagttgacccagtagaacttgttctgcttgaagtagttatccactacatccttcagttcggcaggaggttcggcattgtacttgctcgacagcgacagggtgccagcggcagaggtaaacgcctcgaggccctcttcgctgttgagataggcaaggaactttttggctgcggccttctccttgtcggaggccttggacgcgatggcgaagccttggtcggggccaccgttgatccactggccgtcttccttgctgtaggccgggaacggtgccacgccgaagtcgatgtctgacttctgcagatcaggcagatcccatggaccggagcgcatgacgccaagattgccgctcacgaattcctgcttgacctgatcggccgacagaccaacggatttctgaggaattacaccggccttggcggcagcttcccatctcttgaataccggagtccagtccttggtgaaagtggacttgccggaccagatgtccgcgtcaagatcgccggacttaccctgctcgccgtaatagctagccagcaagccggtgaacgagccagcgatctgagtattgaagtcctccaggaaagcggtgcttccgttggagttgatcttcttacccatctcgatgaattcatcccaggtcttggggaatttatcgcatccggccttcttgagaatgtctttgttgtagaagaacgcgcccacccatgcggaaaccggcatgccgtaggtcttgccatcctgctggaacaaggcgaagtttgtgtcgtcgatgccatcgaggaaatcctcgccggagatgtccaacgcggcaccggatttcatgacatcggtacggttatccatcgtcagattgaagatggtcggcggcttgccaccagcaagacgggtttgcagtgtcgagatgtactgtgccggatcctggccatactgcacgtcgagggtaatgtcggggttcttcttctcgaaccccttgacgacctcaccaatctggttgtccttgaagtaggaatagaacgaaatcttggttttcccgccacctgcggtaccggaaccgcatgcggccatcggcacgaccatggctgccgtagcggccaccgccacggctgactttagggcgaacttctttgtattacccctcatacctaagtcctttcaattagttatacgcttcaatattgatgcgcataaatgaatatatcattgaacctgacgcacgcaacaccggcgtgttgatgcgcataaactacgcgacgtcaagaaccgcacgaggccgagaatcggacatattccttagctgcggatggtgatatgcggagaaaccagcaatctttcaccagttttatgtccatcgatccgatcgaacagtagctccatggcggctttggagacggactgcggcactggatccacattatccaccggcacgcgcaactcttcgtcatgaccatccacatacaccgcgaccagggaaaaatcacgtccaggctgaatctgcatttccacacaaagctgcagcagcgaatctaacgcatgaggggtgcgcactgcaataccgccatggcattgagccattcgcttcaattcatccttcatcgcccagatgcctctccatcctttttcacgcgggatgaatatctcatattccatgcccagcacttgagccaccacacgagattcgctggcgaagaacttagcaaacgcataacggtcgagacttcttccccagtccccaacaaggaccatccgctgcgcccctcgttccgccaaacgattgacggccatctgcgccactcgacgataatccacatcaacgcacggcaggccatgtgcgttttctggcgtacccaccagcacaacgggaatatccaatcgcgctatctcaggcaggcgttcatcatgccactcgacgtcgaacaccaagacgccatcgaccacgccttgacgcaccatacggcacagtccctcaatcccctcgtcggccggaacgagcatcacactagacccccgctttctcgcctcctccatgattaccaccaggaacgggcgaagctcggccaaatcggtattctcatccatatgcaccagcacaccgatgacaccgaccttgccacccgccaacgatcgcgcattgatattgggaacataccccaactcatccatggccttgcgcacccgttttttggtggcttcggaaatgggcctgctaccgctcatcacatatgacaccgtggcctgagacaccccggcgcgctttgccacatcccttgcagtaaccatccatacacctcgtcgcttgccgcccgtcaccgtagatcaggcatggaacattcaccctccagcatattgaagtgtataaacatatgcacaccgaccgatgccatcccgcatatacacgacgacgaatcgtaccgctagttatccacagggttatccacacaccatgtggatcaccccggaagctagaaccgcattgtccgcactactaaccgacgcttcagcaaccgacacgaccgccaaagcataagcgtttacccacgagccgcggcggtgacgcgggtcatgaaacggtcgaggaattccggcacgttgacgcccaatgcgacttgggtgtgtttgtcggggtcctggagccgtgaacgatcaccaatggtgcggccacggaacgggccctcgagatcgacctgtaagttgaacccgaacgtggtgaccaatgatgggtcgagcgcggcggccacggccagcgggtcgtgcagtccacatccgcgaatctccggctggttcttcaggtagaagtcgatgtagtagtcggtcatggtgacgaggaagtcgccggccggcgtccccagagacgcccattcatgggctttctcacgggtgagcgcggtctggtgggtcacgtcgaggccgatcatggtggtgcgtgcgccacacttgaacagatagtctgctgactctgggtcttgggagatgttcgcttcggcggccgggcttacattgccgggcagcgtcaacgcaccgcccatcaacgtcacgttcacgccggaatccttcaggtccggagcgttgcggaatacggtggccatggtggtcatcgcgcccgtaggtacgatggtcaggtccgggccgtattcgcgcgcggcggcgatgatgaaatcgaccgccgagcctggtgcttccggagcgcgcggggagtcggggatgattgcgccgccgatgccgttgggatggtggaccgccaccgagccgggagttggtgcccacgaagcgtccgtttgccagccgtccgcgccgccgttctgccagcgcgcgtaggcctgggtccgctcgtctggtgtggtgccacgcattttcggcaatgttgccggggcgatgggatggtcgactccgggatagaccggaacgtcgtcacggccgaacaagtgcaccaccgccagcgcgttgcgcgcggccagcggcaccgcgacattgccgtaggtggccgtgataccgatcagatcgatctcgtcggcactgcctagggcatatgcgatggcgagcgcgtcatcgatgccggtatcgaggtcgaggatgagttttttgcgcatggcggttccttcaagacgaatcaatcctcccgaatttgtgacgttaagccaacgtcagcggcacaaattcgggaggatggggaatgggcaatcagccgagcttggcgagctcttcgggggtgagttcgagctggtcggccttgagggagtcgaggatggtctcggggtggtgggcgccgggaatcacgaacatgtggtcgcccttggcgagctcccatgccagcacgacctgctggtagctcacgccgtgggccgccgcgacctcgcggaacgggtcgaacttggtctcatcataggggtgacggtagccgccgagcgggctccagcacacgaaggccagaccgaccttggcgcagtagtcgagcgtgtcctgggtctccaggtgaatcggcgagtactggttctgcacggccacgagcttgtcgcccagaatgccgcgcgcaatgtcgatttgctcgatggaggcgttggagataccggcctcctgcgccacgcccgcgtccaccagctgcttgatggcttcgacggactcgttgtacggcaccttcgggtccgggcggtggaagtacagcaggtcgatggtgtccacgccgagcgccagtgcgctctccttgccgcgccgaatcaggttctccgggcgaccgtccacatcccacgtggggcggccgtcggtgaagttgcggaagtggcccaccttggtggccaccagcacctcgtccttcggccccttccaggtctcaagggcctcgcgcaccagcttttcaccggtctgctcctcgccgccggagcagtagtaggcccaagcggtgtcgatgtggcggcagccggcgtccagcgaggcatgcagggtttcgatgccgacctcatggccgcggttgttttcgatggtcagcggcatttcgccgtggccgatggcggtggtggagaacggtccgaggttacggaacaatgccatggtgattcccttcgtgaaacttatggaaactcgatatccacaatcaagcctaagcatcccgttggatttcacactctcggcctgcccgcacaatcaatctatgaaatttccgcaacttcacggaatagaaaacgcaacttactcatacccagttcagcgaaaacgaggagccggaaccccatggattccggctgttccgctgatagatcagtggcctcgtctgagactcattcccagcaataccagtgcggcaatgatgatggccgtcgaccgccactgtccaacttgattggccagggcgatcaacaggccggtcatcagaccttcccggtattgccggtcttgtctcggacggttgtcatggttgttgcctaccgtgagaacctcctcttgaattttgagacgtcattatgccggttgacacaacgacaccgcgccaaagtggcacgctagtagaccttggtttggtcagtccagtgtactggtgagcttcggtggaggctggtatgctgtgttgtagcagaaaggtcacgctagcttcgaggcaatcttctcggcggcgccacagactttcgccccgttggacccaactgccgaggtttcctcaacctcagttgttaccagaaaggtccctggctggtgatcgcagtcagggacgttttactttttccgattcc

SEQ ID NO: 3702 - DNA, 118999 bp, Unknown
  R150_10m  MAG No. k141_4632
agccgattgggaagacgtcgaagacacccttctgctcgccgatgttggcgcggaagccagcgaacagctcgtcgaggaactacgcaacgacgcccgaatcgcaggccagtccgatccggccgaagtgcgcgcggcgctgaaagacaaactgctcaagctcgtcggcactgacatcgaccgccggctcaacgccgacaaggacggcgcgaacaagccgagcgtcgtcatcatggtcggtgtgaacggcaccggcaaaaccaccaccgcgggcaagctttcccgcctgcttgtttccgaaggcaagcaggtcatgctgggcgccgccgataccttccgcgcggcggccgccgaccagttggaaacctggggcgccaaggtcggcgttccggtcgtccgctccgacaaggacggtgccgacccggcatccgtcgccttcgaggcatccgccaaggccaaggaagcgaacgcggacgtgctcatcatcgacaccgccggccgactgcagaacaagtcgaacctgatggacgagctcggcaagattcgccgcgtcaccgaaaagaacctgccggtggacgaggtgctgctcgtgctcgacgccaccaccggccaatacggcatggcccaggccaaggtgttcgccgaagccatcggcattaccggtgtggtgctctccaagcttgacggttccgccaagggcggcatcgtgatcagcgtgcagaaggagctcggcgtgccggtcaagctcgtcggtcttggcgaaggcccggacgatttggcacctttcgatcctgaaggtttcgtggacggcattctcgcgtaagccaacgtccacgttgtgagagcgcaaaacgcgcgacttacctataaaccaagccccgaatcatgctcgaaacatggtcggggcttcgtcatatccgttggaatcgcgccaaaatttcctcgagcggtcgcacgtacgcttccagccacgcttaacaatcgcgtaacttggcgtaacgaaaccaaaacgagaccggctttaactgacaaactgttagcccccataagggggacggcattgtagagacaaataagacgccggccgcacaaagcccccggtgccatgaacgaaagagagggaggtagacatgggagcgattgattccggtaacaccgcatggattctgacatccgcgtccttggttttcctcatgacgcctggtgtggcgttcttctacggcggtatggttcgcgccaaggccgtactgaacatgctgatgcttgaggcggccgcgctgtcggtcaccatgattatttggactttgtggggttggtccatcgcatacgccggttccgacatcggaggcatcttcggcgatccggccagcggcttcctgctgaaggactccatggtcgcgcaggacggcgtgttcaccgccaccggtctgaacggcaacaactacccggtttccgtggacgtcgccttccaggtcgccttcgcgatgattaccgtaggcctgatctgtggcgccatcgccgagcgtgtgaagtacagcacctggatgatcttcgtggcgctgtgggttaccttcgactacgctcctatggcccacatggtctggaacggtggtctgctgtctgctgacggcgccatctccaaggctatcggcgcggccgcccacgatttcgcaggtggtaccgtggtgcacatcaacgccgcagtcgccgccctgattatcgtgctcatcatcggcaagcgtaagggcttcggcacgcagccgttccgcccgcacaacgtgccgttcgtgatgctcggcgccttcctgctgtggttcggctggttcggcttcaacgctggttccgccttcgccgccaacggcaccgctggctacgcttgggtctccacttccgccgccactgccgctgccatgctctcctggggcttcaccgagaagattcgctccggccactacaccgctatgggtgccgcctcgggtatggtcgccggtctggttgccatcaccccggccgccgatgtggtttccccgctgtgggccatcgtgatgggtgccatcgctggtgttctgacctgcctggcctgcggtctcaagttcaagttcggctacgatgactccctcgacgtcgtcggcgtgcatggcgttggtggtttcaccggtactgtcctcgtcggcttcttcggcgaaggcaccggcctgctggctggcggcgactggaagcagctcgtcgttcagctggtcatcgctctcgtcgccatcctctactccgcggtgatcaccgcgatcatcgccttcgctctggagaagaccatcggttggcgcgtcaccgaagctcaggaagtcggcggcatcgatcttgccgaccagggcgaacgtgcttacgattttgctggtactgccagctctgttctcaaggaggtgaggtgagatgaagctcatcaccgctatcatccagccccataagctcgacgacgtcaaggaggccctcgcggccgccggagtgcacggtctgaccgtgtccgaggccaacggctacggccgtcagcgcggccacaccgaggtctaccgtggcgctgagtacaccgtggacctgattccgaagattcgcgttgaagtgctgtccgatgacgcggatgccgagacgctggtcggtgtgatcatcaagtccgccggcaccggcaccatcggtgacggcaaggtgtgggtcgctccgctggactccgtggcccgcgtgcgtaccggtgagaccggttccgccgcgatctgataacacagacgtccatgcctagaaggggatggactgcatgggaaaggtccccgcacgccgcgaattgacgccgtgcggggacctttttggcaatgaaagatgaagcaatgacttcagcagtagatggcttgaaacaacgattcatggatatgagccagccggatgacgatggtgtctaccggaatggtgcgaccaagcgtaaagcccgcacggaactggccatgcaatgcctcacggagctgtggaatgcggcctgcaaggatgtctctttccccgtgcccgactccggcatcggcttcgccgcggtaggctcgctggcacgtggtcaactgggccccagctccgacctcgacttggtcatcatctacgagcctcgcacgttgaacgaccagcagctcaacgagttggccaacaaactctggtacccgctatgggacagcggtctggacctcgaccactccatccgcacgcgcgcccaatgcgaggaagtcaccgaccatgaccttcccgccgccatgggctggctggacgtgaagcccatcgccggcgacactgctctgattaccaccaccgccacatccatcctcgaacgctggcgcaaggccgcccgcaagcgcctgcccgaactgctcgactccgccaaagcccgactcgacgaattcggccgcctccaatacgtcaatcagcccgacatcaaggagacccgtgggggtttgcgcgattcggtgctcgtctccgcgctcgccgtctcatggctggccgaccgcccgcacggcatctacgacgaagccgtggaacgtctgctcgacgtacgcgactgcatccatctggtggccggcaaggataccaacctgatgctgacgccctatcaggccaaagtggctgccatgcttggccttgccgatccgacttggcccgaaaacgagcgtgccgcctactcgatcgacgatttgcagacgctgcttgcccgtatcggccggcgcatctccttctcgcttgattccaccgcatcccgcgctggacattcgctgacccacgaaaagccgcgattcgcgttcttccagatgttctctcagcgctctggcggcaagcgtgaagccccgcaattcgacgtggtggctcccggcgtggccaagcacgaaggcgaattggtgttggcacccggtgccgagcctgccaaggatgccaagctggcgttgcgtatggccgtggcggccggcgaattcggtttgcccatcaatccgtctaccttggttaatctgaagcactgcccgattcacgacaaccagtgggatgacgaatcgcgcgagctgtttattcgcctgcttgcatgcgggccgaatcttatggaagtgtgggagagcatcgacttcgtggacattccgggtcgatggatgccggaatggctcggcgtccgcaaccgtccgtccgcctcggccgcccaccggtacaccatcgatcggcatatggtggaggtcacgtcgcgtctgggtcgtgagacaccgtccgggggacggtatgatgacgatcatttcaaggcgttgctgttggccggtattacccatgacatcggcaagcgcgcgttcgtggccgatcacgccgccgagggtgcccgccatgtgccggtgattctcaagcgtatgggctacgcgccggacatcgtcgactgggccaccgtgctggtgcgtgagcatttgaccctatccgaatttgccacgggtaaggacccctatgatccggccgtggcggaggagttggccgaccgcttgcaccacgacaagatgctgttggatatgctgttcgacctgacccgggccgacggctcctcgctcggtgccaccgccggtgagaccatcaccaagcaatacggctggtccaagtggcgcgaacaaatcgtgcgcggcatgtattccgccgctcgcgccgcgatgtaaacggaatcgcccagcacttcgcgcggccgatacctacttcatccatgcgtccgagcgcacgcgcagcccgttggacaggccgcgcccgcccatgagcaccacgttgaacgcggcccagagcacggcggtacgcatcaggtcgctcgtcagcgccggcgtcaccatattggccagtatgagtatgagcgtcacatacaccacggcggtcagcgtgcaggtgcctgccagatagcggtagtcgcgcgcgccgataagaatgccgtcgattgccatcatccagccttgcagtgggaagaagatgcccatcgtcaccatgccaacggcaatcaacgtctgaatatttggcgtaggggagaagaagtgcccggcgaacaggccgactaccgcaaaagccgtgccgattaccgcgccggtgaccagccccgcacgcccggtcgcccgcgtcaaccgccgcgcctgctgcacgctgccagcgcccagcgttgtggccaccagcgtctggccggcgatgcccacggaatccagcatgttcatcgcaaaattccaagaggagttcacggcctgaaacccggccaacacggcagtacccatgcgcgcggcacaggcgaccgtagccaccatggccgcacgaatcgccaatgtacgaatgaacaatggcagtccgtcgcccccggctgccgcaataccggccaaacgaggccgcagactcgcaccgtccgcccgggaccacagaatggcggggattaccaggaacagccccatgaaccactgagctatcagcgtcgccactccggagccggcaatgccccaattcagcacaataacgaacaacacatcaagcgccgtgttcaccaccgcgccgcccaccgcagcgatcagcgtgatacgaaccttctgcaatcctcggaaaatgccgttcgccgcatataccatcagcatgcctggcgcacccagcacgattgcgcgcgtataggtcacggcttgttccaacacttcgccctgaccgcccagtgcccggcataatggctcggcagccgcgaacaatcccaatcccagtacggtgccgatgctcaaggccagccacaggccgtcaatgcctgcctgcagtccctcgcgacgacgacccgctcccagcagatgcgccacctgcgcagtggtcgagtaggccaggaatatgcacagtccgactgccgtgaggatgatggtcgatccgatggacagtccggccaaagcggcatcgccaatgtgaccgacgatggcggtgtcaataaggataaaagtcggttctgcgatgagctgcccaaaagtcggtagcgccaacgcaatgatttggcgatgaatgctggtggagttgctatgcacgctcacacgcatatcatgcttagctacgttgcgcaagcacctagtgcagccgtacaaagttatcctcagcttgtccaccaagttatccccaatatgtggataaatgagtggattatccccagacttatccccaaaatgtggataactattttttctatccacatttgacgcttcagcgtgtcgccgcgctgaccgcaaggtgaaccaacgatgaaattggtgcgcgatgattcggcacgacttgcactttcatgcgttcattaggtcgattgtgcattcattaggtcggtggactttaagagatattgatcgagcgcctcagaatgccgccattccaagcgcatggtttgtggtgttaccaagcacagtgacctaatgagtgaggaatcgacctaatgaacgtagtcgtgcgatatcttccgctcgccacgccacctcctatacttgagggctatggcagaaggaagtgaacactcgtatcagaatgggttcggcagtggctcggatcgtggcgatcgtggcgaccgcgcgggccggggcggcgcgcaggcggcggcagctggcgacccgattttcgaccgcgtgcccccgcacgatgacgacgcggaaatggccgtgctcggcggcatgctgatgagtaaggatgccatcggcgaagtttcgcagaccattgacgtcaccgatttctaccagcccaagcatcagacgatctataacgcgatcatcgatctgttttccgccagtcagccggtggacgtggtgctcgtggccaaccagctgttggcggatggcaacctcgacaaggtcggcggcgcggactatctgcacagcctcgtcgcatccgtaccgaccgccgccaatgccatgtactacgcggagatcgtccatcagcgggccattttgcgcaatgtgatcgccgccggcaccaaaatcgcccagctcggttattccgccgagggatcgcaggctgaggatgtggttaacctcgcccagtccgagatctacgagatgtcgatgggcaaggtgcgtcaggactatgccgccatcggcccggtggtccacgacgcgctcgaccagctggacaaactgcagcagggtctcgtcaacaagggcgtgccgaccggattccgcgacatcgacgacgtgacccagggcctgcagcccggacagatggtcgtcgtcgcaggacgtccggccatgggtaagtccacgctcggcatcgacttcgcccgcgccgccgcgttgcaccacaacatgacttccgtggtcttcagcttggagatgagcaaggtggagctcgctcagcgtattatctccgccgaaaccaatattccgatggccgccctgcgccgcgccgacgacatcacccccgaacgctggaacaccctgaaccagttctggaccaagatgcagaatgcgccactgttcattgacgacagcccgaacatgagcctcatggagatccgtgcgaaatgccgtcgtctgaagcagaccaacgatctgaagctcgtggtcatcgactacctgcagctgatgacctcgggcaaggccgtggaatcccgtcagcaagaggtgtccgaattctcccgtgccctgaagctcttggccaaggaactcgaagtgccggttgtggccttgtcccagctgaaccgtggcccggaaatgcgtaacgacaagaagccgcagctctccgacctgcgtgaatccggctcaatcgaacaggacgccgacgtggtgttcctggtccaccgccctgacttctacgacaaggaagaccgccccggcgaggccgatatcatcatggccaagcaccgtaacggcccgaccgaaaccttccacctcgccttcctcggtgccacgtccaaattcaaggacatgccgcaggactacaacagcaatcagggggtgtgatgatggcaagcaacgtttcacgcgatgtttcgcaagaccaatcgtccgtggtgcagacccgcaaaccgtggtatgcgttcgccaccgtggccgcaggccgcttcgtgcggtttgcatcccgcgtcaccaaacatggcggttcggctttgcccggcaaagtcgtagaaaagattgaccccggcttcctgacccgtacgctcgggcagttgccgcttggcgtggtattggtgtccggcacgaacggcaagaccaccaccacccgcatggtcgcctcgatgctctccgatctgggattgaaggtgttcaccaatccgaccggctcgaacttcgtgcgcggcgtggtctccgcactgctcaccgaagtcactttcggcggcaaattggacgcggacatcgccgtactcgagctcgatgaggcgtacgccgtccacttcgtcaagcaggtcaagccccgttatgcgttgctgctgaacgtgatgcgcgatcagcttgaccgattcggtgaaatcgacaccacggccaaactgctcagccatgtggctgcggcgactaccggcactgtggtactgaaccgcgaggacccgcgtatcgccgcgctcgccgcgaaggccccggctggcaccacagtgcgatacttcggcctcgccgacgatttgcgccactatttcccgtccgatgacgacatggccacgaccgtgtcggtggaaggtatggccgggccgctcccttcagtcagtactcccctcagtccgcttcgcggacagctcccctcggagaggggagcttccgcaggcacggcagaactccccgccgacgtgacacttaccgccgtgggcgaccacaaggccaccttccagatggacagccaggactacgccaccgacgtcaaacttgaaggcgtctacaacctgtacaacgcggccgccgcgctcgccgtggtacgtgcggtgatgcaagacaatgccgccgcatccaaggccactgccgcagccaacgcctgcgccgtgtccgccgacgagctcatcgccgccgtttcccgcgtcacgccggctttcggccgtggcgaggtcatcgacgtcaacggttccccggtcgaactgctgctggtcaagaacccgatgggcttccgcctctcgctcgccagcttcgacccggccaacgcggacaccatgatcgccatcaacgacgaatatgccgacggccgcgacatgagctggctatgggacgtggacttcacctctttgcgcgcgtccggtgtcgccatggtctccggcgtgcgcgcctgggacatggcactgcgcttggggtatgaccaagtgccagtcgccgatacgaacaccgacctcgaacaggctgtcaccgcattcgtcaacgccaatcccggcacacgcaagcacatctactgcacctacaccgccatgctcaaaacccgtgccgtactgggccgcatcaccgaagtacgggatgcgggcgtgggcaagtaaccaccctctagcgcccgcgcgccacctctcgcctgcgggaggacatggtgaggaataagacttccccttagcgggaagacatcgacaaggagaacgcgacatggccagaacaatcgatgtggtgtccctgtatcccaacgacatgaacatctacggcgattccggcaacgtgctgactatccgccgccgtctggaactgtacggttacgaaccggtcgtccaccagtacaatcaaggcgacgactggcccgaccaggtggaccttattctgggaggcggcggccaagacaccggccagaagaaaatcatcgacgacttctaccatcgcgccgacctgctgcgctcgcttgccgcagacggtacgccgatgctgatgatctgcggcctgtaccagctgttcggcgagtactttgaaaccgtggacggcacccgtctggatggcatcggcgttatcggtgcttataccgtgggccagaacgtgcgtatgatcggcaatcttgttgagcattccgaccagttcggcgatgtgattggctacgagaaccactccggccagaccttcctgcgcgaaggcgttcagccactcggcaccgtcgatcaggacggccgaggcaacaatggcgaagaccataccgagggcgcgcgcgtgcacaacgtgatcggcacctacatgcacggctcgttgctgcctaaaaaccccgccatcagcgatttccttatcgaaaccgccgtgactcgtcgttacggtacgttcgatacgtccgatcagacccccgaacaagccaaggagctcgcccggatcgatcaagtagccaccaacgcgcgcaaggctgccgccgaacgtcctcggtgaattctcggtgagtcctcggtaagtaccaatcagcgaaaaatcagtcgaaatcagtctgagggtctagtacattgccctgttgtttgcgctaggcttggtggtacgagacatggcaccaggccatgtcggacctcgaaggaggggtatcatggctgattttgatcttctgggtgatggcctgcgcaaggtcctgctggcgggcatcggagcccttgccaccggatatgagaagagcagcgagctcgtcgacgaactcgtcaagaagggtgagattacggtcgagcagggcaaggcgctgaacaccgagctcaagcgcaaggtgagcgagacggtggatgacgccaagaaggccgccgccgaagccggcgacaaagctgctgccgcagccgacaccagtgccgccgacaagcccgctgacgagggcaaggccgagtgaccaagcccacacgcactacgccggaatcagagtcgaccccgctttccagcagggtcgaccctattctgacgcctgcgaaagccgaacgtgaggcggcggcgaaccggtccgtcgacacgccggacacgctcaagcgggccgttaccaaggcgactccgagcgtatccgacgaaacgctggcactgttcggacgcaggaacgatttcgccacgcgctaccatctgacgcgccgtggcaagatcaaacgactggggcagatcaccagaatcgtcgagcaattcgacgtgctgcacggtctgactccggtcaagatgcgcctcatgttcgaggcgctcggccccacgttcgtcaaagtgggccagattctgtcgatgcgctccgagattctgccgcaaagcttctgcgacgaactcgccaaactgcgcgccgacgccgacccgatgccgtattccacggtgttggatgtgcttgccgccgaatacgggcgtcccgccgacgaggtgttcgcgcatatcgatcccaagccgttgggctctgcttcactggcgcaagtgcatcgcgccacgctgaaaaccggcgaagatgtggccattaaagtgcagcgcccgggtgtgcgcgaaatcatggcccaggacgtctccatcatgcgctccatagccaaggccgccactaaggtgattcgcacctcgcagatcgtggatctgaagggcgtggtcgaggagctgtgggacaccttcgaatcggagactgactttctgatcgaggcccgcaatctcgccgaattcaagcgtttcgccgcccgattcaaatacatggactgcccgacggtgtacgccgaactgtgcaccgagcatgtggtggtcatggagtacatcgacggcatctccgtctcccacccgggccagctcatcgacgccggttatgacttgaaggagatcggcaccaagctcgtcgacaattacgccacacagattctcgacgacggcttcttccacgccgacccacatcccggcaatatcctcatccggggcggccagatcgtacttatcgacctcggtatgaccggtcggctcgaccagcgcacccgtgcagtcctcaaagaaatgattttcgccgtcgccaaacaggattcgcccgctctggccgaggggctgctgcgattcgccggcaccgaggccgatccggaggactacccagcactgctggctgatctggacgtgatcgtcaaggaattcggcaccgtggatctggccgaactggacatcgccgccttcctgaccgcgctgacgcagatggccggccgccacaacatcgaggtgcccagtacggtgaccaccgtcggccgcgcgttggttacgctcgaaggcttgctggacgagttcattcctgatgtgaatatgatcgaaatcatttccgaccatatcgccacgtcgaaatcgctgaagaacgccaccaaagacgagatcaagtcgctgggcgttgaggggcatcaggctttgcatgccacgctcggcaccatgactgaactcaagaccgtggcccgtatgctgacccgtggtcagttgcgcgtcaacatggaactggtcggctccgaagagccgttccagctgctttcggatatggcgaatcgtctgacgatggccctgattgtggtcggtttgttcgttggctcgtcgattgtctactacgccggcatgaagccgattatcttcggcattccggtcatcggcttcatgggctacgtcgtggccttcgcccttggcgtatggatcgtcatcgacatctacttaaagggccgcaaaaccaagaagcggtagggtatcgattgatatcagtccagcgggagggtggattcgcgctggataaggcggcagggtacgtagtcgacaccgtgatgggggttgccttcgatggcatcgaccaagtatcgtgccgcgcggcggccgatggtctcggtttcattgtcgatcgacgtcagtgcgggcctcgagctggaggtcagcacagaccagttgtcatggccgataacagcgacatcatccggaatgcgcaggccctgctgcttgagcgcatcaatgcagcctctggccagctggtcgttttgacagaccacggcgtcgaacgtgacgccctgatcgagcagcagacgggtggcggcgcggccccaaccttcgtcccacttgccgtaccggattggcccggccggttcgatgcccagctcggccagtgcctcgaccgcacccttggtgcggtcggtggcggcggtataggtttcgtcgccaccgataatggcaatgtgccggcgaccacaagagatgagatggttgatggccatgcgcccggcgtccacattgtcacaggtgaccgaacaatcttcgatatcggtggaggggccgtagacgtagaccagtggcacgccccagtcatggccaagcgtgggccgggggttggtttcgcactgcacgatgagcaggccgtcgaccttgagggacagcagtttcttgacatgctgacgttccagcgcggcgtcgccacgagcgttggccaacaatactgaggtcgattgtgctcgcaactcgttctctgcgccgataagaatcggtgtggagaaacggccctgcagatcggaggtgaccaggccgatagtgccggtggtgccgcgggccagggattgggcgagtttgttgggggagtagttgagctggcgggcggcgtccagaacgcgctgcttggtttcttcgctaatgcggggcttgttgtgcagtgccttggacgcagtggccaaagagactcccgccaaagcggcaacgtcttcgagccgtgccgcgcgtccggtcaatgtctgggccataatgcctcgattcctcgtttctttctcagcagtatattgctgcactctttcgtgcgaaagtagtgattgtaccgatacccctttgtattgttttctattgtagacatgacgcgaaaactttcgcaagtctattttttggcgtggcgcagtgatcatttttgtgcgattgaaaagagaatgaaagaaagcgttgtgttcacgttcgaatatgttggcttttggcgacacgccgtaagaaagcgctaaaaataagtgtttgtttgagtcaaacaatcgcgcaaaatgcatatcaaacctgttcgatatgcgaaaatatgcgaaagtgcgaaagcgtttttgcaaaaatggcgatgttcgtttatattgagaaaaggctttcgcagtgttacctgttccgagcaaaggagcgagcagggcgaagaccaaggaggcggaccgtccgccaccgcctctcatagttgagcggataaatagagaaagaagcgaacatggtgtctttcaataaactgacccgtactcttgctggcatcgctgccgccgcgttgattgttccgctggccgcctgtggtggctccggcaatggcggtaccgccaccgccgaaggcatcccggccaagggcaccgacgatggcaccgagatcaccctgtggacccgttccccgctggagcgtcaggccaagaacgtggtcgaggcttacaacaagagccacaagaaccaggtcaagctcgagatcatcccgaacgacgatatggaaggcaaggtcggcggtgcttcgcagaccgactctctgcctgacatcctcgccggcgacgtggtccgtattccgtactgggcttccgagggcatcttcactgacatcaccaagcagatcgacggtctggacaacaaggccgacctgcagcagggccacattgaggccggcaccgtggacggcaccgagtacaccctgccgttcatcaccgatgtttccgtgatggtctggaacaaggccctgtacaaggaagctggcctggacccggagcagggcccgaagtccatcgctgagttcaccgagcaggccaagaaggtcgccgccctcaacaaggatggcgttgccggttcctacctcgccggtcagtccggtggtgctctggtcttcgacctcttcccgtccgtgtgggctgacggtgaatccgttatgaacaaggatggctccgaggccactctggacaacgactccatgaagggcgttctggacgcttacaaggaactggccaacaccaccaacggtttgggcgcaggctccaaggaagagaccggtgccacttggaccgctccgttcgcgaacggcaagatcggtgtcatgccttacccgaacacctccaccactgctctgttcgatgctgagaaggacggaggcttcgaggtcggcgtcgctccgatcccgggcaccaaggaaggcaagacctccacgttcctcggtggcgatgccatgggtatctccaaggactccaagcacgttgctcaggcctggaacttcctctactggctgatgcagtctgacactcagaaggaagttttcgctgaccggggcgacaccgcctccaacatccagaccctgaagaccgcttacaacgacgctgacccgcgcatccagaccatcaactccgtgatcatcgacggcaacggccagaccccgaagtccccggccttcaatgaagccttcaacgccgctggctccccgtggcagctgctcgtgcagaacgccgtgtggggttccggtgacctcaaggccgacaacaaggccgtcaccgacgtcctgtctgcccagtgattcggtggtgatgctcctcaccatcgctcatcaaatcacagcaataactgaataacaactgaacagattgagccggtcccttccttgtgagggcaggggccggctcaaccacataattgaacttctatcttcttcttcattccttttcttccttcatcattacatacctcttgaatgcggtgtgttggcggggcttcggagtcctccttcctcgaagccctgacatcggattgcattcggattccgtgattaccatttcacagttattccccaaaggagagagaaacatgtcgagtgtttccaagagcgccggggcggtgcccgtgcataagtccaaggcgaaggcggccgagacgcgtcgcggcctgttgtactcgctgccggactggttgatgatcgtcgtcctgttcttcgtgccgatcgtgctgctggtggtgatggcctgctcgcgttggagcctgctgggcggcaaccgcggcgtgaacttcccggacaacttcgtcaaggtgttcgagaacaaattgttctggccctcgatctggttcacgttggagtacaccgtgatcgtcacggtcttcctgctggtcctgggcctgggcatggccatgatcgtgcaggagagctcgaagtggaacaacgtgctgcgtacctgcttcctgctgccgtccgcgacgggcctggcgtccgcgtccctgctgttctacgcactgtattccccgcaggtgggccctgtcaccaagattctgagctcgttgggcctgatgcaggagggcggttcggtgctggccaccggccagtcggccctgtgggccacgattatcgtgattgtctggcgattctcgggctactacatgctgctgatgatgatcggtctgcaggccatccccggtgatctgtacgaggcggcccgcatggacggtgccggttcctggcgtatcttccgctcgatcaccctgccgctgatgaagccgaccatcgtgatgtgcctgatctactgcgtgaccggctcgatcctcgccttcgatcagttcttcattctgaccaagggtggtccgaacaactccaccatgaccgtggtgcagctcatctacaacttcgccttcgattccaagaaggatctgggtatggccgcggcgctctcgctgatcgtgctggtggccctggtcatcatcaactccatccagatgcgcggcatgcgcgacaacaccaagtgagaaaggggaggtaacacattatgactaccccattgtggaagcgcgtcatcgctcgaatccttgaggctctgctcgccatcatcttcatcagcccgctggtctgggtcatcatctgctcgttcagcccgcaggccggttcggcccagtccaagggctggggcgtggccaactacctgaccctgttcggttatcaggaaggtctgcccaagtatctgttcaactcgataatcgtgaccctggtcgcggtcgtgttctccgtggtcgtctgcacactggccggctactcgttctcccgcttcgactacccgggccgtaacctcggcttcatggtcaccttgtccatcctgatggtgccgtacgcctcgctgctgatcccgctgatggtctggtacaaggacatcggtctgaacgacagcctgctgggcgtcggcctagtcatcaccctgttccagctgcctatgagcacgttcatcatgcgtaacgcatttgacgcgatcccgaaggacatggaagaggccgccatggtcgacggctgcaacagcctccaggccttgttcaagattctggtgcctgtggtcaagccttcgatggttacggtcggcctgctcgccttccttgaagcatggaacaacttcatgattccgctgtacttgagctcttcgtccaagtccaccctgccgctggcgatggtgaacatgcgtcagcagaccatgggtgttatcgactacggtgccactgaggccggcgtcgtgatcctgctgattccctgcgccatcctgttcctcgcactccagaagtactacgtcaagggctttatggctggagccgtgaagggctgatcatgaacgttacaatcacttccccgttctggaagcggcgtcgcgaccagattgtcgaatccgtcatcccctaccagtggggcgtgatgaacgacgaaatcgacaccacagtgcccgacgacccggccggtaaccagctggctgacagcaaaagccacgcggtcgccaatctgaaggttgccgccggcgaattggacgacgaattccacggcatggtgttccaggattccgacgtctacaagtggcttgaggaagccgcttatgcgctggcctaccatccggatcccgaactcaaggcgctgtgcgatcgcacggtcgatctcatcgcccgcgctcagcagccggacggctacttggacactccgtaccagatcaagtccggcgtatgggccgaccgcccgcgcttcagcctgattcagcaaagccacgagatgtatgtgatgggtcactacatcgaagccgccgtcgcctaccatcaggtgaccggcaacgagcaggcccttgacgtcgccaagaagatggccgactgcctggatgccaacttcgggcccgaagaaggcaagattcatggcgccgacggccacccggaaatcgaactcgccctcgccaaactgtacgaggaaaccggcgaaaagcgttacctgacgctctcccaatacctcatcgacgtgcgcggccaagaccctcagttctacaccaagcagctgaaggccctgaacggcgacaacatcttccccgacctcggcttctacaagcccacctacttccaggccgccgaacctgtgcgcgaccagcagaccgcggatggccacgccgtgcgcgtcggctacctgtgcactggtgtggcccatgtgggccgactgctcggcgatcggggactgatcgacaccgccaagcgtttctggaagaacatcgtcacccgtcgtatgtatgtcaccggcgcgattggttccacccacgtgggcgagtcgttcacctacgactatgatctgccgaacgacacgatgtacggtgagacctgtgcttccgtggctatgagcatgttcgcccagcagatgctcgacctcgagcccaagggcgaatacgccgacgtgctggagaaggaactgttcaacggttccattgccggcatctcgctcgacggcaagcagtactactacgtcaatgcactggagaccacgcctgacggactggataacccggaccgtcaccacgtgctctcccaccgcgtcgactggttcggctgcgcctgctgcccggccaacatcgcccgactcatcgcctccgtggaccgctacatctacaccgagcgcgacggcggcaagaccgtgctgagccaccagttcatcgccaacacagccgaattcgcttccggtctgacggtcgagcagcgttcgaacttcccgtgggatggccatgtggaatacacggtgagcctgcccgccagcgccactgacagctcggtccgtttcggactgcgcatccccggctggtcgcggggctcctacacgctgaccgtgaacggcaagcccgcagtgggttcgctggaagacggcttcgtataccttgtggtcaacgccggcgatacgttggagattgcgctcgagctcgacatgtccgtgaagttcgtgcgcgccaactcccgcgtgcgctccgatgccggtcaggtggccgtgatgcgcggaccgctggtctactgcgccgaacaggtcgataatcccggtgatttgtggaactatcgtctggccgatggcgtcaccggtgcggatgccgctgtggctttccaggccgacttgctgggtggagtcgataccgttgatttgccggcagtgcgcgagcacgccgacgaggatgacgcgccgctgtacgtggatgccgacgaaccgcgtgcgggtgagcccgcgacgctgcgcttggtgccgtactactcgtgggccaaccgcgagataggcgagatgcgtgtcttccagcgtcgataaatatcggcgatatgccggcctgcgcgcaactggccggcaaaataatacttatgccgccatcgtctgcaataagtcgatgacggcataggccggatgtcagtatcgattggagccgaaaacacatccggggaatgaggtctcctgtgtggggtaatacccgtgcaggagatttttaattatatgctcccgctgtgagagctgtcggcggagtcgactgagggtggtcataagcggtaccgtgtaagccaccctcagtctcgctttgcgagccagctcccgccagcgggagcctgttggttcctgattcagcgaggctgaatcggcgcgccgtaggtactgcgacacggcgaaacgcagcaatgctctaatgcgaaagtaaatgcgaaaactgagaaattgccgggtttttgttgtataagatggttgatatcgctgagggaaagttgcgaaaccgtattcgctcggttatgatgtggaatcagcttcggtgaattgctccaaccgtgatatccatggcggatatcacaccagattcactgaagatactcattccggtgaacccaatagccaataaaggaaactgacggagaacgggctctgcggcccagcatccacagaagaagtcctggtcgcatagatgcgacgtagcctgagcgaagacgcgaaagaccggggcggagaggtccaagcaggaatgcatcaatcaacacgaaagcggtggcttgcgtcaatcggcgcggttgcagcggtcgccacactggccgccggcggtgcagtcaccgcgcaggcagccgatgcgcccgtcatcaagaatgcggatgtggcatatccgtcgttcaagggatctgatgatccgatgaagacggcggcgaacaacaccacatataaccctgccgtcagctatctgcaggagacattcgataacgacgtgaagaacctggccggcatcgacaccgaccatgacttctggatcgataagattctcacccgtactggtgcacagccaactggtaaaggcacgaacgacaagggtgcttactcgtatgaaggctccgacggcaacaactacctgttcacccgtggtcgcgccgcctacatgtacacgcacacgcctaatcagctcggttttgtgggtgataccgcctactgggaccagaccagcaggagcggcttcaccgttaccgtaaacgctgatggatcaaaccagacccttaacgaagacgcctcccagcgcaagcagacgccgagctacttcacctccctgttccagaccggtggcaagagcctcaagatcaaggaagtcaagtacatcacctacaacaacgtgatggttgcgaacctcaccgtggaaagcacgcaggaccgcgatgtcacactgaccacggcctcgccgttcgccgccgagggtgctgatggtgccaccgaacttactggccgcgtgaacgtcaagaacaacctgacgaccatctatccgcgcttctccgccaacaaccaggacggttccaactggatcgtcagcggtggcaaactcaccagcacgttgagcctcaaggccaacgaaccgcagaccgtcaagattcagctcggcctgatcgccaacgaactgcctgactccaccaaggaatatgaggcccgttacaccggcgaccttaaggatgctgccgcctcctacaaggattccgtgaccacctacaacaagtggtgggtcgataacgctccctacgtggacactccggaagacaatatcgataagaccgtggtctaccgctggtggctgagccgtttcaacatgctcgacgccaacatgcctggcaacaccttccagtacccgacctccatcgagggtgtgctcggctacaacaaccaaatcgtgctcacctccggcatgttcatgatggacaccaagtggttccgcaaccccgagtactcctacggcacctggctttccgccggcgataccgccaagaagagcaaggcgggctattactactaccacgacaatccgggcgacccggccaactggaaccatagctacacgcagtacatcacgcgcgccggctgggactcctacaaggtgcacggcggtccgtccaccgtggccgaggagctggccgaccagggtgccgaggacgtgcaaggtctactcgcttccaagagcgagccggacaacaacgacaaccagaacaacaatgacaacagcttgattgactggtcctggtggtcgatgaccggtaacgatgccgacgccgtttccttctctgagccgggtcgctccggccagcgcatggatcgcgccgatggttccgccaatatgtgggccaacgccaatgcggctgctcaggcctacaaggccgctggcgataccgccaacgccgagaagatgcaggccatcgccgacaagatccagaaagaagtcaccactgaactgtgggacaagtccgacaacctgctcaagcacaagtggctgaacgacggtgctttcgccaagtacaaggagatcaataactactacccgtactccgaaggcctgatgcctaccggcaacgaagattacaacaaggctctgcgcctgttcgaggattccaacgagttcccgatcttcccgttcttcaccgccaaccaggcggacaaggcggcgctgaacttccccggttccaacaacttctccattatcaacgcacagccgctgctgcaggtctattcagccggcatccgcaattacgatgcagccaagaacggttacatcaccaatgagcagttcaagaaactgctgtactgggtggcgttcgcgcactatcagggcggcgataacaactaccttgatcaaaacgagttctggaacgaggataacaacaacgtcggcgatgtaaacggtgacggcgtgatcaacaacctcgacaagaaccttgacgccgcacagaacggcggcaagatcacctaccgctcctggatccaccacacccagctcggcaccacgaactggacgatggtcgaggacgtagccggtatggtgccgcgcgaggataacaagattgagctgaacccgattgagatccccggctggaactacttcacggtgaacaacctgagctaccacggtcaagatgtttccatcgtgtgggataaggacggcagccactatggtggacctgctggctacagcctgtacgtggggggcaagctcgccttcacttccgacaagctcgcacacctcatttacgatccgtccacgggcaccgttgaggatgccgacaaggccggcgtaaccatcaccaatgccgctggttctgatatcaaggccgccaaccaggttgccttcaccgccgaccagcgtgtgaccgacctgttcgccaagtccggtgccaacgtcgactccgcttccaagtccaccacgaatgtggccaaggacgcggacgtgaccggtaccacctacgccgagaaggacaccaactacccggccaagaacgcggtggacggcaagaccgtgatggaatcgttctggggtaccaagggttctgagaacaagaccgacacgctcaatatcaagttcaaggacggcaagcagaagatcgacgacctccgcttgtacttctaccagagctcgtccagccagaccatctccggctatgccgagcccgccaactacaagttggagtaccagaaggatgacggcacatgggccccgattgcggatcaggtgcgcaccccgaactacgcgggcgcgaactacaaccgtatccagttcactccggtggagaccacgactatccgcgtcaccttcacgccgcaggccggcatggccgtcggtgtcaaggagatcgaagcctacaacaccggtatcaaggctgacggcacttccgagaaccaggctccgcaggtggatgcttacgtgtcttccagcacctcatccggtgccaagctcgtcggtacggtgaaggatgacggtctgcccgcagaaggcgacgtcaccaccaagtgggagctggtttccggccccgagggcggtaccgcgaagttcgtggacgatactgctgccagcaccaccgtcaccttcaacaaggaaggcgactacgttctgaagctcaccgcttccgatggcgagaaggaaggctccaaggaaatcaccgttcacggcatcccctctgacggtaccgtgaacgtagccccgcagtcgagcgcctctgccagctacaccaacggctaccagccgaaggacaacgccaagaaggtcatcgacggtcaggtggtatacaccaacacgccgaacgagacctggaacaactggggcgacaacactggtgtggagccgtggctgcaactgaagtgggccggcaaggtgccactgaagaaggccaaggtcttcttctggaccgatggcggtggcgtgccgatggcctcatcttggaagctccagtacgctgacgctgacggtaactggcaggatgtgaagctggctgacggccagtcctacacggtcaatcagaacgaaggcaacgaagtgaagttcgccgacaccgtcgaaaccgacaagctgcgcgtggtcttcccgaagggcgccatcgtgggtgcttccgagttcgaggcgtacgccatcgagccggtgagcgtggacgaagtcaaccgactggtgcagaccggttccaaggccgatgatctgaagctgccctccaccgtgagcgccgtatacaccgacggttctcgccgtgacctcgccgtcacgtgggataaggtgaccgacgctcagctggccgccgatgccgtattcgatgtcaagggcatcgtcgctggtgcgctgagcggtacggttgcacacatcgcagctcgttccgataccgcattgcagaccgtgggtaatgcgcagccggttgagcagaccgtctaccagaacgccaagtccatcgacctgcccgccacggttccggtgaagttcccgaacggatacaacgacgaccgcaaggtcacgtggaaggatgccgacatcaaggccatcgacctgaccaaggttggtgactacgaggtggctggtaccgtcgacgacggttcgtcttccgcagctgccaagctcactgtccacgtggttgccgacccgaacggttcctccactcctgagcctgagcctgagccgttggtcggttggattgaaggcaaggcgaccaagaccaccatttcgcctgattccgaggcgacctggtcaccggccgaaggcaagctcaacgacggcgtagtcgtcgatgatacttggccgaccacggatgatcagaacgtcaacgacaaggtctggggttcttggggcaaggcaaaggacggcatgtacgcccagtacgacttcggtcagtccgtgaccgttgaccagagccgcgcccagttctgggccaacttcgctgagactgacgattcgaagggtggtctggaagtcccggacgcttggaagattcagtacctcgccgaggatggttcttggaaggatgtcgagcccaccgaggattacaccattgtgcgtaactcgccggcttctcgtgcggataccgatgccaaaggttggagcactgtgaccttcaagccggtcgccaccaagtcgctgcgactcgtgctcactccgcacaccggcagcagcaccttcggggccgccgtggccgagtggggcgtgcatggtattgacggcaccgagcctgaacctaccccggtcgacaagaccgcgctcgagtcggctcttgacacagccaacggcctcgatgcaagccgctacaccgccgcttcatgggctgagttccagcaaatcattgacgctgcccaggctgtgtacgacgatgccaacgccaccgcagaacaggtcgccgagcaggtgaccaagctcgaggacggccagaaggcactcgttgcgctcgccaccgacgtggagaagtccacgttgcaggcggccatcgatgcggccaaagccgaggccgcttccggcaagtacacggataagagtgtcgaggccttgaacaaggccatcgaggctgcggaaggtgtgctcaaggtcggtgaggtcggtgaggtcactcaggccgccgtccaggaagcgtccgcttcgctgaacaaggccgtcaaggccttggaagagaagcccgccgccgaaacggtgaagaaggagtccctcgaggcttccatcgagcaggccaagaaggctgacaagtcgaagtacaccgaggaggcatggcaggctctgcagagccagattgccgccgctcagaaggtgtacgacgacaaggatgccaagcaggccgatgtcgatgccgcacaggatgcccttgacaaggcattttgggccaccaaggttgagcagaagcccggctcccagcagcctggtgtgaccgacactgataaggatgataaggacaacaagggtgatcgtgtgcctccgactggtgccgcggtttccgtagttgctgcggctgccgtgctgctcaccgccgcaggcgtgaccatcctgaagcgtcgccagtccggcgaccacggttcggctcgccactcggcctgacccgcaacggagtcattctgccgagtgagccccctcacagagggggctctagccttttccttctacccatcattactcttttcactcactcaatgaggagcactatgagtttccatgtatccgcgcaatcggttcgcgcggtggccggtggactcgtcgccgcagcgacattgctgtcaggccttgcccttgcgccgaccgcaatggccgccgattcagccaccgctgacaacgcgcccagcgttgccggtcacgcgtataacgaactgccgtataacaatcctgatgtcaccgtcacccaaatcgacaatagcgcactgcccagctacatgcgcaaccccatcgggcagaacgagggtattgacaccccgaacgatctttcgcagaactactactctgcagatgcatccgcgctgagctatgacggcaaactcttcgtcttcaccggtcacgatgaggcttcgcccgactacggctccttcaacatgaaggactggggcgtatacgtcaccgatgaagacggcctgaatcaaggcaaatggacacattacaagaccatcgccaaggcagacctgttcagctgggccaccggcgatggcgcgtacgccggccaagtcgtagccgacgataacggcaccccgagcgacacttccgatgattggttctactactacgtgccggtgaaggacaaggcttctgaggcggctggacaggacccgttcgccatcggcgtggccaagtcgaagagtccgctcggcccgtggaaggatgccatcggcaagccgctgctcaccacatcgcaaacccagattgaaaccatcgatccggcattctttgtggacgaggatggcaccggatatttgcactttggtacgttcggcactcagctcgccatcaagatgaagaaggacgccacaaccggccgcacctcatacaccgaggtggaaaccaaggctgatggcaccacgccgaacctccacaccatgaaggacacggacagcaacgcgaacggcccgaagggattcttcgaggcggcgtgggtgttccgtaagggcgatacctattacaacgtgtacgacggcggtaagcccggttcgggcacggccacctgcgtggaatcgaactatcaagcttgcatccagtactccacttccgacagcccgctcggcccatggaagtaccaaggcgtaatcgtgccttctggctcggccaccacgatgcacccctcggtgctccagttcggcgacaaatggtatgtgacctatcacaccggcgacaaggaaggcggcaccgatttccgccgtgccgtgtgcattgatgaagtcgattggaccgccgacggccagatggtttccaccgcccatccaaccaaggccgagaaaacgcagccctccaccaacgtggctccgtacgcaaaggtgagcgccacgttcactgaaacgcctgcttggaagggttcggtgaacgacggccgtgtgttgcaaaccgctgtggtcccgccgaatcactggaccaactaccgttctatcccgcaatcgcagtccggcgattctctggtctaccaatgggatggcactgtgcgcgtcaactcgtctaaggtttggttcgacgtggattccaacgctctgcgcgcgcccgcctcgtggaagattcagtacttggacgcggacggcacatggaaggatgtcaccaacccgagtgcctatacaacgaccacaggcaaggccaaccccaacgccgtcaccttcgatgcggtgaccactactgccttaaagctcgacatgaccggtcaagctgtggatggcggctatgcctccgtggccgttgctgaatgggaagtcggctccgactccagcgaatcgccggcaatcactgcgccgaagagcgtgaccaccgccaccggtactgcgcctactctgccggccacagtggatgtgaagtacgggaacccaaccgttgcctccccagtaatttggcgtccagttgatgcttcctcgtatgccaaggtcggttcgtttacggcctacggcgtggtcgccggcgtgcccggtgaggcaagcgagcagggcaatgtgtcggtaaatgtcaccgtgcaggacggctaccagcctgccgctgataccacgaagccgactgtaaccgttgccgttactgctaacgcaggcaatagcgagtggctcaccaccgctccgttcgccaccgtgcaggccacggacgacaccgcacctatcgccaagctggagatttccgctgatcaaggcaagagctggaccaccatcgccgcgaatgcaaacgcggccattgccacgctttcccagcagggcgatgtcgaagtgtgggctcgcgccaccgatcaggccggcaacgtttccgacgtggccaaggccggcggcaaggtggactccgccgcgccaaccgtgaccgccgccgccgataaggaggagcgcacgctgaccttgaccgctgatgacggcaccggttccggtgtcgcatcaattgaataccgcattggcacagacggtcaatgggccacgtacagcaagccgattgctgcaccgagcgcgtcgcgcgccaccgtgtactaccgcgccaccgataaggccggcaacgtgtccgcttcggcgaaaaccgacattccatccgacacttccgtgccgctgaccggctacattgagggcgatgccaccgccaccgatgtggacggcaaggcatccggctgggtcaagggtgccgccgcgttgaacgacggcaagatcattcccgatatcaccattgccaacgaggatgtctggggcacttggcccaacaccggtgagatgcgcctcgactacgagtgggaccgtgaagtgactatcgactctagccgcgtgcaattcacctcggatgatggcggattgggtattccggcatcgtgggaattgcagtactgggacgccttggcgaacaacggtgccggcaacttcgtggatattcccgacgccacctacactgtgaccgccaattcaccgtctgctggctgggccaccggcgatgccaaggggtggtctgatggcacgtggaacactccggtcaagactaccaagttgcgtatggttatcacgtccggctcggcttctccggctgttgccgaatggcaggttcatgccattgacgacagtacgcctgagccgcctgagcccacaccgatcgacaagaccgagctcaaacaggcgctcgctgactcgcctaaggctgacgatgcctccaagtacaccgagacttcatgggcggagtacgcggcggtattggattcggcgcagcaggtgtataaggctgaggatgccaccgaagctgcggtggtggatgccgcaacccagctgaagcaggcagcgaagaagctggtgcttgtagctacggtgcaagatcgtgccgcgctgagcgctcagctcgatgccgctgctgccgtggatcgcacaaagtggactgatgaatcgctggccgtgcttgattcggcagtcgctacggcgaatgcgctgacgagtgatggtcaggccgcccagtctgacgtacaggctgcgactgaggcaatcagcgatgccatcgcgggtctggttgagaagagcaccacgaagcctggccagggtggcgataagcccggttccggcacggacaagcccaaccaaggcaacgattccaaccagaacaagggtgatgcagactccggcaagcacaagaagatacctgacaccggtgcagccgtgcttggtgttggcatcctcgccgtggtacttgctgttgcgggtgtaatcatcctcaagcgccgcaagtccggtacctgctagtcccactcgctcggcctagcatcaccaagcccccgcgcatgaacagcgggggcttcacttttgttcaataacaagcattatgtgcgcgtatgagactacgatggtggggaatctacgaacaggggcagcaatgacggcatacatggaccataaggatctcgccaacgaagttatcgatcaggcgcgcgcacaagagattactgatggtgtgcatcgcgtgcttgaccggattgcctcagcggagtccgcagccgggcgtgctgccggttcggtccaattgctggctgccaccaagacgcgcgatgtcggcgagattctggcggctatcgatgctggtattcgcgtgattggtgagaatcgtccacaggagattactgtcaaggctgacggtctggcaaaacgactgggggagcgtggttattcgctaggcgtgattgatgccgctgaggctgacacggccaatgccgcagctgcaacgcatattcctttccatctcatcggccaattgcaggctaacaaaatcagtaaggtgctgccggtagtggacgccatcgaatcggtggattctattgagttggccgagaagatcgcccgtcgtgccaccatgcgcggcattacggtcggggtgctgctggaggtcaacgaatccggcgaggaatcgaagtccggctgcgcacccagccacgccatcgacttggctcagcgcatcggtgcgatgggcggactgcgcttgcaaggattgatgactattggtgcccatgtggatgatgagcgcacgattcgtgcgggcttcgcgcatctgcgtcgcactcgtgaccagattcttgcctccggtgccgaaggcacggccgactgcaccgaactgtcaatgggcatgacccacgacatgacctacgccatcgaagaaggctccaccatcgtgcgcgtcggcaccgccatcttcggcgagcgcgccttcatctgattggagctatacgaaaaaacgccgcttgatcaatagccaagcggcgtttttcgtaaggattttcggcgtatcaatcacgcatagatattgcgcggacgcatgtcctcgggcaggccgtcgagcagaatcgccacggaaccttcctcgaacacggagcgaatacccgcggccagcagcggtgcgcaagacagtacggtcatattcggcaggcgcttctcttcgggaatcggcacggtgtccataaacacgatttcatgcgcgccgcagtgagacaggcgctccacggccgggccggagagcaggccatgggtggcgaccagcgtcaccgacttggcgccggattcgttcagggtgcgcacggcttcgcagatagtaccggcggtatcgaccatgtcgtcgatgaccacgcagtcgcggccgtcgacatcgccgataatgccatgtgcctcggcatggttcggacgagtaatatcacgctgtttgtggatgaatgccagcggcagattgcctagcttggcggcccactgttcggacaccttgatacggccggcatccggggacacgatggtggtgttgcccagatcaagggtggaacgcacgtaatcgagcagcaccggcatggcggttagatgatcgaccggaccatcgaagaaaccctgctcctgagcggcgtgcagatcgaccgtcataatgcggtctgcaccggcggcgtggaacagatcgaaaatcagacgggcggtgatgggctcacgaccgcggtgcttcttatcctggcgcgagtagccgaggaagggcgccaccacggtaatcgacttggcggaggcgcgcttcaaagcgtcgatcatgatgagctgttccatgatccacttgttgatatcgcccgaatgacactgcagcacgaacacgtccgcaccacgcaccggttcggtgaaacgcacgtacatctcgccattggcaaagtcataggacgtggtttcgaggatttcggttcccaaacattcggccaccttctcagctagctcggggtaggcgcggcccgtgaccaatacgagtcgtttatccggagtgccttcaagaatcgccgacatgcgttcgcatcctttgtttgagtcgctgtgtgatttacgccttaaccagtgtacaagcaccccgccgcagcgaacgccacggcggggtgcctatttcgtaagagtgttgagattgccgaaattattcggagaactcgacactgaccttattgtctttgatggtgaaggtgccgtataccgagaaagtgctggaatcgtcttccggttcccagccatcgctgtaacggtactcgtaattcgccgtcacatcaccttcgtcggtgctgaacgagctatccgacaggctcacgctggtgaccttcggataaccgtcaatcgtccacttgaagttgcggtatcggctggaattggaggtgtagtagccgaacgggcagccctgcggttctgcatcggtggaagccgcgcattcatccagcttgctcttcaccgccgtgtcgatttccgacgtcaacttgtccgtaggctgagcgtcaagagtgccgctatcggagctgttggtgctcagagacacggtcttggcggtgtaatagtcggacttcaccacgccaactttgtagacgccggggtacaccttgagccggtagttgccggtttcgtccgcgtcgttgttcacggcgttcttgggcgttacggtcacgccattgacggtgatgctgcccagcgagcttggcgcatataccgaaatggtcttgaccaacggttcggcgacggtccagttcttgaagatcaggaacttgctgccgttggccaccatcttgatggaatcgccggtgacctccttgccttcaagcgtgtacgtcagctgggcactcacggtgccatcggcattgttggaagtctgcgagatgcgcgcgttggtgatgtgcgtgttctcgcccgaggatgccttgctggtcagcagtgcgcgctggttcgtatccacgtgaggatcggcgatggtgttggccttgtcgtagtcgccggaggagatggcggccacatagctgttcgccacgctcttcgcgctgaacacggcggaagacagcacgccatacacgataccgaacagtacgaggaagccggccacggcaccaacgatgatgaagatcttcttctgctgctcattcatggtggtggaggtcgcgccaggtgcggctaccggtgccgctccgggagtggtgggagccgcggttgcgaatgtggtgcccggagcaccgggggttgcaggggcggccggagcacccggggcagcgggcgcgggtacaccgacaccagcaacaggaggctggccggcggacgtcggcgtgacgttgacgtgaggctgcgcagcgtttgcgcccgtacccacgccggcgcttggcgtgccccacgtgggccacttgccgaccattgcgccgctggcatagatgtagtcgaccacaggctgaggcgtggcacgcacagtgccgcctacaagtagggcccgcagtcccggcatggaaaccaccatggtcgggccgaacgtcagtgcaacgacctcaaccaggaatgcccacaggcccatgaccaggaagtaccacatggcaggtccggtggtctgaacttgcgtgacggaggtgcggttgcccatagtacccatcagcagcgtggcaatcgcccagaacaccatgatggcgatcggggctttccagcagtgctgccagcccatgtaggcacggtcgtacaggttgcgtgcggagacgcgcaatgccgtgtagaaggtgaggaccaggaacacggcgaacaggatccaaataggccatacggtaacgctgaggttgatgctgaacaggctgagatcctgcggcagctgaccggactcggtcagtgtaatggcgccgaaggttccccaggtaaagaagaactcgccgatcatcagcagtgtgaccgggaacgtcagtatcaggattccctgacctgaggagaatgccacggcgaacagggccaccaggccgacgatgaagagcaaagccagctggaagctcaagacgctgaccaccgtgcgcgtgtatccgcgaacgcggtgtgcccactgccaagtagctccgaacacattcttggaatcggaagcatattgggccagtgcatagccggccagagcgccgagcgcggagagcaggtaggccataaagaacgtacgcactgtggcgccggtcaccttggccacgatggtggtgccactggcgagtggtgccgccgcgatggccgcaagcagcgtgatgaccacggccggcagcaatccggtgataaagccggagatcaggccggtgaacttgaatcgaatgctcttggaacgggccagcatgaatgcgccgaatgcggtgccgaccagcaatgccaagccggtgagccccagtgggtacgacatcatgttgctggcgtccatgctggaggatgagaggtcgacgatgtcgaaatgaataccgccagacaggcccatgaccaacgataggaacaggtagtggaagaagttcatgccgttgccggtgatgaacatgccgccaacggcttggttcagtgttgaatcggccccgaggctgggtgctgcggtgctcatggaatttattgcgattgcagggaaaatcgaaagcaccaaggcggctgccgtaccgatgccggccgcaatgccgatggtctgcatgttgggggcgccgaacagttccttgaccagtgggctggaagagatgggttgtgccggagcggcgggagccggcgatgggccgggctgccctgggttcggaatggccgtggtcggtgcggtgaatgccggtccgcctgcgggctgggcctgcggctgggcagcgggctgaggcgtcggctgcacagccgctgcgccgggcaacggaatcgatggtgcgggagccgcgggctgtgcggtcgtgggaacggcgccggtgggttgaccgggcgtgggtgcggcgggcgtcgctgctgctggagctgacgccgcggcaagatggttgccgcaggaaccgcagaattgcgctccttcgcgcacagctgcgccacaattaggacagaacatatagtccccctttcttctgatgcttcttcgagcactatcgtacccgcaaaatcagcgccatgaccatagggcgaggctcgaaatggacaatactgggtgatggcgcgcgggcttggctgcgcgggcttggccaaaatggtgggcatcgcgaaaccggcaggaatatggccataccctgtcccgccttatatatagactgtccaagttgcccgaagatgcggtgccggtttggtgctgcgtcatgggctaacacgcatacacactcctgccacggaacgtccgtggccgaatagtccgaaggaggtgggtgatgtctgcgcacaagtacgaactgatgttcatcgccgatcctgagctggatgagcgcggtctgaagaagctgaccgagcagtatctggaactcgtcaccaaggaaggcggctctttcgatgagcccgattactggggccgtcgcaagctcgcctatgagattgccggtaagaccgaaggcaactacgtcgtggtgaagtacaccgccgagcccgctaccagcgatgagctcgaccgtgttctgaacctcaacgaatccgtgatccgtacgaagatccttcgtaagggctgaatcaagcgtttagtcagctgaacagctggtattcaaggtaagtaagaaggaccgttatggcaggcgaaaccgtcatcaccatcgtgggcaacctcactgcggaccccgagctgcgcactattggcagcggcgcgaccgtggcgagcttcacgattgcttccaccccgcgaacctggaatcgtcagaccaaccagttcgaggatggtcaggcgctgttcatgaggtgctccgcttggcgtgacctggccgaccactgcgcccagtccctgaagaagggcatgcgcgtgattgccaccggccgcctccagcagcgttcctatcaggcacaggatggttcccagcgaaccgtcgtggagatgcagctcgatgaaatcgggccctccctgcgctacgccaccgcacaggtgacccgccagtcgtccggtcagggcggcttccaaggtcgttccggtggtttccagggtggtcagcaacccaatcagggctatggcaaccagggtggccaaggtggttatgccggtggccagggcggttacaacggtggctatcagggtggtggcgctggatactcccagcagcctgccgctcccgccaacccgtccgctcctgcggccgacccgtggagcaatgccggtgcatctgatgccggtagcttctccacgttcggcgcttcctccgatttcggcggcggcgacgattccgacccggagttctgatcagtacttacctccccgctgccagcagcaatcaatatcaagatttataaggagaacatcatgtcacgtaagaggccgcaaccgccggtcaagccgttcaagaagaagccgaacccgctgaaggccgccaaggtcaccgagatcgattacaaggacgtcgcgctgctgcgcaagttcatttccgatcgcggcaagatccgttcccgtcgtatcaccggcgtgaccgtgcaggaacagcgcgagctctccaaggcgatcaagaacgcccgcgagatggccctgcttccgtacgccacctcgggtcgctgagtaagggaggctttgaacaatggctgaaaccaaggttattctcaccaagaccgtgtccaacctgggccactccggtgacgttgtcgacgtgaaggccggctacgcccgcaactacctgttcccgcagggcctcgctttcgcgtggaccaagggtgctgaggctcagattaccgctatgaagcgcgctcgtctggccaaggccgtcgccacccgcgaggacgccgtcgccgccaaggccgccatcgagggcaccaccgtcgagatcgccgccaaggtgtccgagtccggcaagctgttcggtggtatctccaacgaggccatcgccatcgctctgtccgacaaggccgcggtgaacccgaaggccatcgaggtcgagaccatcaagaccaccggcgatttccccgccaaggtggccctccacccggagatcaccgcttccttcttcgtgaaggtcgtggccgagtgagtcattccggcctagtgctggaatcacacagaccaagagtctgagcttaagcatcatcccccgtgcggttcgcgccgcatgggggatttttgtattggtgtttaaaaacgctggaaataggcgcgacacgccgagagttgcatccgcttcaaatctgagtatatttaacacctgttgcaaggaacacttcaacatctagccaagcccctgtagctcagttggttagagcagctgactcttaatcagcgtgtccagggttcgaatccctgcgggggcacagacaaccggaatcgaaagattccggttttttgttttttccagcatcagtccgtagctggtgcggaaaggccgtcttcgcgcgtgacggccggacgtgtaaggagcggcgtcatgtctcagatattcgcgttcaccgtatccgaccccgaaggcatgcacgcccgcccagctggccggttggttgccaaagcgcgggaatatgagtcgaacatcaccgttgcctacggcggcaaatccgtggatgccaagcgtatcttcggtgttatgggacttgatgttcaacaaggtgacgaggttacggttcgggtgcagggcaacgatgaagctgtcgctgccgcagagttcgagcgattcctcaaggagcacctgtaatgagaacgatacagggcgtcggcgtatccgctggcattgctatcggcacggtccgcgtgctcgccgccgccgatcatgctgtagaacgccgcgtaatcgacgatccgcaggctgagatggatcgattccgcgcggcccgtgacatggccgtcgctcagctcaagcaactgcgtgacaacgtcgccgctgagttcggcgaaaacaaggccgagctgttcgacgcccatcggcttatgctccaggacccggactatgcgggatgcgtcgaaggtttgattgcgcaagacaaggtgaacgccgaatttgcggtgaagagcgtcgccgaacagttcgccgccatgttcgctgcgatggatagctcgaccatgcaggctcgagccgctgatgtcgaggatgtttctcgccgcgtgatgaacgtgctgcaaggcaaacgcgatagcacggcgcaggatggcagtatacaaggcgatgctgtgcagaacggtactgtgcagaacggtactgtgcagaacgggattgcgcagaacggcgaaagccacatcatcttcgcccaagatcttgctcccagcgagaccgcgcagctcgaccgcgctaaggttttgggcctcgtgaccgccaagggctcagcgaactcgcacaccgcgattctggcgcgcacgatgggcctgcccgccatcaccggtatcggcgacgccttcgacccgactgatgacggtcacgttgccgtaatcgacggcgccagcggtgcggtgttcgtcgacccggacgaggccacgctgaccgagtgccagcgcaggaaggtcgaagctgaggaacacctgagcctactacggaagctcaaaggcaagcccaccgaaaccaagtccggtcagcgggtccacctgtacgccaacatcggccgtccctctgacgtagccgccgtgctggccaacgatgctgagggcatcggcttgttccgcagtgagttcctgtatctggaacgcgaggactggccgaccgaggaatttcagttcgatgcatacagacaagtcgcacaggagatgggcgaccgtccggtcatcatccgcacactcgacatcggcgcggacaaacaggtcgactacttcaatctggaccacgaggataaccccgcgcttggttaccgggcaatccgcatctgcctgacccgcccggagattttcaaagtccagttacgcgcattgttgcgcgcctcagcatacggcaatatcgccattatgctgcccatgatcacctcggtgcaggaggtgcgcgacgccaagcggattcttgaagaagccaaaagcgagctgcgcggcgagcacaccgacttcaacgagagtatccagatcggcgtcatgatcgagacgcctgcgtcggtcatcatggccgacgagctggccgccgaagtcgatttcttctccatcggcaccaacgacctgacccagtacacgctggcctgtgaccgtcagaccccgagtctcgaacgctttgccgacccgcattcaccagctgtgctgcgcatgatccagatgactatcgaggctgcccatcgtcatggcatctggtgcggcatctgcggcgagcttggcgcagacctgagcctgaccgatacgttcctgtgcctaggaatcgacgaactgtccgtctcgcccaccagcgtcctacccctgcgcaacgtcattcgcaaccactgagagtcaaggtcgcttcggctgattccggtggttttttggggcattgcattcggctggacattcgacatcgcatcctgccagcatttcgtcgtggggcaaagtgtacaatcgccacgtttgctttcgcgcccagcgtaaatcgcgtcgccggctccgcgaacggatttccaatcacacagaatgccgtgaacagtcagccatgcctgttgcgcggcgaagagaaaagaagaagcagtggaatactctctctttaccaagctggccgccgagttcttcggcaccgccattctgatgatcttcggcaacggctccgtggccaacgtcgagctcaagaacaccaagggtcaccacgccggctggttgaacatcgccatgggctacggcttcggcgtcatgttcccggtgcttatgttcggtagcgtctccggcgcgcacatcaacccggccatgaccatcgcccaggccgtcaacggcctgttcccgtggagcgacgtgctgccgtacatcgtcgcccagctgctcggcgccctgctcggccagttcatcgtctacctgacctactacccgcactacaaggagaccgaggacgccgacgccattctcggcaccttctgcaccaccgacgcggacaaccagaaggtcaactacttcctcaacgagatgttcggcaccctggtgctcgtcttcggcgccctgtgctgcctgtccctggcttggggcaagcaggattacgccgccgcctccatcgtcgtcggcttcattgtgtggggcctcgtgacctccatgggtggcccgaccggccctggcctgaacccggctcgcgacctcatgccgcgtctgttgcacgccattctgccgatcccgcacaagggctcctcccgctggggcgaggcctggatcccggtcgtggccccgatcatcggcgccatcatcggcgcttggctgttcgtgttcttcttcgccagctgattcgttgattgattcatatatgcaaatggcctccgctcgttttgggcggaggccattgtcgttgaatcaggtaaacgcagagactactgctccaggaacacctgcggggccttcatgaagttcgtggcacagtgttcgccgcagaagtaataggacttgccctcatactcgcgcgtgatcgcgtcggcgttcaccgccacggtcatgccgcacaccgggtcggtggcggtttcgccgtccgcgggggcggtgtggtgcatgtgcattcccatatccatagtgttctccttgttggttggattattggattggtcagatgcgtgattggtgtgattcagcgtggtgcgatcgtcgatgatgacggttggctcgtgaggcgcgttggatgtggcggagccggtgatgttggcggcgttggctgattcggccgatccggttgattcgacatccgccgtgctgctgcccgagccagcggtgccatcgacaacgcccgcgttgatgttcgacccatgcagcctgttcgcgttcagcaccaggcacactgagctcaacgccatcgccagacccgcgatcatcgggctcaacagccagccggtgaacgggtagagcacgccggcggccaccggaatgccgatgacgttgtaaccgaacgcccagcccagattctcccgaatgttgcgcatcgtggcgttggacaggttgatggtcttgataacgccgcgcaaatcgccgctcatcaaggtcacgtccgccgactgcatcgccacgtccgtgccggtgccgatggcgatgccgagatccgcctgggccagtgcgggggcgtcgttgatgccgtcgcccaccatcgcaatcagagtgcgggattgcgcggccgtgcgggaggtgccgtccgcggacttgacggcggcctcgtcgcgttcgcgctgcagtttggcgatccagtaggccttgccgtccggcttgacctcgcagatcaccgtatcgatgccgacttcgcgggcgatgcgcccggctacctcggccttgtcgcccgacagcatcaccgtgcggatgccgcgtgcgcgcaacgccgcgatggcttcgcgcgagccttctttgactgtgtcctgctcgtagctcggcttgtcccagtcggcggccgcgtccaccacgccgcgcgtgatggtgccggtcttgtcgaacaccacggtgccgatgcgacgcgcctgttccagcgccttggcactggtgaccagcacgccgttggtggcacccaggcccagcgagaccgtcaccgacagcggtgtggccagtcccagcgcgcacgggcaggcgatgatcagcacgctgaccgcggtgaccagcgcgtgcgccagttgcggtgtcgggcccaacgacacccagatggcgaacgtccagatggcgatgatcatcaccgccggcacgaaataccgggcgatcttatcggccagctgctgcaccggcgccttggtcgcctgggcgcgggccaccatcgccgcgatctgcgagagtaccgtgtccgcgccgacttgggtggcgcgcatcacgcagtcgcccttgagcagcacggtggccccggttaccggatcgccgacggttttggaaaccggcttggattcgccggtgatcatcgattcgtcgatatgcgcctcgccggccacgatgatgccgtctgtgggcacgcgctcgccgttcttgacgaccagcaggtcgccggtggcgatggcgtcgatgtcggtgtccgtgaaatacgccggattgcgccattcgatgccgtccacattgtctgcggaagtggcgttgagtttgtgcgcggtgcgcgggcgcagtttgatgagcgactgcaccgccttgccggtgccttcgcgggccttggtttccagaaggcggccgaccagcaccaaggtgatgaccacgccaaccgattcgaaatacggttcgcgcgagccttccgggaacacccacggggcgatgcaggtcaccagcgaatacaggtaggcggccgaagtgcccagtgagaccagcgagttcatgtcgggggagcgatgcgccaacgcggggaagccgaccgtgtggatcggacgcccgcagtagaacatcaccggcgtgatcaggatggcctgcaaccacgggttcaccatccaatgcggcaccagcgtgggattggccatatgcagcatggtgacggcgaatgccggcaacgtcagtaccgcggccacaatcaccagcttcgtcagcgccttgatctcattggcgcgttcagccgcctcccggcgctccccctccgccgcatccacggcggtaggtgccgtatacgaagcatcaggatgaggaaggggcgtgttctcatccgagccgtcctctccctcaaccctcaacaacccatgcaccatattcatgccgcacgcaaacggatactcgcccgccggcaacgccggcagtttcacgtcggtggtggcgttgcccggcagcatggcgtcaagtcccagatcagcaaacaccacatgcgaggtgcattcgccggtctcctgccggtcgaaggtcagtgtgatcggcgtacccgcacgcatgctcaccacggcgggggagtacccgcccttgacggtgatcgtcgcggattggcgttcgccggaagcgtccatggccccggccgttgccttctgcgttccgaagaagaaccgcaggaccagccatgtcaatgcggccgccactatcagcgccgtggcggtcgagaagatgctgaactccataactgttccttcccattcctaatgcactgaacaacagtgtataccctatacccctagagggtatatgatggggtgtgttcagctgacggataagtatcagggggttgcgatgcatggttatgacgaagacaaggccaaggtcatcgcacgattacgccgtatcgaagggcaggtgcgcgccatcacgcagatggtggaggatgacaaatactgcatcgatattctgacgcagatttcggcgtcgaattcggcgctgaaatccgtggcgttattgctgctggacgatcatctcaaccattgcgtgcggcaggcgtcggtccagggcggcgaggtggccgatgaaaaacttgcggaggcttccgcggccattgcgcgtctcgtcaaatcgtgacgagttctgccgcatgatgacgcgcgctggcaaatcatgaaaggccgtctgacgctcggatacgacacagcataataacggttgatgctcgactgtgataaggccaagcgtccaatgtgggctgctgagcgtccgtttaacggcttgaaatcgtcgagttcggtaaaaatttaccgtcattcaccatcgatgacatactgggtaccatgtttgagcaaataggaaccgtgattatcgtcatcgtcgtgctagtggttggtgcagggcttggcctcttcgccggcttcgtgctggggcgccataagggtcaggagatggctcgaggcgtcaaaagcgaggagctggaggaggccaagacctcgctggagaatgcgcgattcgagaatgctgagctcagtgctcgcaatgctgccgcacaggctcagattgaaggcgtgaaccagcaattggctttcgccaagtcacaacttgcccaggcgcagcaggctgagcagattcgcattcagcaggaacgtgagcgtgcggctgcggaggcggaacggaagcgtcaggcggatgctcgggacgccgaggccaagcgtgctgaacaggaagcacgtttgaaagaacagagcaaggtgctcgaggcgcttgcgccagtggccaaaaatcttgataccttgcagaacaaggtcacgcagatcgaagagggccgcaagagggaaatgggcgcattgggagcccaactcaaggggctcaacgaccagcaggcccgtttggacaaggaaaccagttccctgtccgccgcattgcgcaacaacaaggtgcgtggcgcgtggggcgaggcccagctcaagaacattgtcgagtccgccggattgctggaacatgtcgatttcgacattcaggtggtggtcacggatgccgatggacgtacgttgcgcccggatatgatcgtgcatctgccgggaggcaagaccattccgattgatgccaaagtgccttatgccgattaccagcgtgcctgcgagatcccggacaccgccagccccgaggatattgcccgccgcgatgatttgttacgagcccatgccaaggcgttgcgcgagcatgtacgtgctctcggcgaaaaggcctattggaatgcctttgatgtggcacccgattttgtggtggccttcatccccaatgaggcgctgttgcaggccgcgctcgaagccgaccccacactgatggatgatgcgttctctcgcaaagtggcgctcacctcgccggtcacgctgtgggccgtgctgaaatccgtggcctatgcctggcagcagcagtcgctcaccgatgacgccaagcagctgttcgatttgtcccgagaactttacgaacggttctccacgttgggtgattatgccatcaaattgggcacccagatcaccaagacagtcagcgcttacaacaagttcgcgtccagtttggaacgccgtgtgttgcccaccgctcgcaagctgcaaaaaatcgaaccgaccaagatcatcgaggaagtaccgatcatcgaatcagataaaggcaatgtgagcgaactgtccgcccctgaagtggtgccggccgatgagggtgatactcatctgactgcctcaggcgatagtctggagtcatgactgaatctggattccgccccactggtaccccggacctcgccgtcgcgaagagccacaatgactttgccatgctggagccgcgtgaacagctagccaccttgctgagggagcatgtggtgggccgtccgttctccgaacttgccgcggtgactttcgaccaccatgccgccaccgtcatgggccatgtactgattgacgctttggaagatgcgggctattcggttgatgacttcgatgctgttggtgccttgaccgcagcatctgtgcccatggtgtccgccatgatccaggccgccgcctctcgtggcgaggacctagacggattcgtgatggacttcgtctacccgtccatcaagggcccctccatcgaaggccgccgtgtggtgctgttggatgcttggctgtccgaaaagtcgtacgtgcagaccagctcgctggtcaccctgcgcaacggcaatgagctgagcctcgactttggcatagtggagcagctgggtgccaaggtcgtggccatcgcctcgctggtcggtggcggtgccaaagacatcaatgtggtcaacccctccaccggcgacgagcaaacgctccccttcatccaggtcttcgacgaatccgaactgcggtaaatccacctttgacttccctcgcataaagtcagccgggctgagccgcgaagttgactaagaggaaccggtgaatagcgttatcgaggagaaagattgcacgcacccaaccagatttctttggctgccaaagcttcaggtgaaccggaattccgtgaaatcggccttgggccgtggtctgagacccatcccggcgagcctcgtcccgacgatccgacttctccgaattatgacggtcgtttcgactcggtgctgttgaatgacggcgaccgccgcaacgtattggatcgttaccgctactggaccgtcgctgccattaaggccgatcttgacgctcgagggcgtcatgacttcgaagttgcggtggaaaactggacccacgatttcaacatcggttccatggtccgcaccgccaacgccttccaggccaagcgcgtacacattgtcggtccacataagtggaatcgcaagggcgcgttgatgaccgaactgtaccagcacgtcgaacaccacccctccatcgccgaactggtggaaagctggcatcatcgcatcgccggtgaaatcgcctatgaacgagccaaggccggtgccgccgccatccatgcgcatgatgtggctgtggatggagacaacaagcaccttcatgagctgctggccgaaatcgatgcttgtgatgcgcacatcaaggagcttcaagccgcccgcgtcatcgccctcgatatcattcccggcgcagtgccgatggaaacctataccttccccaagcggtgcctgctgctcttcggtgcggaaggccccggattgagcgagaaggccctcgaattggccgacgatgtggtctacatctctcaattcggttccgtgcgctccattaatgcaggcgctgcggcggccgtggccatgcacgcatggattgcccaacacgccgtatcaggcgtgtagccatgcatcgacaatcccgccgcatctgcccaatatgggccacattagaggcatgatctacgccaccaaatccatcgccgcggcattaattcgcatttgccgccggcatcgtcggcatcctgctcgccgcaggcatcagcagctccgcgcagtccacactggccgaagccgttaaaccggactactggattcccgaatggtggcagtccggcctgattctcatcgcctgggctgccgccgcatggatcggcggtctcatcatcaccggaaaagcggatatcagatatcaaataacgcgggttactgctttggcagttctgccggttcggacatggtcctggcagtttgtcatggctatggctttggcggttctgcagtgaccatggttctggtgactctgaccccatggatttgaccaccgtggttcactgcgcttaaccagctcccatcactgttccagcatgaggtatgccggctgcccgcagcttattgagtaaaggatgttgttgcatcacctcctcataggtgaatcggacaatggtgtcgactttggcccggtacagtgccgtctcccgttctttctccgcctgaactgcaccacgaacacccttgcggtcattcatatccgggttcacatatttttcatagccatcgaattcgcccacgataagccgattctcaggtagccgccagaggaaatccacgcgatacagagcaccggtttgcgggtcggtgatgttttgttgcagttctggggctaataggccgcctgcgatgatggtgcctcgtccaagtgactcgccaccattctcactcgccggattggcataatgcagtaggcggaatatcggcgtgcaatcacgtcgcatagtgctgcacacattcagaatgtccgtgatggcgacgccgttgcgcagcgccgaatcgataatgggcagtgcaaatcggaagtcgacggacagcccgcaatccaccaccgttctggctttgctggtcaccgggagtccattggcatattctggcgtgctgcttgacgtgaagatgcgtttgacctttgcactgctggcgttggggcctcgtgatgttgtggcgagagtgatggtgccagcatgaagatgccattggtgttcaaaatcgtggatggccgctgccgtgaccccggcgaacacccaatccggatgtctgttatgaagagttcgtgcaatatgtctgatacgttcgtcgggttgcagcgaatcccagtattccgaagcggcgtacatgttggggaatacacgtttgagttcgcgcgcctgcacgcgccgagccagcgccgagcggtgtgccttggttgttccataagcgcactgttgcgttgcttcagccttcgtgatgagtatgtccactgctttgtgatgtttcatgattcgacggtatgccaatggtgaacacggtgtctatctgtctggggttatgtggttctagcttcggtgcctagatgtgtgtttttgcctgattatcaggcatctgaccgtattggactgattatgtggattcttttgggtgggtatgcaaaatgtggataactggcgaggtgcgcagggcgattgtcgttcatatgttcgatgtaggtgtgtttgggctcattgtgagcttattagggtggccatgcagatacttcagtggggcacatttgaggttgggccgtggcgttgcctcgctgcggggcgtctcagcggggcgttttattggttggaccgcggttttgttttgctgggatggctgagcggggcgtttcatcggtcagctcgcggttctgctctgctgcgagtcgtctcagtaaggtgaacttgcggtccggcaacggttttgccccgccgaagaagccagcagcggggcaaatgctcgaccggcttgagcttctgattcgctgaggggctccagtaggcgggaaaatgaggcttcccgacaactgcgtgtcacatacggctcatatagttatggccatgccaacattttcacgtgaagaaatcgtgcatttgggcgatctggcccgaatcgcgctcaccgatgaggaaatcacccgtctgcagggcgaactgaacgtcatcgcagactccatcaacaaggtccaggaagtcgcctccgacgatgtgccgccgaccgccaacccggttcctctggaagcctacctgcgcccggacgtcgccgaaaccccgctcacgcaggaagaggcgctcgccggtggcccgaagaccgaggccggcatgttcgtggcaccgcgaatcctgggaagcgaggagtaatcgatgagcaacgaaaccgcaactctcgtcaaactgtctgctgccgagcaggccgctgccatcaagaagggcgacgtcacctctcgtgagctcgtcgaagcccacctcaaggtgatcgaagccgccgagccgtccatcaaggccttcctgaaggtttccggcgatgtggctctcgagcaggccgacgccttcgacgccaagtccgccgaagacaaggccgccctgcctgagctggctggtgtgccgatcgccatcaaggacatgatcgtcaccaagggcattgagaccaccgccgcctccaagatcctcgaaggctgggtgccgccgtacgacgccaccgtcatcgaaaagctcaaggccgccggcatgccgattctcggcaagaccaacctcgacgaattcgcccagggctcctccaccgagcactccgcctaccaaaccacccacaacccgtgggataccgagcgcgtgcccggcggttccggtggtggctccgcctccgcggtcgccgcattcgaagccccgctcgccctcggcaccgacaccggcggttcgatccgtcagcccggcgccctgaccggcaccgtgggcgtcaaacccacctacggcggcgtctcccgtttcggtgccatcgccatggcctcctcccttgaccagatcggcccggtctcccgcaccgtgctcgactccgcactgctgcaggagatcatcggtggccacgacaagcgtgactccacctccatccccgaaggcccgcgcccgatggtcgccgccgcccgcgaaggcgccaagcgcgatctgaagggtatgaaggtcggcctcatcaaggaactcggcggcgacggcttccagcccggcgtcgaggcccgcttcaacgaggccgtcgacaagctcaaggagatgggtgccgaggtcgttgaggtctcggttccgcacatcggctactcgctgggcgcctactacatcatcatgccgtccgaggtcagctccaacctggcccgttacgatggcatgcgctacggcctgcgcgtgatgccgccgaccggcgtgcctcagaccgccgccaacatgatggcctacacccgtgaggccggcttcggcgacgaggtcaagcgccgtatcatcctcggtacctacgccctgtccgccggctactacgacgcctggtacggttcggcccagaaggtccgcacgctgatcatccgggacttccacaacgccttcgagaaggccgacgtactcgtggcccccaccagcccgtccaccgccttcaagttcggcgagaagatggacgacccgctggccatgtacatgaacgacatcgccaccattccggccaacctcgccggcgtgcctgccatgtccatcccggccggcctgtccgacgacggcctgcccgtcggcttccagttcatcgccccgcagcagcgcgacgaagtcatgtacaagccggctgcggccctcgaagccgcgctggaagacagctggaacggcccgatctggaacgacctcaagaccccgtggcttgacggtctaggcaagtgagcatcggaaggaaagaaacaacatcatggctgaaaaactgatgaagtacgccgatgccaccaagaagtacgatgtggtcttcggtctggaaacccatgtggagctgtccacgaacaccaagctgttctgcccggcccacatcgagttcggcggcgagccgaacaccgagctgaccccggtgagccttggcctgccgggctccctgccggtgatcaacaagaccgccgtcgattacgcgatcaagctgggcctagccctgcactgcgaaatcgccgagtggagccagttcgcccgcaagaactacttctacccggacatgccgcgcgactaccagatctcgcagtacgacaagcccaccaacggcaatggctacctggacgtcgaactggaagacggcaccgtgttccgcgtgccgatcgagcgcgcccacatcgaagacgacgccggcaagaacacccacgtgggtggcgccgacggccgtatcgagggcgccgatcattcgctggtcgactacaaccgcgccggcgtgccgctgatcgagatcgtcaccaagccgatcgagggtgcgggcgaccgcgctcccgaaatcgccggtgcctacatgcgcgccatccgcgacatcgtgcgtgcgctgaacatctcccacgcccgcatggagcagggcaacatgcgcgccgacgtgaacgtctcgctgcgtccgagcccggacgccccctacggcacccgttccgaaaccaagaacgtgaactcgttccgcggcatcgagaagaccatccagtacgagatccgccgtcaggccgcccgtctggacgacggcaaggagattctgcaggagacccgccactgggatgaggcttcgcagaccaccgccggcggccgtctgaagtccgatgccgacgactaccgctacttcccggaccccgacctcgtcatgctccacatcaccaaggagcacatcgaggagatgaaggcccagatgccggaaatgccgcgtgagcgccgcaaccgcctcaagtctgagtggggcctgagtgatctgcagatgcgcgacatcctcaacgccgacgccctcgacctgattgaggaaaccgtcaaggccggtgccaaggccgccggtgcccgcaagtggtggctgggcgagctttcccgcgaagccaacgccaagggtatgtccctcgaagagctgccgatcaccccggccgatgtggccgaggtcgagaagctcatcgcctccggcaagctcaacgacaagctcgccaagcagaccgtcgaaggcgtgcttaagggcgaaggcactccggatgaagtcgtcaagaagcacgactacaagatcgtcgaagacaacggtgccatcgaggcggccgtcgacgcggcgttcgaatccaacccggatgtcgtcgagaagctcaagagcggcaacatgaagccgatgggcgtgatcatcggtgccgtgatgaaggccacgcgcggtcaggccgacgccaaggccgtcaccaaggtcgtcatgggcaagatcaagggctgattagattcactggctcccgctggcgggagctgtcgaacggagtgagactgagggtggtcgccatgtacggatgaccaccctcagtccgcttcgcggacagctcccgccagcgggagcacttatttgtagggagatcctccagttcaaattcgttggacagctcccgccagcgggagcctttattgattctgtaagaaagtcgtctcagagcatttccagcgttcacccagtcgagtaagatatgttcggcactggaccgtgagccgaaacaagccgaaccgggggatgtataccgatgaccgcaaccaacgagacgctgagcatggctaccgaagcgcaactgaagcgcgatctgccacagagcatcgtcattccgccaatccgtggcgaaatggtgcacctgcgccccgccaccatcgaggacctggctcgtttggatgaacttgatgccttctatggcgcatccaagatcaccggcaaggatgcggtcaccgaacgcgccatcgtacacacatgggtccgccgctcccaagcctgggaagccggtcaggcacccgccgaatccggcgtgggcgacccggaatcccgccgcaccatcgcatgggccgtattgactgacgccgaccatgacgatgacggtcagctcgatgcggccagcaccgataatgtcatcggcatgattttcctcatcgacatcgacggctggtccaagtccgcccgcatccagatcatcttgggccgtgagtaccgtggccgcggctactcccgtgacgccatgccgcgtgtgatgacttacggctttgcgcccgaaccggccggcctgggcatgcaccgcatctgggtgagcgtgccggaaaagaacagccgttcgatttcggtctaccagtcgctcggcttcgtgccgtccggcacctcgcgcgacgcgttgtgggatgtcgaaaacaacaaataccaggaccttatcgtcatggacacgttggtcgacgagtacgatccgattcgttcgcttgacgcttttggtatgcacttgattgaggacaacccgggtgtcaaggaagcgctgtccgcgcgtgagcattccatcgccatccagcagaacaagccggaacccgagccggcacagcgtggtgaggcagccgccgtcacgacgagtgacgtgcagtcccaggcccagacgccggcggccgcacagccagtcgagccacaggccgggcaccacgacgatacgcagaagaacacgcgccacagtctcgaagaggaaagcaactggccgtacggccaggcggaacgcaagccctcaaaggaagcatggtggcgtacgctgggccgcggccgcaaacgcgatacggaaagtgagtgagtaaacaagcatgagtgccgaggatctcgacaattacgaaaccgacgccgaactcgcgctgtatagggaatatcgtgacgtcatcaagctgttcacctatgtggtggagactgagcgtcgcttctacttggcgaataaggtcgatttcaacgtgcgttccgctggccaggacgtgtatttcgatgtgcagctgactgacgcatgggtatgggatgtctaccgttccagccgtttcgtcaagtctgtgcgcatcgtgaccttcaaggacgtgaacgtcgaagaagtccagaaaaccgatatcgacattcccgacgatattcactgacaggcaatcgtctgatacagcctgtattgacaatgcgcggcattccgtcatcttacggcggggcatcgcgcattgttcatacaacgcatagcaaaagttcagattcgtaaccttgccatcgtgtgtcttgtttgcttgcggttgatagaagatgatgctgcttgcacttgcaggaatctcgctgaatctatggaaggttcgtcgctgacgaattagcccaagaccaaaccgattcgccgcgctgtgcgtgacgcagcgttgccgaatacccctacctcacgattggatgcgtcgcctttctgctgatggaagacggcgcatcggtcgtatatcgggagaattctgtaagcattcgctcatctttcggtgtgcgattccggggcttctagtaaactgtctctgattttgcgtttataaggagcataatgaccgacaagcaatccgtagtgattatcggcggcggtccggctggacttaccgccgcatgggaactcgtcaaggatggcggcgcggaaaactatgacgtgaccgtgctggaggggacccgcgaattcggcggtatctcgcgcaccgtgaagcacaacggcaaccgcatggatatcggcggccaccgtttcttctccaaagacgaacgcatcatggattggtggaagaccgttctgccgttgcagggcgcaccctcctatgatgacaagaagctcggccgcgaccacgacatggagccgggcggccccgatccggagacggaggacaaggtgatgctcaagcgccaccgcgtgtcccgtatcttctggaaccgccacttcttcgattacccgatttcgctgagccccaacacgttgaaggccatgggcttcaagctcaccatggtggccggcttcagctacctgaagtccatgttccacaagctgccggaagacaacctggagaacttctacatcaatcgtttcggccgcaagctgtattcgatgttcttcgagggctacacggagaagctgtggggccgccacccctcccagatctccgccgactggggcgcccagcgcgtcaagggcctgtccatcatgggcgtgctcaagaacgccttccagaagcttagccccaggaagcgctccaacgcggaggtcgagacctcgctgatcgaggagttctggtatccgaagtacggtcccggccagctgtgggagaccgtcgagtccaattgcgaggccgccggcgtcaaggtgctgaccgacgccagggtggtcgaggtccgccagaccgatggcgccgtgtcttccgtggtgtacgaggattccgagggcaaccgcaccgagctttccggcgaccagttcatctcctcgatgccggtcaaggacctggtcaacgccatcgacgcggccggcgacgatcccgaggccgctgattccaagcccgccccggccgatatgaccgaggtggccaacggcctgccgtaccgcgacttcgtgaccgtgggcctgctggtcaagcacctgaagctcaagaacaccaccaacatccccaccctcggcaatccgccgatcgtgccggactgctggatctacgtgcaggacccgggctacaaggtcggccgtctgcagatcttcaacaactggagcccgtacctggtcaagaacgtggacgacaccgtgtgggtcggcctcgagtacttctgcgaggagggcgactcgttctggaacatgagcgaggaggacgtcaccaagttcgcgatctccgagctcacccgcatgcgtgtgatcaacggcccggacgaggtcatcgactcccatcgtgagcgcgtcaagaaggcgtaccccgcctacttcgacacctacgagcacatggacgagctcatcgagtacctcgacggcttcggcaacctctactgcgtgggccgcaacggccagcaccgctacaacaacatggaccactccatggccaccgccatggaggccgtcggcaacatcaagaccggcaagacgtccaagaagaacgtgtggtccgtcaacaccgaaaagtcctaccacgaagaaaagtgaataaaccttgttgagctccctcgtcacagagggagctttttttggttttcggcgggccgttttgcgttggtcgagttggcgttgtacagtaaacgaagttcgtgaaaactcagagacgcagcgaacattcatgagcggtgcaaccgcaataatcactcttaacgcctggataggcatgggtctgttcggtatggaaagggcaaccagtggcaaatagccagaatcttgaggatatgaagctgcctgagctcaaagagctcgctaaacagatgggcctgcgcggcacgtcgaccatgcgcaagcccgagctgctcgccaccctgcaggcggcgcgcaatggtggagagccgccggccggtgtgaccgtgcgcgctcccaaggccgccaaaaccgccaaggtcgtcaaggctccgcagtccgatgccgctgaggccaataccacagacaatgctgacgtggccacccagtcgccggctccggctccggccgccacggaaccgcagctcgatttgccgcttcccgtggccgacgatgccaagaaggacgagaccgaaccgcgacgcacccgtcgtaaggccgccgatgatgccgcatccgaaccgcgtgcggcccgccatcgtcgcgatgacgaccagtccgatttcgctcgccgcaagccgcgcaagaaggccgatgaggccggcgatctgctggccacgctcgatttgggagatgcagcgcctaccgagcgtcgccgcgagcgccatgaggacgtggaagttccgctgattcgccgagtccgtgatgatgaggacgagcagcctcgccgccgtcgtcgcactgcggaaaacagcgaagaaaccgtgcgtgacctcgacgatatcctggccacgctgcccacgcagaagcacgaggaaacgtccgaagacggcgagcagaacgacgatcacgagtttgtgcgtcgtaaccgccgcgaccgtagcgatcgcaacgatcgcgataaccgtaatgatcgcaacgatcgccgcagccgccgcatgcgtggccgtgatcgcgacaacgccgatgatgatcgtcgctatgatgatcgcgataatcgtagcgatcgcaatgaccgtgatagccgccgcgaagagccgcaggaggatctggtgccggtggccggcatcgtcgacgtgctcgactcctacgcttttgtgcgcacttccggctacctgcccggcccgaacgacgtgtacgtttccatgggccaggtcaagaagtacggcctgcgcaagggcgatgccgtccatggttcgattcgcgccccgcgcgaaggcgatcgtcgcaaccaacgccagaagttcgtgccactgcaggccatcgattccatcaacggccaaagcgttgaagaagcgctcaaccgtccgcagttctccaagctcacgccgctgtacccgcaggagcgtttgaagcaggaaaccgccccgaacaagctcaccggccgtatcatggacatcgtttccccgatcggcaagggccagcgtggtctgattgtctccccgccgaaggccggtaagaccatcaccctgcagaacatcgccaactccatcgccgccaacaaccccgaggtccaccttatggtggtgctcgtggacgagcgccccgaagaggtcaccgatatggagcgcacggtccagggcgaggtcatctcctccaccttcgaccgtccggcctccgatcacaccacggtcgccgaactggccatcgaacgcgccaagcgtcttgtggagctcggccaggacgtggtcgtactgctcgattccatgacccgactggctcgcgcttacaacatcgccgcccccgcctccggccgcatcctgtccggtggtgtggacgcgcaggccctctacccgccgaagaagttcttcggcgcggcccgcaacatcgaaaacggcggctccctgaccatcatctcctctgcgctggtggaaaccggctccaagatggacgaggtgattttcgaggagttcaagggcaccggcaacatggaactgcgcctgtcccgcgagctggcggacaagcgactgttcccggccatcgacatcaacgcttccggcacccgccgcgaggagctcatcaccaacccgcaggaactgccgattatctaccgtctgcgtcgactgctgggcggcatggagcccgagcaggcctaccagacgttggtgccgcgcctcaagaagaccgccaccaaccgcgacttcctcgccgccatcgtgcagcaggccaacaccggcaacgcggtcaacggcaactgaccagaccgctgaacaatagtgtaagggctgcaccccgattgatacggggcgcagcccttgccgtatatgatgcaaatacatcaactatcacattgcagttgtagtattgccgtcaacgttcacatgcacgctgacgatatatgagatgaaagatgtatcaatgggttcgattgttttgggagtggacaatggtgcggccatgttcggcgatgcggatgccagccatatctcctacggcgactatgacatctgagatatctgactttgcgcatcgtgcaaagccgcaatcgggagtatcctcaaatctatgagcgaaacgagcagcggctggcaaaggaccaccatcgactccgcccaggcggcggcccacccggaaaccgcacaagcggtggcgcgcatcaaaacgctgcgccaaaccatcgataacatcgattcggcggccatcgcattactggccgagcggttcaaggccacctcgcaggtcggcgtgctcaaagccaacgccggattcgcgcccgaagacaccaagcgtgaggactatcagatcgaacgcctccaccgcatcgccatcgatgccgggcttgatccggaaattgccgaaatgtaccgtgaattcgtggttaccgaagccaagaagcgccaccagcgcatcgccgatgctggtggcgacccgggcgtactcgacgtattcgcctgattcgcccgcagcgaatgggcacctttcggatattcgtctatagggcaagttgccggcagcgactacattaatacgggaatggaatgcccatagtggccgactgtatgaatgggatacgtagatgagatgtggtgccgcactggtcagttgcgcattgtgcgtggcttcgattctcggcggtgcttggatgtctcgtccgactccggttgattacggtccggtgctcgctacggcaagtgatatgtacgccgtcgccgatgccgaaggggagccggtccgttggtatgtggtagggaagggcggcgccggcaatggcgccagtgccgattccggcaatagcggttccactgataccgattccgccaatagtgattccggcacgtccaaggtttctcgtatccccgcttccgccgccaccctgccatggaaagtcagcgtcacctactcgcttgacggtccaaacgtcgaggcaaacgaggttgccggcgcatctggactgatcggcgtgtatatcgatattaagccgcaaaccaaggaggccaaccgtacgatcccggttgtcgcctttaccgtgcctacgcaggtagccgatgatgtttccgctgacaactccattacggtaaccacgcaaggttccaataccgtagtcgccgcagctggaaaagccgcaaccggcttggaattcagctgctatatgaacgccaaagacttctccatgagttccgtggcgctcgccgtattgccttccaattccagcagtccggtagttggtgctaatcccgatgccgcgaatgccgccgcacagcctgctgccgatacggatgtcgcccaactcgtcgcctctgccgccatactggtcgattcactgaccgacgccggttccggggagcatcaacagctcatcgagcagcttcaaaccctgcgcgataatgagcgtgcgctggacaagtccgtagtggccgaacgcgaaaccgcccataagcggacgtttgaagactatatggccgcgtatgtgggctcatataccacgcacctgtctggatcgattggtacctccacccagttgccggcgttgatgggcacggccggcgaactgtccggggatacgcctttggcacaagccgtactcgacttggccaacgcggtgaacaacgtcagtgccgcacatcagcatgccggtgcggtcgatgcgttggatgaggtgattcgccgcatccagcagcaaggcaccaccggactggtggatgatctgaccgccgaggcttcggaggaagccactcgaggctccaagcaatacgccgatggccagagccagctctccgccgcaatgattccgtattcgatgaaatacacggacgtctacacggccaatttgagcgccctgaccggcggcacgtcttcgggcgccaccgcttacgagagccaagccatcgccgaaaccaacggtagcgatgaactcgccgacgctcaatccaaggtcgatgccgcgatgagcacgcttgccaccgcctccgagcatacgggcaaagccacggccttgcgccagattgtattgcgattctccgatcagttcgaaggattcgcgtcctcggcttccggcagcgatggcgatggctcgtccggtgatgtctcttccggtccggtgaccgaggctcaggcactgactggcctggtcgattcgcaatcgcaatcgttctacggcaagacccgggccgcccaagccaagcgtaaggccgatgccgcccgtaagcaggccaaagccgcgcaacagcagcagcagtcgcagcattccaaggcctcactggtcgatgacaccatgtccatgtctgctggcgatgtgatgaactatgcgggtggtcttacttcggccatcggtggtggaggtaagttcgattcgtccaagagcgatggttcgggaacgaacgactcagccaagtcgagcgatactggcgattccggcaacaatcttgacaccgctccagtactgttcggctttggcactggcggcacgctgctcaagcatgacatgagcgcgctgatcaatgagaccgtggagatcagtgatgctggcacgctcttggcgcaggctgtcgcgcagctcgatagccccaatacgcaacaaaaaaccgccgaaaaccgatacctcatcgtgattccgacggtgtgatggtgtatgcgggaaaatccgcatgcgacaggtgcccaatacgcgtaaagtgcgttatcggtgtgggacgccgcatcaaaaactggctttttcgatgcggcgtcccacaccctcttgtaagtcagagctaactatagtttgaagaatggctaaattccaaggatttgttgattcggtctgtgggacgccgcgtatataaaacgtttgacacgcgtggtggcccacgctattgtgggccgccagcttacaatgcgggatatttgcgtgccgtcccacagtcgtgtcatccgaacgtcaaaaaacaaaagaggggaacctcaataggaggttcccctcttttgttgttgtgcgcaacgctcagtgctttggcttcttggctggccgagccgttaagcgggaagcccggtgggcttcccgtaggctcggaacgagcggcattgccgtgagacctactgttgttgtgcgcaacgctcagtgctttggcttcttggctggcggctcaccgagctcgctggcttcgacggcgacctcggtttcgggcgcgtcttcggcggcggattcctcggcgtgcttggccaccaagtcgaacttgccgaccacgcgaccggcctgcgcgatatcgcccaaggcggcgtgaatcgcgttcacaccttccgaagcagcggacagtgccacagacaggattggggtcttcatggagaccttggcctcggacttgatcttacgcagctgctccacggccttgccggcccaagtcagcagctcgggggaagcaccggtggcggcctcgacatacgggtccacgaccggccaggcggcgcgatgcacggaaccggaaccggcgtgcatccagctccacacttcctcggtggcgtacggcaggtacggggccagcagacgtgcgaaggcgtccaagcccagacccagagcggtgcgggcggacttcacagccttctcggacggcacattgccgtgctcgtccggagtgccataggcgcggttcttgaccagctcgatgtagtcgtcgcagaactgccagaagtatgattcgatgacttccagcgccttggaatgctcgtaggattccagcgcctcggtggcctgacgcaccaccaaagccagcttggccatagcggcgcgatccagcggttcggtcacatcggccgggttccacgaggtctcggcggcagcgcccacgtgatggttctcgtcctcacggccgatggccagcgcgaacttggtggcgttcagcagcttgatggccagtcgacggccaatcttcatctggccgatgtcgtacgtggcatcgaggcccaggcgagcggcggcggcccagtaacgcacggcgtccgcgccgaacttctcgatcggctcgttcggcaccacgacgttgcccttggacttcgacatcttcttgtggtcggggtccagaatccagccggacagcgtggcatgggcccacggcagacacttgttctccaagtgcgcgcggtccacagtcgagaacagccaggtgcggatgatgtcctgaccctgcgggcgaaggtccatcgggaaggtggaagcgaacagggccttggaggcctcgtccggctcggcccagtgggtcacgatctgtggggtcagcgaagaggtggcccaggtgtccatgatgtccttttcggcggtgaaaccaccgggcacatcacgctgggactcgtcgtagccctccggcacgtcgatggtcgggtcgatcggcagacgatcctcggacggagtgattgggtgatcgtaatccggctcgccggaagcgttcaccgggtaccacagcgggaacgggacgccgaagaagcgctgacgggagatcagccagtcgccgttcaggccgtgcacccagttctcataacgcacgcgcatgaagtcggggtggaactcgagttccttgccgcgctcgataagctcggcgttcagcttggcgtcggtaccgccgttcttcaaataccactggcgggaggtgacgatctcgagcggcttgtcgcccttctcgtagaagttcgtcatacgcttggtcggggtcggctcgccgtccagatcgccggactcgcgcagcttgtcgacgatgatcttgcgggcggagaacgtggtcttgccagcggtttcggcaaagacctcgcggccggccgggtcctcgatccagtccggggtatccatcacgatacggccgttgcgctggatgatcgggcgggtgggcagcttcaggtcgcgccaccactcgacgtcggtcacatcaccgaacgtacagcacatggcgataccggcacccttgtccatttcggcggccgggtgagccagaatcggcaccttgaccttgaacagcggggagtagacgtactggccgaagtactgcttgtagcgctcgtcgttcgggttggcgatcagcgaggtgcaggccgccagcagttcggggcgggtggtctcgatgtagatcggggtgccgtcctcaaagcggaaggccaccttgtggtagaagccggggtattcgcgcgattcgagctcggcctgggccacggcggtctggaaggtcacgtcccacaggccgggggcgtcctgctggtaggcctcgccacgagcgaggttgcgcaggaaggccttctgggccacacgctgcgggtgttgaccaatggtgtggtaggtctgcgaccagtcaatggacagacccagcttgcgccacagggcctcaaacagcttctcatcctgagcagtcagacgctcgcacagctcgatgaagttcttgcgggaaatcggcacctgatccttggcgtcgatcttcttgccatcggtgccctcgaacggcggcttgaagtccgggtcgtaaggcagagacacgtccacgcgcacgccatagtagttctgcacacggcgctcggtaggcaggccgttgtcatcccaacccatcgggtagaacacgtcgtagccgcgcatgcgcttgtaacgcgcaatcacatcggtgtgcgtgtaagagaacacgtgacccacgtgcagcgaaccggagacggtgggcggcggggtgtcgatggagtagacggccttgcggtcgcgggtattgcggaatttgtaggtgccgtcttcatcccagacggcgcgccacttgtcctcaagtccgtccacaccgaccttgtcgggcagcggggtgaggttggcgttgatgatggatttgccttcagtcataaagccaaagtttatgcacgttgcatgacaagccgaactgtacagtaaacagcccagtaggctgttcgcaggcgagatacgaacgatcgaacgatagtgagccaaggactatcgggcgtagcccgtccgtgactgaaggttgcctacttcaccgtcaacccggccagcggcatgcgacgattgatcatcgaggtcgggtagccggagaccttggtggacgccacagtgaagcatttgcgggtatacagccaatcactggccgcatcctcgctgatcagccgggcgtacgccttcattcgtgcctcataatcggcgtcattagtggcggcgcgagcatccgcataggcctgttgcgcttcggtatggtcgtaatggaacatggaatcggggtcggcgaatatgccggcatcatccgtgccgtccatgctcatcacggtcagttcccatttgccgtccttgattcgtttggcataatcctcatcggagagcacttcaaggttcaccgtggggcgcggctgccgctcgatctgctgcttgatggtttcggccaacgaccggtattcttcgggaaccaccagattcaccgtagtcagatattgcgcaccgaagtaggagaacatctgcccagcttggttttcgtcatgcggatacagtccggtcaaatcttcgtatccgggttccagcgggctgatggggccgcccaatgctccggctgcgtcgggttgggcggaggcgatgccggctgcgtcgatctgatagcggaaggctttacgcgcctgttcgtcggagagcagcgaatcgatgccgttgttgtaggccagcagcaccttatccgtagtggccccctccttgacggtcaggccatccttgccgttcaaaccggtggccgtcgaagccgaaaccggtgccgccatatcgagactgccgtcggtcagggccttgctgagcgcatcggcgtcggagtattgcataaattcaacgatattgctggccgcttcggtgccatggtaggtatcgctgcgcgccagcttcagggaatggccaggctggaaatcggccacggtgaatggtccggaacctatggccttgcgttgataatcggcactggacgactcggaatcgtagacaatgccgagtttgccggacagcgctcgcagcagcgtcggattgggcttggcaagcgtaatgaccaccgtggtggcgttcggattggcgaccgacgtcagatcgcccaattcgtcgacgtccgccaccttgttggtcacgttctgttgcaacgaccacacggcgtccgaggcgtccaacgtatgaccgttcgagaaggtgacgcccgattgcagtgtcagggtgacggtcagtccgtcatcggaagtcttccagcttgtcgccagtcccggctgaatcttgttgtcttgatcgacggtcactaatgtctcatacacattgtcgacgagcaggcgctcggctgccgcagaggaatcggaccgaatatccaaggattgcggcatatcgtcgatgccaatggtcacatcggcatcgagggatgatctcggctggaaccggttttgcatgaacgtccatcccgcaaccacgagtgcgccgagtgccacggcgactccgagaaaaatcccccacttggaccatgtattgttccgcttgctgtgctgcatggttttcagtctagcggtggattcagcctagaatccgcaattcaccatgatgaggtatgagttagcgcttggacgtgctcttgccggcgggcggcgcatagctagggcaggtgtcggacagcgggcagttggcgcagtcgggggtacgtgcgtggcaggtggcccggccgaacagaatcagtcggtggctgagattcgtccactcttcgggcggaaaacaggcggtgatttccttctcgattttcacgggatcagggtgtgcggaccgccaatccgaccgccaacgcagtcgtccggttacgcgcatcacatgcgtatcgaccgggaatccggggatatcgaacgcgttgccgagcacgacgttcgcggttttgcggccgacccccggcaagctggtcagttcatccatcgtgcgcggcaccacgccgccgaaccgttcgtccagtgccgtggccagtccgatgagatgctgggttttcgaacggtagaaccccagcggatgaatgatgtcttcgacttgggccgggttcgcggccgccaagtcacgggcggtggggtaggtggcgaacagttccggggtgaccgtgttgacacgcttgtcggtggtctgggcgctgagcacggtggcgatcagcaattcgagcggattcgagaaatgcagtgcgcaagcgggtgccggaatcacctggcgcagaatgtcgtattcgtcatgcatgcgcgtgagacgcgcggatttggtttctctcatcgtatggacctaagcggcgtaatgtcgatgattgatggtttgtagcgctgctggtctgtcaggcggcggtgttgagatcgggggtatcgtcatcggtgccgatggcggcagaggatgctttggcggcctgctgtgcggcggcagtttccttatccgtctccggcgggtcgaatcggtagcccacgttgcgcacggtgccgatgaggtgttcgtattcgccgccaagcttggcgcgcagacgacggatatgcacgtcgaccgtacgagtgccaccgtagtagtcgtagccccatacttcctgcagcaactgggcgcgcgtgaacacgcggccggggtgctggaccaagtacttgaggagttcgaactccttgtatgccagatcgatggggcgtccatgcagggaggcggtatagccgttggtgtccacaatgaggtcgccggagcgaatctggccatcttccaccgtggtggtggattcggcgggagaaccggctgctgcggctgcgggagcgttgccgcgctcggagaccaatcgcaatcggccctcgacttcagccggggaagcggtggcgaccaccacatccgcaatgccccactgggagttgaccacggtgaagccgccttcggtcagcaccagcacgattggcgtggacaggccggaagcgtggatgagacggcacaaggttttggcggtcgccagatcatcgcgtgcatccagaaacagaatggtgttctccggcatcttcaccaagctggctgcatccatcggcagcacgcggacgcgatgagaaagcagggcgagtgatggcaaaacggtggcggggtcgctggcgaaagtcatcaacgtaagatccgtcacgctaatccccctttatcctgcaatgtgttacgcaattgcttggtgtggctgtacgagtcgtcagcggcgttatgccgctttcgcgcggtttttcattattctacgcgcttgtagtggacacataggttacaagtttgcggaatatggaacggcagacgtccatcaaccgatgacacggccgagcaccagtgcggttgcggcgatggtcacgcccatcagcattaccggcatcaggccggtaccgatccacggatagcggatatccgggtccggatcggcgtcacgcacccacaacgtggaggccacggccaaggccagtcccaaaacgatgaggatgatcagggcaacggttcccgcaacggtgcccttggcgagcatcgcgcccaaatcaggcaggaagcaccagccggccacggcgagagccgccacaccggaagtcacggcgtgagagagtgcgcggataagatgttcgcgcttctcacgagccatctggcgcccgaaggagaagaccaccagcaccaccagcagcaggcccatggccagtgcccatgaataccaaggaagtaccgagccatccgcagcggtctgatccggcggaaccttgccggtcgggaaaggtacgatgacgaaaatcagagaaatcgcgccaaacaccaaagtgacgatacgatccagcatgctgccgcggaacggccagaacacgacaaatgcggccaacgtcagagcggcgataatcaaagggatgatggggacggcgccaggggagggaatgaccgtggctgcgatgagcagtacataggacgtcagttgggccaacaacatgctcagggctttgttcttccaaccctcctgggtgatctcggtcatgatacgcctctcagataatcgaatttccatcccaatcctacgtcgggcattggaacggtgaaatcaaacaaaatagccctttctggtgaaggggcttatgacactaaatcagaacgcgataacgcccaaatgctccaacagcactttgacgccaagtagaatcagcaccacgccgccggcgatctgcgccggctcctgccagcgggagccgaacgcgcggccaatgtacaggcccgcagcggagaacagtccggtgaccacaccgatgctgaggatggcgaatgccatatgggctttggtgaacatgaaggtcaggctcacgcccacggcgaacgcatcgatgctgcaggccacggccaggggaagcatatgcttccaatcgaactgggcggtctccttggagttttcctcatcttcttcgaaggcttcgtgaaccatgttgccgccgatgaacaccaacagggcgaagatgatccaatgatcgaattgggttacgtatttgctgaatgtagatgccgcgaaatagccgagaatggggaacagcatctggaatccgccgagccagagggcgcttttcgcggcgtcttgcactcgtacgcgggatacggccagacctttgccaatggatacggcgaatgcatccatagctacggaaacagaaataagcaggatttgaatgattatcggaatcatggtgcgacagaaggttcatcgccggattaccgtgcgatgggcctcgaccagcgttcctacacgccgcctacgcctagctgaaaaatacaccagcactatatcacgcgatgcacgtcgaatcaaaaaggcgggaggcctccggagaggtctcccgccgacgattcggaatcgaatcacttgccttcgttggcgaggcgttcgcgtgccgcgatgatttccttctcggcggcgtcagcaccggtccagtagtcgcccggcaggacttccttgcccggctccagagccttgtactgctcgaagaagtgcttgatttcggccttgtggtactcgttgacgtcgtcgatgtccttgatgtcatcgaaacgaacgtcggcgggcacgcacagcaccttgtcgtcgccgccggcctcgtcgaccatgtggtacaggcccacggcgcggcactcgaccacgcagcccgggaacacggagttcggaatcatcacgagagcgtccagcggatcgccgtcctcgcccagggtgccgtcgatgtagccgtagtcatccgggtaacccattgcggtgaacagggtacggtccaggaagacgcgaccggtctcgtgatcgacttcgtacttgttcttggagccgcgcggaatttccacaacgacgttgaaggtttctgccatgtcatttctccttgaaaatcgacagttacgttatcgtctcaccacaataccctgtttgcgcctgcaaaacaggtgcggaactcaagaaaccgtgctgagattatgccgacactatgtctaaacagacgaaatcctcccctcaaggggaggatttctagcggtttacgcacacgataaacccatgcacgtcaacggcatcactgttgcattaccgttgcactaccgcatcactgcacggacaggatgtgggccacatccgcccaaggagccagagacacgtagttgtcccaaccccactggaattcgcggccggtcagctcgtcgcgcacgttgagcgggcggtcggtgggcagacccagctcgccgagttccaggtgaatcatcgactggtgtgcgttgtgtccatcgaggttcacgaccacaatcagtgtgtccgcttggccggtaccggtcagttcggccggcgtgtggcgtgcgaaagccagaatattcgggtcggacgtaggcagcacggtgaggttgtgatagctcaacgcggccgggtgggcgcgacgaatcttgttgagcgcggtgagcatctcggccacgccgtactgcttggccttgctccaatcgcgaaccttgacctcgtacttctcgttgtcgatctgctcttcgaagccggggcgctgcttgttctcgatgagttcgtaaccgttgtagataccccaggacggcgagcccatggctgccagcaccgcacgcacgcagtggccggctacaccgttgtctcgcacgtaagcggtgagaatatccggcgtggtgggccagaaggtgttgtgctggtagtagccgtcgtcgccattggtgatcggcagatactcttccagttcgtccttggtgttgcgccacgggaagtagcagtgggactgggtgaagcccacgtagctcagggcacgcatcatgcccgggcgggtgaatgcctcagccaggaacaggatctccgggtgcttcttggtcacggcggcaatcacgtcctgccagaaacgcaccggcttggtgtgcgggttatcgatgcggaagatggtgacgcccgcctcgatccacagattcatgatgcgttcgacttctttttcgatgccgggcatgtcggcgttgaagtcgatcgggtagatgtcctgatacttcttcggcgggttctcggcgaaggcgatggagccgtctggcttgtgacggaaccagttcgggtgggccttgacccacgggtgatcgggcgagcactgcagtgcgaaatcaagcgcgatttccagacccagttcatgtgcacgctggcacagggccttgaaatcgtccatggtgccgagcagcggatccacggtgtcgtggccgcccagctcggagccgatgccgaacggcgagcccgggtcatcggggccggcgaccagcgtgttgttgcggcccttgcggttggtcacgccaatcgggaagaccggcggcagatagacgatgtcgaagccttcggcagcggcgcgttcgaggccggccatcgaggtcttcagcgtaccctgaatgatcttgccggtgttcggatcgatggtggcgccttcggaacgtgggaagaactggtaccaagccgcgaagctggacttcgggcgttccaccttgaaacgctggggctggctgggggagatgccatcgcgcagcgggtgagtctcgtgcagggcggcgatggtaggattgtcgccggcggcgaggcgatcctcggcgctcagcgtctgatcggccatggtctcagcggccttctccaaggtcttgcgatcgcgtgcggtcaggccggcgtccggggttgcggcccaacgggccagcagctcggcaccggaattgagcgcgttgtccacgtcgtccatcacacgcaccttgatacgggcgtcatgcagccaagaaacgtacgtgtcttcccaaccttcgatggtcacggtccattcgccgagctgacgcttgacggccgcgtagccatcctcccaaggcttcagatcgctgtgctcgccgcacttgaccatcacggtccaacgatcgaggccgggatttacgcaggtcatggcctggcgcatggtttccttgccgcgcgggttgcgcacgatggcggtggcacccaccttggtgcggccttcgatgaacacttgggcggtcatctcaaacggttcgccgagttccacacgggcggggaagatgccacgctcctcggcgggagtgatgtccatgacattgatgcggccgaactggccgggctcgtttgcttcgatggacggtgcgggggcttcgacagccaggcctttcagcgctgctgcggcgcgtgccgtttcggcgctgactctcttgcgcttggttgcggggctctttcgggcagaagtcgtctttgacttcgtcttcgtggtgttgttatcggtattactagtgcgcgtggtcgcgcgatgttgtactgctgccataaggccctattctaggggcttttgaacatatgttgcacattgtggataactttcaggtaaacgttcggtcaaccgcatgaggtggataactcggcggaagagttatccacaactcgccggcaaacggcaagctcggaccacataggtcgaaagaccggctgtagcgaatgaaaatctgccatgatcgtggcctacccgcacacagtgcagtatgcggggaacgtaccaggaaaggacgaatgatgataacgacatggcggcaacggggcatggccatcgtagcgatgctgaccggtctgataataatggtgggagtggtgttcggctcggcgaatacggcgtatgccgcgacgttgacgcccgccgacgaaagatatcacgtgacgtttccatacaacgatatggaatattacgtcggtgtcgcggggctggacgcttcgggcaacaaatactactgcatcgaagcggggaaactgagcgactatgtgataggccccaccacggtgcttgcctccgatgagaacgcccggcgtatggcatggatccttgaccggtaccgcgacacggatgccgccacccatgcggcgatcggcatcatcgtgcaggatcacttcgggcgcgatcgggacgagtgggcgagacagatggcggtcattcaaggccggtatcccgagatcgtggcgaaggcggcccggatatgggatcaatcggccggcaagacgcctgcgggcacgacggtggaacgcaccgatgccgaggctttgcgcagcggttccatctcggtgaaagtggtgaaccgcgacggtgacgcgatcgcgggagtgccgttcaccgtcaccttgcaggggccggcgcggttcatccaaggcggcaacacgttctcgggggtgtcgacgagcgccggatcctcgatcgcgtgggaggcgaccggcgccggcgaggtgacggcgaacaccacatacgagtatgggcggatgcacgtcatggacagcactcaggacatgctggccttcgattcgatggcttccgccggcggttcgtcgtcgacgttccaggtgcgcaaggatttcgttccgtcggtgtccacgcaggtgtccgataaggtgcttgatgcggcttcgccggtgttcgatgatgtgaccagcggcgtgggggacgagggcagtcattgggtgcccggtctgaagctgcaggcgcgtggatactatttcgacgggctcggcaaggacgatctgggcaaggtcatcgcgccgaacgcgcgggagagcgcggacgcttttctcgcccggttggcgtcctcgggttatgagccgagtgcttatggcaaggcgtccttcaccggtgtggggcagcgggttcgtgtgcgggccatggccaagccggacggtgacgccgcctatctgactccgaagaccggcggctttggcacctgggtgtgggtgttccggcggagcgagcaaagcaaacgggcgcaggaataccttaccggcgactgggtgagcccgttcatggaggcttcggaaagcaacgtggggcgcgggaaggtcgaagtcatgtcgacggttaccgaacattcggcggatatcggcgccgaactcagcgacaccatcaccgtatcggggttcccggcggaccacggccagttcatgggtgatgaaacctatggtttcgcggcggatcagccgtatgcgacggtgagcgtatggtggtccggcgatcccgacaacccctccaacgatgaggcgtacaagccatccgggggagaggtccccacggaagacgacaaccaccggttgctggccacctgggagattcccgcgatgaatggcacgttcaaaatcggcgccggggcgttggacgcgcatggcgctcccatgcatctgaccgccgaacggcatgggtggtacgtgttcgtttggcggttcgagggggatgaccgtgtttccccggcgtccagccggtatgacgatgcctgggagcgtgtgcgggtgttgcccccatgcgagtcggagaaaccgtgcgaaccggagaaacccgagacgccaccggcgccggcggaggcaaccacgcccaaccctcgcccgtcactgcccgtcacgggtggcgatgtgtcgcttgcctcggttctggccgtgtcagctctggcgataggcgccatactgtccatcgtcgttcggtggcgtcgttgctatgaccgatccaagcactggacgatgcgctggccgatacgttgacccgctgcggcatgatgccgatgatgtcggctggatggtgaaccgcactccgcttctgagcagaaggacgggagctgggcacgaagtcgattgtgacatacgacttgtgcccggcttccgcttcgttgagaaacttcacgcctgtcgcctcccgtggattagacaactgaaggtccgcgatgaaaacgacgagacgtttatgatcgccgacttccctgggcaccgtagctgcctgatcgcctttcatccatatcgccccggtcaggtcgtcacctacaacggcggcggcagcgtcgccaccggcagcaacgccccaccgtcccgtaccgtgaccgtccgtgcagaccctcggccccgtatggggctggacgtgggccgatccggccgcgacgaccatcagcgccgtcgccctgaccatcggcgtcgtcatcggcgccagcgccctcaaggccaagacatccaaggccgaataacaagaagcccccgaacctgaaccgtatcacgcggcaggttcgggggcttttcgccgtatatgggtcaggccatcgcgggctgtgcctgattggcggtcaggtatgcggccagtgccttgcggatcagagcgctcttgccgatgtgctctcgttcggcctgtgcccgcacctgtgcgtccatgtcgggcgtgaggtatgccttgtagagcacgtcggccttccggcggggctggtcggcgagggggcggccggcgaagatgtcgtcgatgtcatccatcgtgatcgccctttgcgggcggatggtctcgccgatgatggcgggggtgtgctcggtgtattcgtccgagagctcgtcccagtctgtttcgttgctcatgatgtcctccttggtgttttttagtcgtcgaacttgtagagccattcgcggcggcagtccatcgcgtggaacaccttgcgggtgcgctgggataccagcagctccacggggcgttccctgaactcgtccgggtgtccgaggatcgccatgaccctgtcgccggcgtgtctcgactgcacctcgaacacggccaccggatgccggaatatgtagtcgatctatggctgtgtgagccagtgcttgaaggctgacggttcgcattcgatcatgcttattatggtaccataatttagtaccacaatcaatttagtaccacaatcgagtcggggaaacggaacatcgtgatcctcctaggcggcgaggcgcgtggcttccacggcggcgcgcagctggtcgtcgggcatggcgatgtaccgttgcgtggtctcgaccgaggcgtggccgctccaccggccggggaacagatagccgttggcggatcggatcagcagggcgaggtcgtcgccctccacgtccctagatcgcccttaagcgccctcgacaatgcggacatctggcatcggcgcgtgccgatcgtgttgggggagtagcccgccgccttgagggagtcgagccatagattgattgattctgcccagagcgggcttggatgttgttttttcacaggacatcatcgccccgatcggatatgcggccccgtagggcacgacggcggataaacgaaaagccgtcacgaataatcgtgacggcctcgcccacagtagcggggcatggatttgaaccatggacctctgggttatgagcccagcgagctaccgagctgctccaccccgcgtcggcttgtctctcagacagctctatctacaataggtgcagattccagaaagtcaacatcggcgtgtcgtgtcattttcccacggttttaaaacgtgaatcggctcacgcagcgaggggtttggggcggagccggagtcggggtgataacgcgccataaatggccgttataggaatgccctgaaccgttatcccgaatattgacataataggaacatgcctatcaagatccccagtggcctgccggccagagatatcctcgattcggagcgcatcttcgctctggagaagcccgaggcggagcgtcagcgcgtccgcccgctcaaactggtggtcctgaacttgatgcctaagaaaatcgagactgaaacgcagctgctgcgtctgatttccaagtcgccgctgcaggtcgaaatcgacttcatgaagacctccacgcatgaggccacgcacgtttccgccgatcatctcgtcaagttctacgaaaacctcgatgcgttcaaagacaactattacgacggttttgtggtcaccggcgcgcctgtagaacatatgccgttcgaagatgtggactactgggacgagttcaagacgattctcgactgggcctccacccatgtgttctccaccatgtacctgtgctggggtgcgatgggcgcactgtactaccgctacggcatccacaaggtggattaccccgagaagattttcggcgtattcccgcagtacctgcaggacgaatactgcttcctgaccaatggcttcgacgagattgatctgcagccgcactcccgcctcgccggcgtgaacgaaaacgaggtacgtgccaaccatgaccttcagatcttgacttgggggccgcagtccggcccgggcctaatcgccacacgtgacttctccgaagtgttcgcgctcggccattgggagtacggcaagtacacgctcgccgaggaatacgagcgcgatatggccaagggcatgaccaacgtgcccttcccgaagaactacttcccgcatgacgatccgaagctggaaccgttgttcgtctggcgtgcccacgccaatctgctgtggcgcaactggctcaactgggtgtaccagaccacgccgtacgacctgaccgaggtgccgcagctcagggctgagaagaagctcggtactgatcgttcgattcggcatgagccgggcgggccgcgccaggatgatttcaagccgttcgcccacgacggatacggagtgatcagagggtagcgcaaatgccgcacatcctcgtattatgactaatagcgcacaacgcttgcgcaacatccgaaaaaccttgcgccgccgccgattccagaagacgcgccggtgtagtattgacattgtctagacgcaggcaaataatcactcttcagtcattcggagccgaatgcccagcgcagactccgtgtccacgcccggcaggctccacaccgaggagacgaaaaagacgaaagtaacgagcacgtcacatttgcctgcccggtgggtttaaactgacacctgacattgaaaaagcaggaggcgtgatatggtcggttcgctcagcgcaggattgctgttggcggacgagggtgctcatctgccctcggtcaacgacttccttcccccggagattctgttccagggaactccgtttgccatcaaccgcattattctgatccgcatcgtggccaccttcgtgctgctggtggtgcttgggcttaccgcaaagcgcgccaagctcatccccggccgttggcagggcgtagtcgagtacggtctcgacttcgtgcgcgacaaggtcgtgtatgaagtgatgggtgagacccgcggcaagcgttacgtgccgatgatcaccaccctgttcttcacgatcttcattttcaacctgtgcggcatcattcccggtatgaacatggcggccaacgccacggtggtcatgccgctcgtgttcgctgtctggacactgatccagtactggatcgccgccattcgctcgcagggcctcggccactatctgcgccacgagctgttcacccccggtgtgccgtggccggtctatttcctgctggctccgatcaacctgcttgagctgttgatcatccgcccggcctccctgaccatccgtctgttcaccaacatggtttccggccaccttatggtcgccacctgtctggcgttcgcacagttctggatggttgacgcggccaacaagctgcagggcatcccggtgggtgcgctgtggttcgccggtggtttcgccatgacctgcttcgaggcgttcgtcgccttcctgcaagcctacgtcttcgcgattctttccaccgtgtacatcaacctgagcttcccggaagagtgacgggcgactaacccgccgcttccggtccccggtctaggaaaatcgcagaccgaccaaaccccaagatttataacgtcgccaagtacgttagaaaggaaacacaatggatatcatcaccctcgcagcggtcgccggcaacctgtccgtcatcggttacggtctcggtgcgattggccctggcattggtctgggcatcctcttcggcaaggccatggaatccaccgctcgtcagcctgagatgtccggcaagatccagaccatcatgttcatcggcctggctctgattgaggtgctggcactgatcggcttcgtcgccgccctgatcctctgatctgcgcaaatcaacagacgaaaaccgattatgtccatcactgaaaggagggcttgatgacacaagcagcaagcgggattgacctgttcattcctgaggtttatgacatcgtatggtcgttgatcattcttgtcatcgttgcggtgttcttctacaagttcttcatgccgaagttcaatgcgatcttcgacgagcgtgccgccaagattcagggcaacatcgccaaggcggagcaggctaagaaggacgccgacgaggccaaggccaagtatgaggcccagctgagcaccgcccgtgtggacgccgccaagattcgcgacgacgcccgtgcggaagcgtcccacatcatcgccgacgctcgttcccgcgccgagtccgatgcggcccagatcaccgcatccgcacagcgctcgatcgaatctcagcaccagcaggccatcgtctcgctcaagggcgaggtcggcgcacttgccaccgccttggccggcaagatcctcggtgccaagctggaagacagcgacgtgcagtcctcgatgatcgattcgatgatcgacgacctgggcgccaagaagtgaccgtgaccatccgtaaccagaaagggaggtgaccatgcgaggagaggcatcacgtattgcagaccgcgagtcgcgtgattcgctggccccgaaactgcgcgacacccgtgaggacgcgtggcggatcggcaacgaactgttcacgatcaccaaggtgctcgatgacagcattcagctggaacgcgcactgaccgacccgtcccgcccggtcgccgacaaggtggccgtcctgaagggactgctcggtgacaacgcgcatcctatgaccatggagatcatgaccgacttggtctcccgccgttggagccgtgcgcgcgacatcgccaacgcggtggaggacttcggcgtggacgccatgatgtactacgctgacgccaccgacgccacgctgcaggtatccatcgagctgtccgagctgcattccgcactgctgaacctgccggtcgtccgctccaagctgtacgactgccaggccaccagcgaggcccgtgtgaagctgttccgcgaggtgttctccggcaagaccctgaacaaggtcaccatgaggctcgccgaacacgccacctgcaacctgcgccgccgccgctacttggagaccatccagtggctgatcaacaagttctcccgccacatgggcgagtcgatggtcaccgtgaccaccgccaccccgctgaagaaggagcagattgagcgactggtcgaggtctactccgccaaggtgggccgccaggtgcacatcaactcggtggtcgatccgaccgtactgggtggcatgcgcattcaggtgggcgacgaagtcacggacaacaccgtggtcgcacagctgcagaacctgcatcgcaaggtgcagacggaggcgactccggcctgaccggccgagccaatccgtccaacaccacacacaagcaaagacttgactgaacaataaccaatagaaggagtgatcatggcagaactgaccatcgatcccgcctcgattcgcaaggccctcgacgacttcgtgtcgtcgtacaagccgagcgacacccccacccaggaagtgggctatgtcgccacggccggtgacggcattgcgcacgtgacgggattgcctggttgcatggccaatgagctgctgacgttcgaagacggcacgctcggcctggcgttcaaccttgacgcccgtgagatcggcgtggtggtcctcggcgatttcgcaggaattgaggaaggccaggaagtgcgacgcaccggcgaagtgctctccgtgcccgtcggcgacggctatctcggccgtgtcgtggacccgctgggcaagccgatcgacggcctcggcgagatccagggcattgagggtcgtcgtatcctcgaagcccaggcccccgacgtgatgcaccgccacccggtcgacgagccgctgtccaccggcctcaaggccatcgacgcgatgaccccgatcggccgcggccagcgccagctcatcatcggcgaccgccagaccggtaagaccgccctcgcgatcgataccatcatcaaccagaaggccaactgggaatccggcgacccgaagaagcaggtccgctgcatctacgtggccatcggccagaagggctccaccatcgcctcggtgaagcagagcctggaagacgccggcgccatggagtacaccaccatcgtggcctccccggcagccgattccgctggcttcaagtacatcgccccgtacaccggctcggccatcggccagcactggatgtacaacggcaagcatgtgctcatcgtcttcgatgacttgtccaagcaggcagaggcctatcgttcgatttccctgctgctgcgtcgtccgccggggcgtgaggcttacccgggcgatgtgttctacctgcactcccgcctgctcgaacgttgcgccaaggtctccgatgatctcggcggcggttcgatgacgggtctgccgatcgtcgagaccaaggcgaacgatgtgtccgcctacatcccgaccaacgtgatctccatcactgacggccagatcttcctgcagtccgatctgttcaacgccaaccagcgccccgccgtggacgtcggtatctccgtctctcgagtcggtggcgccgcacagaccaaggctctgaagaaggtctccggtacgctgaagatctccctggcacagtaccgttcgctggaatccttcgccatgttcgcctccgatctggatgcggcttccaaggcccagctgacccgtggtgcccacctgaccgagctgttgaagcagccgcagttccacccgtactcgccggaacaggaagtcgtgtccgtatggaccggcacccacggcaagctcgacgacctcgacctgaaggacgtccttccgttcgagcagggactgctggactacatcgaccacaacaccgatatcctcaagaccattcgcgagaccgaggaattcaccgccgacaccgaggctgccctcgataaggccgtggacgagttccgttcgacgttcgtctcttccgccggcaagccgctggtcgagaagaagccggacgttgacaaggccgcgccggttgatcaggaaaagatcgtggcgggagaaaagtaagccatgggctcgcaactcgcattgaaatcacgcatccactccaccgagtcgttggcgaagatcttcaacgctcaggagatgatcgcgtcttcgcatatcgccaaggcccgtgatgtggccctgaacgcgaagccgtacaccgatgcgattttcgatgccgtgcaagcgttggtggcccacacccatatcacgcatccgattgcggtgaaggacgagaacaacccgcgtgtggccgttctcgccctcacctcggatcgtggcatggccggcccgtacacctcttcgattatccgtgaaacggaatcgctgctcgcccgccttgatgcggccggcaagcagccggagctgttcgtgtacgggcgtcgcggttcgacgtactacaagtaccgtaatcgtgacatcgcggcgacgtgggaaggcgacaccgaccagcccggcgtggaaattgctgaaacgatctccaacactttgatggacgcctacatgaagccggctgagaaaggtggagtttccgaactctacatcgtctacaccgagttcatcaacatggtggtgcaaaaggtgcgcgtgctgcgcatgctgccggtcgaaatcgtgaaaaacgagaccaaggtgcccgatcctgatgaagaggcaccggctactgcggatgtcgctccgctgtacactttcgagcccagcctcgaaaaggtactggacgcgattctgccgaagtacattcagtcccgcatccacgagtgcctgctgaccgcggccgcgtcggaaaccgcaagccgccagaacgccatgcacacggcaaccgacaacgcacgaaacctgatcgacgaccttacgcgcaagctcaacgcttcccgccaggcctcgatcacccaggaacttaccgaaatcatcggcagcgctgacgcgctgaccaagaaggaagagtaggaacgcatatggctgacaaccagaccactgcggccgagcctaccaacggtcgcgtcacccgcgtccagggctcggttatcgacgttgaattcccggtgggtcatctgcccgacatctacaacgccctgaaagtaacgatcgtcaacaccggcgccaaggaagaaggcgaggcgaaggagaccgagatcaccctcgaggtcgaacagcacctcggtgattccacggtccgttgcgtcgctctgaagcccaccgacggcctggtccgtggtgcctccgtctccgacaccggcgccccgatctccgtgccggtcggcgacgtgaccaagggccacgtcttcgacgtgtccggtaacatcctcaaccagaagccggatgagaccatcaccgtctccgagcgttggcctatccaccgcaacccgccggccttcgatcagctggagtccaagactcagatgttcgaaacgggcatcaaggtcatcgacctgctgaccccgtacgtgcagggcggcaagatcggtctgttcggtggtgcaggtgtgggcaagaccgtgctgattcaggaaatgattcagcgcgtggctcagaaccacggtggcgtgtccgtgttcgcgggcgtcggcgagcgtacccgtgagggtaacgatctgatcggcgaaatggccgaggccggcgtgcttgagaagaccgcactggtcttcggccagatggatgagcagccgggtacccgtctgcgtgtcccgctgaccgcactgaccatggcagagtacttccgtgacgtgcagaaccaggacgtgctgctgttcatcgacaacatcttccgcttcacccaggccggttccgaggtgtccaccctgctgggtcgtatgccttccgccgtgggttaccagccgaacctggccgatgagatgggttccctccaggagcgcatcacctcgacccgtggtcactcgatcacctcgctgcaggccatctacgtgccggccgatgattacaccgacccggccccggccacgaccttcgcccacttggatgcaaccaccgagctgtctcgtgacattgcctccaagggtatctacccggctgtggacccgctgagctccacctcgcgaatcctcgatccgcgttacgtgggccaggctcactacgactgcgccaaccgcgtcaaggcgattctgcagcgtaacaaggagctgcaggacatcatcgccttgatcggtatcgacgagctcggcgaagaggacaagaccaccgtgaaccgcgctcgtaagatcgagcagttcctcggccagaacttctacgttgccgagaagttcaccggtcgccccggctcctacgtgccggccgacgagaccatcgaagccttcacccgcatctgcgacggcgtgtacgacgacgtcccggagcaggcgttctccggtatcggcggcatcgatgatctcgaagagaagtggcacaacatgcagaaggaactgggtgcgtgatggctgcggaaaaaaccacgatgaaggtcaacatcgtcgccgctgaccaccctgtgtggcacggcgaggcgacgagcgtgaccattcccgcctctgagggcggcatgggcatcctgcccgaccatgagcctgtgctcacggtgatcaagcagggtacgctcaccgtggttgagcccgatggcgatcgccacatgttcgaggtgaccgacggattcatctccttcgactcgaacaaactcaccgtggcggtcgagcgcggccacgacgtccagtactccggcaccgccgagtgatctgaaccaactcctcaaggggctctctggttttccagagagccccttttgctatgtatgccatgtgttgcgctacagtggtggcctatgcgagttattgttgccgactgttcggccgagtattcgggccgcctcaacgcctcactgcccctggccaagcgtgtattgctgatcaaggctgattccagcctgttgattttctccgaattgggctcctacaagccgctgaactggatgaccgcgccctgcacgattcgtgagatcgacccagccgccaaatccgcgcaacattcccgggaaagtgtcgctggtggggctgtggatggtgattccgcgacgcattccccggaaagtgtcgccgctggtgagccggaaaaggtgctacgtgtcagcgccgacaagggctctgacattcttgaagtgacgctgcaacacatctattccgaccaaacctatgatctgggcgaagatccgggtctcatcaaggatggcgtggaagaccatctgcaacgctatctggccgagcagatcgagcgtatcggcaagggagccaagctggtgcgtcgcgaataccctaccgccattggtccggtggatatcatggccgtgaatgccgagggcgagcatgtggctgtggaaatcaaacgtcacggcggcattgatggcgtcgagcagctgactcgctactgcgaactgctcaatcgcgatccgctgctggccccggtgcatggcatcttcgccgcacaaaccatcacgccgcaagcccaggtcttggccaaggaccgcggcttcacctgcctcatcctcgattacgacgatatgaaaggcaccgaggacgacagtctcaggctgttctgattgttcttggcttccctcttgaaggggagttttcgaacgtacatagagagactgaggggaggcctcacggtatattccgtgaagcctcccctcagtcagtttcgctgccagctcccctcttggggagagccatcgagattgtttagtacgcggcgagaatatcgattacgaagaccaacgtggagttggcgggaatcgaaccttgctccttatctccataggcctgatccggcggaatcaccagcagaacctgagagccgacggtctggccgaccagacccttctgccagccctcgataacctgatgctggccgctggaatcgctgaacagatcggcgtcgattgtggaatcgcgatcccaggacgaatcgaactgcttgccatccgtaagccaaccggtgtacttgaccaccacggtgttcttgtcggtcagcttggcgccgttacccttgatcagcgtctgcgagatcagcgaatcaaccgaaccctgaccgttcatgtcaatggacggcttgccattcttggctcgcgtcaccttcggcagattggccggcacatccttgacttcctcgccagtggccttcttcaggtccttggacttggatacaaacgtcatcgccaaaatgtaagagtatccggacgaatcctgagcgttgacgccaaagccgatcgtggtgttgatcttggcacccttgatctggttgtagtaggtcgaggagagggtcttggaatccaccttcagcgagcaatccggcgtgttcttggtccaggtgtccatgagctcggtgccgtctttaacgttgagcgcgatgccttgggcgcagacgcggtcgccctcctcgattacgtcgccatcgcccttttgcagcaccacataggagccgtcggacacggtcatcggcgtattaaaggagatggtcggcttctcgccgagcttgcccttggcggtcacgccggcaatttgccccttcttgtcagaagagtcggaagaggatttcgagtccgagctcgaactggagcaggcagccagcgatacgcacatcgccagcgagcaggcaagagcaacggccttgccgagaggggataacatagatttaacagacttacgcatgacacaccaccctactggtgaaccttgattttctgcgctcctaggcaataaacaggtgaagattgtagaatggttaagttatgagtgctgaagaacagactacaagaccggataagggcgccaagcgtccatcccgtcatgccaagatcatgcgtggagtggtgacgcctatcttcggtctattggccgtggcggctgtggtgttggggtacatgaatgccacgatatggaagccctccactgaaatcaccgcttccgcaaccatgagcggctcccggtatgccgtcactgatccgaatgtgctgaccttgttggatcagaacgccacgataaccgtggactcgggatcctctcaggacgaggcgtgcgtggcgttgggtccgtccaaggatgttgccggatgggtcgcgtccgagaagtcctatacccgtatcaccggattggcgtcatggagcgagctgagcacccagaagggaagcagcacgagtcagggagcgcctgccagtgccgatgacgcggtggcgttcaaggattccgatatgtggactgccgtgaaatgcggcaccgggtccgtttcgctggagagcaagaagaccggcgcctcgacggtggccattgtggatttgggtgaaaatgccaccaacgccaaggtgcagctgcactgggtgcgctccgaagtgccggactttgcgatgccgttctatctgtccggtggattgctggccgtgctggccgtattgtgcgcctccgtgttcgccatgccgccgcataagcgccgcaagcgcatggtggaaggcacggcaagcgccgtaattgaggaagaggcacccgccagcatcgcagtgtccgggaagccggatggtgcaagtcgacgtaatcgtcgccgccacgccacaaatcggcgttcgggccgtgcgtcctcgcaatctgaagccaccgaaacaccggttatcatcgacccaagttcacgtaacctggtcgccgaccagcagaccggtgccgagagcggcgctgagaccggcttcagcgccggcgataacgaatcgacttcggtaatcacccctgacgaactgcaggcctacttctcccgcttggcccaagaggtcaataccggagacgactcggccgatgacggacaggaggaaagctgatgaacaagcgatggaacaaactgtgtgtggccgccctcgcctgcgtggcgttggtcgtgccgttgaccgcctgtgaaggccggctgccgacgccggctgctgatacctccaccaaggttgcgccggatttgaccgaggcacaggagaagaagattcgcctgaagattctcaagacgatcgatgaagccgatcaggccaagaatcccgatggatatgcggccgttatgggcgggccccagctggacattcgcatcagccagaccacgatcaaccagcgcggcggcggtatgtccaaatacgcgaccattcccaaggacatcgcccagacggtgattcccatggacgacggatggcctcgctcggtgttcaccatcacgaccaccaccgaagatcagcagtccaagcgtttgctggtcttcgatcaggaatccgcccagcagaattacaagctgatggccatggctcgactgtttgagggggccaagctgccgaagttcgagattccgactattggctcgcagatgggcactgcaaaggatgagaagctggtggccactcccgccgatgccttgacccaatacgccgatgtgctgcagaacggctccaagagccaatacgcttccaagttcgcagacgatctgctgcgccaggaactggccaataccacggccaaggtgcaggaaggtatgcaacgcaacaacggtacgcaggagcagaaattcaccgttgtgcctgaacagatgtgggtgatgcgtgctgcagacggtgccggtgatttggtggttggccgtattaacggcgaatggactcgcaaggcgggggatggccgcgaatcgcagccggcttccgacgacgagaaggcgctgttcaatagcgacaagtacaccagcaccatgaaggtcacgtatgtgaacgtggtggccttgtacattccgttggcaagctccggtgagcaaatcaccgccgtgggcgccgaccgtcagccggtaaaggtcgaagcgctgtagttgttgccgccgcccaccgcgcggttaacgccccaccacgatatgattcatccaccacgatgtcggtaagttttacctttcgcacaatggtgccgttttgagtcacatcgtggtgggcgttttgctacgtggtgggaatttcaccgcgtagtggaagaatccctacgtggtgggaatcggcattacaatcaatgtcagcaaatgtgattgttgttgtacgcgaatcgcgtggaatcgggaggcattatggcagagcagcagttcaatccgggagtctcattggcgggcgccgtcgatttggaggcgctgaagcatcaggtcaaggccgagcccggccaggcgggtggcgctcctgccgctggtgggtacgtgatcgacaccaccgaaaacaccttccaggcaatggtgcagacttctgcgaccttcccgatcctgctgctcctgtggataccgaccgatgaccgcctgttcccgatggcccgtgcgttgggcgacgcggtgaacgccctgaacggccagattcagctctcccgtatcgatatctcgtccaatccttcgattgcccaagcgttgcaggtgcagggcgcgcccgcactgttcgcgttgattgccggccgtccgatgccactgttgcagggtcttccgggtgacgacgagctcaagcaacttaccgacgaggtgattccgaagatcattcaggccgccgcgcagtctggtgtgaacggtaccgcgccgtactcgggtgatcctgattccgatgccgccaagagcgctggtgccaccggtgccggcgtgggtgctgagcaggtgccgccggagcatgccgaagcccatcgtttggccgaggagggcgattacgccggtgccgccgccgaatacgagcgcgtgctcgaatccgacccgtccgatgcactggccgcccgcgaacgtgcgaaggcactgttgctggcccgctccgggtccgctgatgtacgtgacgtgcgtgccgctgccgccgcaacgccggacgatgtggaagcgcagttggctgtggctgatatcgacatgatcggtggccagattcaagacgctttcgaccgtttgctggactttttggccgccgggcacaaggccgatatcgagccggttcgcaagcgtctgctcgaatacttcgccatccccgaacccaccgacccgcgtctggctcgcgcccgccgtcgcctagccaccctcatgtactgattggttttggctcccctctttgaggggagctgtcaggcgtagatgactgagggaagcgcgcgaacgtacttgattgattcccctaaaccatccgattcttcccgaaatactgctggaaccttggcccctccagcgccagctcctcctcgaaatcatccgcccacttgcagaacggacggttggcgagaccatcgttattgaatcgcgcctgatcggtgatttcggtgatgcagaatttcggaatcgtcagattggtaaccggcccggatcgttcggcctcggctacgatcagcggcgcgttcggcccgccgaacacgtccacgctccagccgtcttccgcaatccacacggaataccggttcttgatgattaccgagccgccgcgcttgatgagttcggcggcgatgcgcgtgtcgatctcgcgctcgacctcgtagcgcgtgccacccacggacggacctttgacggtgacatacgcttccgagaaccggtcgcggtattcgtccagcacggccaccggatttacgtcgggcgtcatgtcgacgtgcaccttgtgcgagaccagccgcacgcgcaaggcgtaattgtcggcatgcacgtagtagctctgaatgatgagggtcggggcgtcgccgtcgtcgtattccgccggcagctcgcggcagaagaagcggcgttcgtattcgaagtcatctgtaggttccgacataaccccattgtagagccgatgatggcgattttctcgttattttggcgacgtatgtgcctcatgcagcgtgatgtggtgtacagtaaagaagttgctcgggtttgtagctcagtggatagagcgtctgtctccggaacagaaggtcgtgggttcgatccccatcaagcccaccagcatggctttcggctagccgccggaagccttttgcatattcggcgcgtgatattaagcgcgtgcaaagctggtgctggtgctggtgctggtgctggtgctggtgctggtgtcggggtcggggtcggtgatgccggctcgcttgggtcgtggaaaaaccgcccggtttggcgagaacggtagtcgaatcgtctggaatcgtctggaatagcaaggaatagtctgttgatggccgtatgccgggcatcatgcgcgctaaacgcgacttcgctcagtagactgctacgtaatcggcattgccaatcgttgctgatcgtgcgattggtcgtagccggtggtgatgtgtaccggcgccggccgcagcaggtgggcgcccccaagatgagaaggagcacaatatgagcgaaaagatggaagccgtagccacttccgaggcgccggccgcgctgggcgcatacagccaggcggtgaaggccaatggcttcgtgttcgtatccggccagctgggcattgatccggccaccggcgaactggcgggcgagaccgctggagagcaggctgcacaggcgctgaagaatattaagcacattctcgacactgccggtaccggcattgagcatgtgtgccgtgccaccatctacctgaagaacgtcgaggacttcaaggaagtggacgcacgttacgctgaggcgttcatcggctccgtcaagcccgcccgcgtggcctttggcaacaacatgattcccaagggcgcgctcgtggagatcgacgccatcgcggtggagtgattcgaacgttttcccggcggcccgtctgcgcgcatggtgtgtgcagacgggccgccgcgtattgtgcgacgcattccggggaatgtcgcgctaggcggggtgtgaggggtggttccgcggcacattcccgggaatgttgcgctggaatcgttgggcggtggtccgtgccacaatagagaccatggcatccaaaggaaaaccgtcgccgcgttcggccgtaagcccgctgagtgatgagcaggtcaagcgtctggccgcccgccacacgcttgtggactcgacacagtattacccgaccggccctcgcacgcccaatcagccggaaatcgacgcccagaatcccaaggccaccaaacgactgctgggaggggtgtccattgtgttccgcgccagctgcaagaccaaggcctggggcctggaacaggtgccggaaaccggaccgttcatcaccgccgccagtcatatcaccatgttcgatgtgttcgtgccgatgatgagcctgttccacatgggccgccgcccccgttacatggccaaggccgagatggcgaagtggccattgatcggcaagtggttccggttggtcggcatgcagccggtgcagcgtcattcgggcaaggccaagcagatcgaagagacctcgattgatattctgacgtccggccgcccgctgacggtctggccggaaggcaccgtgacccgcgacccgaaaaagtgggtgatgagcattaaggagggcgtgggatatatcgcccttgaatcctcgcgcagactggggcatcaggtgccgctgtacccggcggtgacgtggggtgccgcctccatcaaccactggtggccatggccgcgcaaaaacgtggtgatgtgctatgaccatgcgctcgattactccgatctgcttgccgacatggactcatggggtgaagaaccgcctgccgaggccgtgaacgagctgatgtggcgcgtgctcaaacgcatgaacacagtactggaggaaattcgtggcgagcagttccccgctgaaggctactgggactaccgcagcatgagtcgcaagccttggcctgaagccggcggcccgttcccggctgagaagtagtcgcaccggttcccgtacggggcgcctaggcgagtagcatggcacaagattgtgccgatgaagttgcgcgacaagcgaaggtaggaatctgatatgggtaaaaatataacggttctcggcgcaggagcatggggtactgctttcggccaagtgctggcggacgccggcaacacggtgaccatgtgggccaaggagcagcggattgtcgaggacattcgcgatcgccaccacaacgccgtgcgcctgccgtccgtcgaaaagttgccggacaacatgaccgccaccggggatcgcgccgaagccgtcaagaacgcggacatcgtggttgtggccatcgccgcgcagttcgcgcgagtggcactcgtcgaattcaagggactgatttccgatcacgccatcgtcgtcagcctgatgaagggcatcgagcgtggcaccaacaagcgtatggacgaagtcgtccgcgaatcccttgacctgccggccgaccggttcgccgccatttccggaccgaacctgtccaaggaaatcgccgatcgtcatcctgccgccaccgtggtggcttgtacgaacctcgataatgccacgaaggtggccgaggcatgtaccacctcctatttcaagccgttcgtgaccaccgacgtcatcggcctggaaatgtgcggcagcctgaagaacgtgaccgcgctggccgtgggcatggcccgtggtgccggctacggtgagaacaccgcagccatgatcgaaactcgtggactggccgaactgaccgcgctgggcgcagccgctggcgccgatcccaagaccttcttcggcttggccggtgtgggtgatctcatcgccacctgtggctctccgctgtctcgtaactatacgttcggcgcgaatctcggcaagggattgacggtcgaggaggccaccaaggtcagcaacggtgtggccgaaggcgtgcccaccacggatgcggtggtggctcttggcgagcagcttgatgtgccgaccccattggcgtatcagatgagccgcgtgctgaacgaaggcatttcctgctcggagatgcttgccggactgttcgggcacgaggttaccggcgaataacgagagaagcgacgtatacgtggcgtatacgtcgtacgtgcaaagtcgtgtggcgtatacgtcgttgacgtgcgcgagtagactggtgtgcgtctcttgtgcgcggcggtccgagcgcggttcggtccggttggcggtgcaaagcataggcttgaaaacggttgtagtttcaataaaaggatggttatggccaagaagcgtgttgtggtgctctatggtgggcgtgcagacgagcattcgatttcctgcatctccactgccggtgtgctgggggccatggacactgaacggttcgagccgattccggtcggcatcaccaaggacggcaagtggatcatcaacggcgaagatcctcgtggctggaatctggatggcggcgagctgccgaccgtaaagatcaccccggaatcgcgcccggtgatgcttgacccctctcgcggccaggacggtttcttcatcggcgagcccagccgcatcaattccgccgattccggcttcggcaccagcttcgtcggcatgtccgacccggaaatgcaccatgcgctgacctcccttggccatgtggacgcggtactgccggtgctgcacggtccctatggcgaggacggcacggttcaaggcctgctggaaatgatgggtgtgccgtacgtggggtgcggagtgtttgcttccgccgcctgcatggataagcattacaccaaggtggtgctgggtgccgccggcattcccaccgcgccgggtgtgacggtcgatgcgcgcaacttcaccgccgccgatgtgcttgccaagatcgaggacgccggtcttacctatccgctgttcatcaagccttcgcgcgcaggctccagcttcggtgtgaccaaggtcgagaaagccgatgaccgcgagacccagcaggatcgtctggccgccgccatcgccaccgccggcgagcacgattggaaggtgctcgtcgaacaggggattgatggtcgcgaaatcgaatgtgccgtgctgtgcccgaaggccggtgacgagcccgaggccagctggcccggcgaaatcgtgctcgatcatcagaacgacgaccagttctacgatttcgactccaagtacatggatgcctccgccagccacgtggaagtgccggccaatctgccggtcagcgtgcttgaggacgtgcgtgacgtggcccggcgtgcgttcaaggccgtggatggtgccggcttgagccgtgtggacaccttcgtgacgcctgatggcacggtgatggtcaacgaaatcaacaccatgcccggcttcacgccgatttctatgtatcccaaggcttgggatgccaccggagtgagctacaccgaactcatcacgcgattgattgagggtgtgctgaggtaagtgtggtgcggaatcggccgccaaggaagaaggcgcgctgaacgtcatcgccttgccgcatgattggtccaactatggcgaggtcatcgagggcttcaagaagaagtacccggagatcaagatcaccgagctgaacccgaacgcctcctccaaggaggagatcgacgccgccaagaccaacaagggtaccgacgccgcccccgatgtcttcgacgtcggccaggccatcgccgccacctccaccgactatttcgccccgtacaaggtgcaggcctggaacaagatccctgatgctgccaagaacgtcgacggcgcctactacgccgactacaccggcatcatgtccgtgggctggaacgccgacaagtacggcgatgtcgcctccctgaacgacctgctcgatccgaagttcgccggcaccgtgtccctgaacggcaagcctaccgaggccggcgcggccttcaacggctatctgatggtcaaccagctcgccggcggcgacatcaacaacctgcagcccggtctcgacttcttcaagaagctcaaggaagccggcaacctgaacaccatcgatgtgaccaacggcaccatcgactccggccagaccggcgtggtcttcgactggacctacaaccaggcctcctacaagaaggaactcaagtccaagggcgtgaactggaagtacaagaccttccccaaagcccaggtcgtcagctactacaaccaggccatcaacaaggacgcgccgcacccggccgccgcccgcctgtgggaggagtacctgtacaccgccgacgcccagaacctgtggttcaagggcggcgccaacccggtgctgctcgactccatgaaggccgacggcaccgtcgaccaggccaccctgaaagacgccatccccatcgaaggccagccggtcacctacagcaacgatgactccacccgcatcaccgagtggcttcaaaacaactgggacaagacgatcggcaactgagagtccacgatgaccgccgcaatcgcacccatcgcaccgaacggacccgccgcctccaaggccgcgggtccgtccgccgcatcgacccccgcttcgtccgcactggcgaagcaccgtcaggagcttggcacgctcgccaccacgctcccgttcttcgcctacaccgcctgcttcctgctggcacccaccgtgatcgtgatcatcggcgcgttccaggatcgcagcggcggtttcacgcttgcgaacttccacaagatgttcgaagccaacaccatcgccgcgttcggcacgtcaatcctggtgtccgtggcctcatccctgatcggtgccgtggtgggcgcgctcgcctcctacgcgctggtgatcggcgccaagccgaacggaccgctgcgccgtatggtcgccgccatctcatcggtgctcgcccagttcggcggcgtgatgctcgcgttcgcgttcatcgccactcttggcatcaacggcatcggcaccatgctcatcaaaaccctgactggctataccgtgaacccgaattggctcagctccctgccggggctggtgaccgtctactgctacttccagattccgctgatgatcatcatcttcctgcccgcggtcgattccattcgcccgcagtggcgcgaggcatgcgaatccctcggtggcaatacgttccaatactggacgcgcgtggcctgcccgatcctcgcaccccgcttcatctcggcgttcctgctgttgttcgcctccgcgttctccgcctatgcgaccgccgccgccctgttctcccagcgttcgatcctggtgccattgatgatccaaggtgccatgcgcaatgagatggaccccaaccagcagggcttcgcgcaggtgctggcattcgcaatgatcatcgtcgtggccatcgtcatgctgctgagccacgccgtggaaaagagggccggacgttggcaatgaccgaaacttccacaaccaagccgccgcagctgcgtgccgcccgcgtgcgcaaacagagcatcatcaaattcgtgatcctgttcgtcaccctggcgttcctgttcgtgccgctgctggccatgttcatcttcaccctgcgtcacccgttgtccggtcgctggtcggccgcgccgtggacggcgattttcaccggcaacggcgaatcgttgggcgccgatctgagcgtgctatggcagggcgtcggcatctcgctgtcgttgagcgccgtcaccgtcgtgatcatgctcatcctgctggtgcccaccatggtcatcgtgcatattcgctccaaagccttggagcgtgcaatcgaatgggtggccacgctgccgctgaccattccggccatcgtgctggtggtgggtcttgggccgatctaccgttggctttccgccgacgtgttgagcaccaacccgatctggctgtgcttcgcctatgtgattctcgtgatgccgttcgccttccgcgcgatcgccgtgggcctcaactccatcgacgtcaagacgttggtcgaagcctcccgatcgctcggcgcctcctggcccaaagtgttcttcaaggtgatcatcccgaacctgtggcagtcgatcctctcggcatccttcatctccatcgccgtggtgctgggcgaatacaccgtcgcctcgctgctcggccgtatggacctgcaggtcgcgctctaccagctcggccaatccaatgcccaaatttccaccgccatgtcgctgctggccttgctcttcggcgtggtgctcctcgttgcgctcgacctgatctccgacgcaatgcgtaagtcaagggaaggtaagtgacccgatgaacaacgattcaactcccacccgtcaggaaaccggtaccgcagtgggcaccgccccggcgtccccggccatcccggcagccgtgtcctccactgccgaggacgccttcaagaacgatcccaccgctaccctcgagggcgtgcgcggcaaggacgtgaccaaggctgccaaggccctgctcaaagacaccgccaagcgcggcggtggttccattcagatgcagaacgtcgtcaagatctatcccggctccaccgttcacgcgctcgacgacttcaacctggacatcaagcccggcgaaatggtcgtgctgctcggtggatccggttgcggcaagtccaccgcgctgcgatcgcttgccggtctcgaagacatccaaggcggacgcatcatggtcggcggacaggacgtcaccggtgtgccggtgaacaagcgcgagatggccatggtgttccaggcgtactcgctgttcccgcacatgaccgccctggagaacgtggaattcggcctcgaagtgcgcggcatgggcaaggccgaacgccgcaagatcgccatggaacagctggagctcgtggggcttgccgatcaggccaagaagtacacgcagcagatgtccggcggccagcagcagcgcgtggccctggcccgggcgctggccatcaagccgcgcgtgctgctgctcgacgagccgttgtccgcgctcgacgccaaagtgcgcgtccagctgcgtgaccagattcgccgcatccaactcaccaccggcaccacaaccgtcttcgtgacccacgatcaggaagaggcgctggccgtggccgaccgcatcggcgtgatgaacaagggcaagatcgagcagatcgccgccccgcaggacctgtaccagcgccctgccaccgagtacgtggccacgttcattggactcaccaaccgcctgctcggcgcatccaatggcgacgaggccgtggtcttcggccagcgcgtgccgctgctcgccggctccgccaagggcgattccgtggccgtgctcgtgcgcccggagaacctgatgctggccttggctggcagcagcgattcgcacgtcggcgaacgcgcccgcgtggaggtcattcacttccttggctctttggttcgtgtggacacggtcatcacctccggcgaataccagcgctggaacaaaggtgaacagctcaaggccaccgtgcagctgcccgccagcgagctgccggccggtctggcggtgggcgatgacgtgattgtcgccccgcgtccggtcgccgcgctcgcctgctgaatggcgttgcgatgatcgtgcggttctgttctgttttgtgactgtacgatcgtcgaatggcttatcggcaatgatatgtgtgggacggcggcgatttttgggcgattatcgcgtgccgtcccacgccggtgtgggatggcatgaacgtcaaacgatgtacattcgtgccgtcccacagattgtattgaggaatcgttgcaatgacgccatttcttcgtgcggcgtcatcagtcatatgtggagtggtgtgggccgccgcgaaaaaatcgggcaaaatcgcgtgccgtcccacaacaatcccgcagagtagaggactctctcggcatggggattgattgacgtagatcattccttgcccattgatgattttccccattcccaatgcaatcgaaacgccgtgccgtattcttgaagagtattgcacgtgtgatcggtccgtttgcggccagtgactatgggggataagtatgagcgaaccaatgccgtcggcgcagcagccgcaggtacctgagcaaccacagcagccgcaacaaaccccacgcgattggtggttcacggcccatcgccggttttcgacaatcggctcggcgctcgccattatgatggtgttctggatcgggctgaatattctggccactgaagcactacgaacgctgcttggcgccgatgtgcccgcttgggctgtgctgctcgcctcctccgggccgctgtatgtggtggccatgccgctgagtatgttggctttcactcgcgtaccggttattcgcacccggcagtaccccatgaaggcgggggagttcattcggattttcgtcatgtgcattccggtaatgctcttgggcaatatgatcggcaatatattgtctgccggagccactgatggtcaggccaccaatcgcatcaacgacgtgattcttggcagcgactggcgggtgaacgcattgttcataggcctgttggcaccggtttgcgaagaatggatttttcgcaaggagattatctcccgcctgcgccggtacggagaaaagaccgcaatcatgttctccgcattggcattcgcgctattccatatgaacgtgttccagttcttctacgcctttggcctaggactgatgttcggatatgtatacacacgcacctcccgcctgcggtattcagtggctatgcacatgctgatcaacctgaacggggcagtgctcgccccattggtgatacaacagatcgatccccgcatcctcgacggcacaatcagcgaggccgaaatcatgcgtatggctgaaaccggcaacatgggcggcatgggcatcatgatgttgtacggcacagtgatgttgggcctctgcattgccggtatcgtgctgcttatcaccaagcgtaagagctgggagttctatcttgcgccagaggagttgcctgcggggcttaaaatacgcaccgcctatgccaatcccggcgttatctcgtacctactgttgactgtgattcttaccggttggatgctgttcgcatgactgtcatagccggacccagagaggcgagtcgggagatatcacagattgtctgacgagccgccatcttcaacaaggtatttagtgcccgaaccggcgatggcgcgcgcggccatatccctcacggtggagggcagcacgccctcgcgcgcgaacaccagcacctgaccggtcatgccgtacggggagaagccggtgaacttgaccagcggtggctggccctccagtgccacgtcggcggtggctttggttacgcggtcgagaatatccctgctgatcgcggacggatcgccggaggccttggccgtgaactcgagtgtggacatgccttcgctggccggcgtgagcttggtcagggcggcggtattgagtaccgaattggggatgaccatcatgtctccggaacgggtgcgcactacggtctgacgccaggtgatgtcgtgcacggtacctgtgacgccttgaatggtcaccagatcgccgggttggattacgcggcccagcatcaggccgaagccgccgatgacgttggcgatcgtatccttcaaacccagcgagatcgccacgcctccgacgccgagggcggtgaccagggtggtcggattgatgccgaacaccggttgcagcaccatcgccgtaccggtgacccagatggtcacgcgcgtgagattcacgaaaatcgaggcgctgggaatctgcgaactatccagaaccctgcgcagcacgcggctgatgacgcggtcggccgcgaacacgacggccagcacgacggccagccagatgagcttgccggcgttcacctgaaaccagcgtgcgatgtcttgtgcatattcggtcatatgccctactgtatcgaccatttctggtgaagtcgtaaacatgcgggcccacgtcgggttttggccgttgcggtggtgccgatggtgcgataccggtggcgtgccgtcggtgcagcatcgtcgtggtgatgacgtcgccgtgacgcctagtcccggtgctcacggcaggtctggccgaggccacgggccagacgaatcggatcgagaatctcgtccagctgctcggcgggcaggtcggtgcgttcgccggccacctcgcgcacggtacggccggtgtgcacggcttcggcggcgatgtcggccgcgtgctcgtagccgatgtaatggttgagcgcggcggaaatcgacggtgaggactgggcatatgaacgccccaggtcagcattgatttcgatgccttccacgcagttgacgcggaacgtctccatggcgcgcgtcagcaacgccatgccggtcagcagctcatgcaccatcaccgggtcgaaggcgttcagctgcaactggccctcggccacagcccagttcacagtcacgtccatgccgaagatcgtgaagcagcactggttgacgcattcggggatcaccgggttcactttggccggcatgatcgacgatccggcctggcgagccggcacgttgagatcgttgaaaccgcagcgcggcccggaattgagcagtcgcaaatcgtcggcggccttcttcaggtgcacggcaaggctcttgatggcggccgacgtggccacgtacgcgcccatatccgtcatggcggccaccggatcgggcgcggcggtgaccggcaagccggtgatctgcgccagatgcttgatggcggacttgcggaatcgcagatccgcgcaaatgccggtgccgatggcggtggcaccgaggttgagctgggccagcagcggcaccacgcgatcgaatgcagccaaatcagacttcaacagcgtggcaaacgcatggaattcctgaccataggtcattggtacggcgtcctgcagctgcgtgcggccaatcgtcacgtcgttgatatgtttgtcggccagatcgtggaaggccttggcgagtttcttggtggactcggcgagcggcccgatcgcgtcgataagcgcgagtttgcaggcggcagggtaggtgtcgttcgtggactgcgactcgttgacgtcgtcgttcggatggatgtatgtgtaatcgccacgctggtggccggcgatttccagcgcacggttggcgatcacctcgttcatgttcatgttcgacgaggtgccggcaccgccctgcatcacatcgaccgggaactgatcggccagtttgccggcctcgatttccaggcaggcggcgcgaatggcctcggccttggccgggtcgatcaggcctaattcctcattggcgatggcgcaggcgcgcttgaccgtggcataggcgcgaatcagctcgggatgttggctatcggtgatgccggagaccgggaagttgccgatagcgcgctgggtgtgaatgccccagtagacgttcgccggcacctccatctggccgatgcagtcatgttccagacgggttttgttcgatgtttcgctcatgcttccatcttcctgtgtgagggctggaaacgccagcatgagaggctgattgcgccttgtgagaaacctcacgcgggggttcattcggcggaaacaatccagactcactggtttttggtcaagcggtgtacccggggaatcctgcggggccgttcgacggtgagatgggggatggcgcggcatgcgtggcggtggccggcatgccgggggcggccgaatcctgcgcattgtgcacgaagatgcgattccagtaattaagcatgtccttttggctcatggccaggtatatgcccatggccagcacggccacatcttctttaagcaggtctttgatttcgatggcgtcgctcaattcgggccaacgttgcagcacggcgagcatgccgcccacggtgaactcgaccatgagatcggttttcaggtcaaggttcttggggtcgcgttgcaatgtgctgagcatttgcagacggcagaagtcgcgcagcgattcggtcagttcaagcgtgctgtgcgggcctgccaacagggccaggcggtcgaggcgctgccgttgctctggatcggagagcgtggcggtgacgcggtctcgccattgttcctcgggattgccattggggtcgggggtgcggttgatcggaatcgattcgacctgatgcaggatggctgaatcggccaattcgggcaggctggagaagtgataatagaacgaattacggttcacgccagcctcacgcaccacatcggtgacggtgatcttgcggtagtcgcggtcggcgagcaattcccagaaagcgttctctaggcgttctttggcgggcagcacctcggaatcatggcgtggacgtggcatctcttcctcctgatgcaccagcgtgatatggtcacgctgtctaataacttattgggcagtataactattatttgtggacatgtctatgagctaatcggcgatttcagttgcgtcctccgctgagggcgaagctgcggtgtcagtgtcggtgtcggtatcggcgctggccggggccgcgctatctgttcctgccgcggttcctgctggggtttcggctgttcctttggcggtcgcagaactcggcgcggaagccggggcgggcgtcggcctgcgtttggccgtggacgccttgaacagtatcgccagggcctcaaccaaatgacgccggtctgcgggggtcagccctacatacgcgccaagcatcgccggaatcgaagcggggaagttgctcatcacctcgctgaagctggtggcgccgttggcgtgcagcacggtgaacagcgcgtccaccgcacgctcgcgctgttcgggcgtaagcgtggcgatccaatggttcagctcctcgttaaacaactgcgagctggaactcaaatccggctcggtgatgaactggtcgccatccaatagccaggtgaaggcggaatgctgcataatgccatccgaatcggaagagaccacgcggcaaggctccggggtctcgaaaatcatgcccacaatcgacgaacttggcacgattttcgtcaccttcggctggatggtgcggtaggcggggctggtcacaatctccggcgggaaaccggggccgtccagtgaatagacatgctgaatgcgcttgcgcaccttggggtcggcgttcatggccgcgtaaatcgccagattgcctcccttggaatggccgaccagaataatcggaccctcccacagtcgcgccaccgtatccagataggcgctggctgaacgttgcgccggcaccggatactggaaagccatattgaaatcttccttccatccgatgagcgaatcatcggtgccgcggaaggaaataaccaacgtgcctttgtaggtcggctttcggcgcttgtggccgtcgggcagttggaaggtggcggcggcgaattgggtttgctcaccctgattgatgtgctcgaccaccgcgcccagacgaacgttggcgtagcgggggttctcgcccgcggcctggaacaggtcgtgggtcaggtccggattgaccactgaaaccatttgggcttcgtgcggcttgtcgtcggcatgcgtttccggcgaacgatgcagctcgcggttggcctcgtcaaggctcaccgattcaagctcgggatgccagatacccttcagccagatcagtggatgcttgggctcgaaagcgcgaatgcgtgcggcgaacgagcctgactgcgtctcatccagcatcaacgtcggacagatactggccacatcctcatagatgagcgtggagatgatcaaggcgtcgatttcattgaacggcaagtcggcgaaggagcgcgtttcggtgtgcgcgtaatcgataatgccggtcatacgcacctcctgcttccgttgatattgcatatccccttgggccatgtggtcttgcgattgcgtgcggccgtgcggctgcgcgcagcaattaaccatatacattccattgtagggattgtacggttttggccggcgcgatcgagcaagactgcaccgacggcgaacaattcgtgggaggattcccgtcagcttgtcgaaaattgtcgggtagcgggggttgcgatgccagccagccgaccatcctccggcgctacgcgccatctcccgccggcgggaggggtaaccactcaatccttttgacgaggcggaccgctgggccggtcaagggttcggtagatcgaagcgcgccagatccacgccctcgagttcaagcaactcggccttgatgtcgagtcggccgccgtagccgccaaacgcgcggcccgagccgactacgcggtgacagggcacgatgatggtaaccggattgcgcttcactgcgcctccgaccgcctgcgcggccatgcggccgccaccgcgtcgttcggccaattcggcggcgagttcgccgtaacttaccgtcatgccatagggaatttcggccaccagattccacacttcatgttggaatggcgtgccggcgggatgcaacggcggcgtctgatctaggccggggcgctcgccggcgaaataggcggtcagccatacgcgggtcatacggaacacatcgggttcacgatcggattcgcgattcgaatcgagaacggcttggtgatcggtggcccaccaccagtcttcaagacagagctcggtcaggccctcgccgtccgaggccatcatcatccggccgatgggcgtttcgactgtggcccgcatcagttgtcgttgcgtcataccgccattatcgcgcgttgagggatgaagcccataccgtgcctgatttcatgaaggacgggtcgtgctgtacggtcagtattgcgtgctgggcagcgatatctgacatagtgggggttcttgggccggcatgagtgttctttccgacatcccagccgtctaactccgtttcgaggggctgatttgggttattccggaggtctatctccgtttcgaggggctcctcatccgggaaaccgcaagtataaacggctccgggctaacgtcattacgccgtttttggcccgtgtctactcagccaccagccccttgaaacgggagtagacctccggagaaggccaaatcagccccttgaaacgcagcgacccctctgattggagtcaatcagaggggttcggcacattgctgatgcagctggtccgccgtccgccttgaggcggaacgtaaccaagattcgggcgggattactccgcaacgagcgccaggaaggcggcggccacggcggctgtcgggttcgggaattcctcgtcctggttgaagaacggcacgtcggcgtagttcaggaacttcacttcggcacggtcgccgatcaaggccttggcctcttcggccagctgatcggttatcgtcatgcgttcctgatttccacggccatggccgtgcaatgtgcccatcgcttggttctacccgctgtttatgctggccatgcccatcgcttggctgctgtatacggtcaccgcgagttatgtgcacggcggcacccgataatcgttggaaaaccggtgggacacgcgggggcttggctttttcctgagattggcgtatctttgtcacctgttgcccgtgaaggtaacacatgcggacatagcttagttggtaaagcgcaaccttgccaaggttgagaccgcgggttcgagtcccgttgtccgctctcggatggctggttcaggatgattgattcagcctgaggatgacccgggcggttggcgcagtggtagcgcacttccctgacacggaaggggtcacaagttcgaatcttgtatcgcccactcgatgaatcgccggcagaatgttgccggttttttcatcacaagctcgggcgattggcgcagcggctagcgcacttcgttcacaccgaaggggtcgtaggttcgattcctacatcgcccacccgatatcacgctcgtcagtctatgatggcgggcattttctatatctgccgtgccacggttccttatatggcgtccggcctcgggtggcatttggctgtgagcggtttccgattatgagtggcgtccggccgtcgtgcaatcccgctgcgcgcggtgccgtttgggctgtaatacgggtgctttgaaccggccataactgcttcatatgtcccggggcttgtgtcgggtgccgcggcgtgcttccatagtggatatggcggtgcggaaggggagccgccatacttacttacttacttacacaaggacgtcttggtccgccagggcaacgcgcatggaaaggggtttgcgatggtgtgcaccacgctgaatttcgcggagaaatacctgctgaaaaccgaagtcaggtccgttgccggtatgtccggcggtacttccgatgctggtactgatttcgatgtcgatttcggtggcgagggcgacctcggaagcgatcatgccaccggtttcaatcgctcgctatcggccgacgattattgggctgcagccggatatgccgatgagtcattgtattgatggacgtgatgacgcggtaagggcgcgtcgataagtgcggctggtgtcgcggctgatgccgcatctggtgctcgttcggtggtcgcggctgatgttccgtacggagcctgcaatggttttgcatcggtggtgcgtcaaaatccggaccgtcgccgacgctgtggacgtttggcggcgttgaaaggacagataatggattgtcaacgccgctgagaacgattggcgacggtggtgggacagcggatgccgcaccaccgtcgccaagagtggtacttgtgtcggtggcgtccaaaacatggcccggcaccgacatcagatactctgaacgtcggcggattcccgttctgtgtcccagcgccgacgtttgattcctgcttatgcgagctggcgtcggtaaaaaggcagaacttggttcaccggcgatgtctcagcacgtttgcgcgcgtcggatccttctggagcagcaggaaaacgagcgccacaacgagcaggacggcgatggagagcacgccgaacgaggcgttgccggtcagggacgtggtggtggctaccaggaaggtgccgatgattgaggccgttttagggaagaaacaatagtgagaccggggaacccttgaaatcattggggaatcatggtggcgatgcatgcgattaacacatgttgttaacacagatgtggaatgaggaggcgcgtgaggctcgtggtctgcgacgcatgagtgtgaccgtgagctccccagctgatgagcgcaaaggcagagattggtttcacgcgggacttgtctgccgaagagcggcgattgatgcagggtctgtgcgatgctctgcagcagttgctgaacaagcagtaccagcggcacatgtgggactgttcgatagcctgaaaaattttgccgcagacaatctaggcaatgtgcttggcggggatttcaatctcggttcgattggtgatttgccggcggtaatcggtgagcatttcaatgccgatcagttgggtgaaatcaacaggtcgttggcgaccatttgaacgccgaccgacttgacgagctgcaggcgctggcggaggaaaacatctccgccgaccagatcagtcaggtcgttggcgcaattcaggagcagggtgccaatctggacctcggatccattgccgaacaagcaggactgcccgctgacatcatcagccagatttccggactattgggcaagtagtcgccttaagctttaacgctgacggtgttgtctcggctattgcgtgttttgcggtcgctcagcaaatcatatgggtcgtaggtaaccgattgcgagcgctgctgtacacagatgtgtacgtgggtcgaagcggattcgtggtggcaggtgagacaagctgccctcgcatggctggaaaagcttcggtctcgtggagtgcgatgttaaagctgctcaggtcaacggaatggcggaattccgccgatgcaacttgtggttgcgctcgaataaccggcgattgcaacccaaagatggtggcgggtgacatggacggtatgccatagtgagcccatcggccgaacatgacatgataaagattacgtatgaagggacattccaatgagttttcgcgctaacctgcagtacctacgtgcgcaacgcaacctgacccaggaacgattggccatgttgcttggcgtctcgcgtcaggccatttcgaaatgggaatccgaaaaggcctatcccgagatggacaagctgcttatgatctgcgacctgttcggctgcacgcttgatgatctggtacttggcgatgtgagtcggcctgccgcgtcggcttctgcggccggttcgtcgaatgttgactcctcggctgagacggcatcgcctttagccgcttcttccaaaacggcgggcataatcgctcctatcgcggagcttgcgcaggatatcactggctacgatgaacatcgccgccgattcgcgctgctgattgccggcggtgttgctgcgattgtcgccggggttggcatcggcaacctgttcgattccagcaattccattctcggagcgacgccgctcaacgattttctgacgtttctgtgcgtctgtgtgggtgtgattgcggggctggcgatgctgattccaggaggtctgtcgcgtattgacttcaaacggcgtcacccatacgtagaagatttctacaccggggaggaccgcagccgagaattgcggctgctggtaatcggcatcgtcggtggcatctcggctattctgattggcattgcggtgacggtgtatgccgatgacatgctcggcgtctccgatggctggcccaacgcaatttttctgctgctctgtgcgcccggtgttttcgggtttgtctactgcggcatgagatacagtctgctcaatatcgacgcatacaacaaagcggccgaggacgaccgcaaggagcatgcgggcgaacaggatttctatgccagactgaccggcgcggtgtgcggcatcattatgctgatagccacggcgactggcttgtgcctgctgtttttgaaccctgcggcattgcgcggcgattggtcggccgtcgggtcgagcgccgcggacggggcgatgttctggctgccgtggccgattggcggtgtgctgtgcggcgttgcggccgtcgccattcagctgatcaaggattatcgcgagcgtaagtgatcaagtggcgatggtccattgctattagggcccgttgcaggggttgcgagatgtcgcccgcggcgcagagttgccgagggccggcaaatcactcccgcgtcgggtccttttgcaggagcaggaagacgagcgccgcgacgagcaggacggcgatggacagcacgccgaacgaggcgttgccggtcagggacgtggtggtggccactaggaaggtgccgatgatcgaggcggtcttgccgaagatatcgtagaagccgtagtactcgttggcgtggtccttggggatgatcttgccgtagtacgagcgggaaagcgcctggataccgccttggaacatgccgaccagaatcgccagaatccagaactccacggccgatttcatgaagaacgcggcgaagaacacgatgcacatgtatgccacgaccgccgccgtgatcatcgccttgcagccgaatcgcgccgccagacggccgtagagaatcgcgcaggggaaggccacgaactgcgtgacgagcagtgccaccaccagctgggtggagtcgatgccaagctcggcaccgtaggaggtactcatcgaaatcaccgtgttcacggcgtcgatgtagaagaagaacgcgatcatgaacatccacaacggcttgttcttcacgattttgccggccgtgcccgccagttcgctgaacgtgccgcgcacggccgagcccagctggtcgcgggtggcacggtagtgcacctggcggtagctggtaagcagcgggatggtgaacgccacccaccagatggcggtgatgatgaacgaggcgcgcgtgcaagccaccgtggaccagtcgaagagcgacgggccgccgaagatcagcgcgatgcagaagatgaacggcacggtggagccgatgtagccccagccgtagccgtgcgaggagaccttgtccatgcgctcgttcgaggtggtgtcgatgagcatcgaatcatagaacgtcagcgagccgttgaggccgatggtcgccagaatgtagacgaccaggaacggcagccaggtcaggggcagggccattgcgcagcaggtgaccacgccggtgccgaagaagccaaggaaaaacttgattttcatgccttgcacgtcggcgatggagccgagcaacggcatgagcagcgcgatgaccaaggaagcaatggtttgcgcgtagccccaggcggacacgatgttgccgtccgccggcatcagcgatttggcgtaaatggggatgacggcggtggacagcagcacgaatgccgagttgccgacgtcgtagatgatccacttcttctcgcgggcggtcagtttggcgctttgcggcaccggttcgtggacatttgcgggatcagtcatatgcactcctcgacagtattcaactcaatctatcgtagaagcgcggactagggtagaaaaccgccaaagttgaacggcgggtgaataatgccgggcccctttctaaggggagccagagcaaaaaaatagctcccctcgctgaggggagctggccgcgaagcggactgaagggagccgatcgtggattcccccagatgaggaaatccactcaatcgtccggaaactattcgccgatcagcgcgatggcctcgtcgtaatcggggcattgcggcacgccgttgaggctgcgctggatggcgatggatgccgccgcgttggcgatctttaccgattcggccagactatggccctttgccagcatcgcgcacatcacgccggtgtggcaaccgcccgccgaacgggtgtgtacggccttggtcgggtatccctcgatatgaatcgtctcgccacctggctcacgaatccaagcgccgcgggcgccgacacgcaccaccagcggcgcgcgcagtgtagtgcccaagccgtcacacaactggtgcatgaagtcgtcgagtccaccgccgatggtgaccttgctgtcgtcgatcggcgcgcccaggcgctcggccagcgtcatggcctcctgacggttgcaggaccagaccgggcgtgcgagcaccaggtcctcgagcatatggtcattgaccagacgcaacgtattggtgggattgatcaccagcgtgtagtcgcgtgcagccgggtcggtaccggccttgagtaggaatccgtccacgccggtggccgtgtggtccatcagtgtgttgccgctgatgtgcaccacgtctttgggctgcggctccagcgtgttgaacgtgtccgcgtcgccatgagcctcggcgccataggaagcgatgaacgtcttcttcggcgcgccggagctcagcaccacgcggaaaccggaatcctcatcaagacgatcctggccgatatgcgtaatgccgttgtcctggaatgactggcggatgaaatgcgcccacaggccgttgcccagaatgccggcgtgctcggtcggcacgcccatgcggctggccgcctgcagtacgcgatagctgccgccaatggagggcttcggatgatcggccacggcgaatccgccctgtgccggcacctcgtccacattgagcatgatgtccacccagacttgacccagtgaaatcacgctgggctcgtgagtgccgatacctcgcctgagattcaacatgacagcctccttcgtcgtaagttgcacgaggaccccttcgtcccttgccgtctcttataccgagattatatgagagtttgttggatgcggaataggcagtccggcgtgttttatcgggtaaacgctacgatttgcagcgtaattcgccgctggcgaactgctggcgaactacttgcggaccgctggcgaaccaatgccgaaccgctcgcgaaccgctgatggcccactcgcaagttacgctcgaaccgcgcgtgaaccgccgaagttcgcccatgatacacgcaagagttgcggttgtcggtattgggctatatatttgtgaagttgtgtgttcggcatgtcgggtgaaaccggcggtcgaatgcgtgaaagacttgacacatcaaggttaagggagtccatcatggcagctcgttgcgcagtgtgcggcaagggaccgcagaccggtttcaccgtttcccattcgcaccgtcgtaccaagcgtagcttccgcccgaacctgcagtctgtacgcaccacgattgatggcgagaacactcgtctgcgcgtgtgcgtcaagtgcctcaaggccggcaaggttcagcgcgtggccgcgtgaatcgcgtactaacgtggagcaaaacccgtttgagcttcggctcagcgggttttgttgtttctgcggcctaaagaggccgtgcgaatagaataggccaatatgagcatcactatggacaccactctcgcttcgctggtcaccaacaagcgtcgcgtgtccgcgctcaaatcgctgggaatcgtcactgtcggcgacgccctgacctactatcccttccgcgtcaccgaaccggtgccgcttcgcgccatccgcgaggccgcacccggccagcagatggcatttgccgccgtgatacgagacatgcgcgtggtgccgatgaacgctcgccgcggctaccgactcgaggcgacggttgacgacgccgacttcgcccggtctcgtcgcgtacccggcagcacggcccggcttacgttcttttcgtatcgtaaatcgtatgtggattgggtcagcatgcggctgcgcgccggcacgtctgtggtggtctccggtatgcccagcgaatacatggggcagctgcaattcacgcaccccgaaatcctcactgtcgcgcccgggtcggccggagcaggagcggggcttgagggttacgctcggggtgcggcatccggcaatggtgcgtttgcgggaagtaccgatccgtatgccagtgtgcagtccgcgtatccgccggccgcggctgcctcttccggggccgcgctgaaatacgacgccgataccgtgcaagaggcgcttacccgcgtctgccggccccgcccggtatatcacgccagttcgcgtatctcgtccgaacatattcatgagacgattctgggattgctgtggatgatgggggcccgcacgtcatccacgcctgacgggcaactcgctggcgctgggtcagccggcattgtggctcccacgaccgacaccatcgccgtccaaaacggggaagagaattccggcacgaccgccgaatccggtgctgaggcgctctcccaatccatcccagatgtgctgcccgaatcggtgcgcaaggccaagaacctcatgcatcgggctgaggcgttcctggccattcatgatccggcctccacgacccggttcaaggaggccatcgaaaccctgcgctatgaggaggctttcgtttcgcagacctcgctgcttaaagccaggtcgcacgcccataaatccgcggctcactcttgcccgttggtaaccgacagtctgcgcgatcagttcatcgcatccctgccgttctccctcactgcagggcagcagcaggttattcatgatattgccgccgatttggctcatgactggccaatgcagcgtctgctgcaaggcgaggtgggctccggcaaaaccgtagtggcgctcgctgccatgctccaagccgtagacgccggctatcaggccgtgcttgttgccccgactcaggtgctggccgagcagcatgccgaaaccattggccggatggtggagcaactcaagccagcgattccagtcacgttgttgacgggcggcatgaagcttgctgcgcgacgtaaagcacttgctgcggcgtccagtggcgagccgggcattatcgtggccacgcacgcggcgttttccaagaccttccaagccccgcacttggccttggtggtaatcgacgagcagcaccggttcggtgtggaacagcgcgaaagtctcaacgccaaaaccgatgacggcaccacgccgcatctattggtgatgaccgccacgcccatcccgcgcaccgccgccatgacttggtttggcgatctcgatatttcctggctcaccgaattgcctggcggccgcaaaccgattcgcaccgtggtggtcaatgaggccgacgccgccaccatgggccgtatgttcgcgcacattcgcgcgcgagtcgacgcgggggagcgggcctatatcgtgtgcccgcgcattgatgcggatgatgaggggaacgaaggcggttccggcgtttcggcagcagccggttctgcccgcggacgcgccgcagcatctggttccagtgcccgcacagctgcgggcggccgtgcaacgcgcgcggcggccgacgccatcggcatcgacgacccctacgaaaccttcgacgaaaacggcgaaaccgtggctcgcccgccattgcatgcggtggccgaaatcgccgaccggttgcagaaactcccgcaattccaaggcattcggtttgcgactctgaccggccgcgacaaggatgacgtcaaaacccaggtcatggccgattttgccggcggcgagactccgattctggtgtccaccacggtgatcgaagtcggtgtggatgtgaaacaggccagctgcatcgtgatctttgatgccgaccgatacggcctctctcagttgcatcagctgcgcggccgcgtggggcgtggcggcaccaactcgtgggcgttccttatttcccgtgcggaacccggctccccggccgagcaacggctcgaagtgattcaccactcgctcgacggtgccgaaatcgcccaagccgacttggaattccgcggtgccggcgatgtgctcggcgacgcccaatccggcggcaagtccagcctgaagctcctgcgcgtggtcaaggacgccgacatgatcgccgacgcccgcacccgtgccgagcagcttctggctgccgaccccgaactggcagacgaggtccaactcgccggtgccgtcctcgacttcacccgaggcaacgaaaccttcctgacctccagctgaggctagggctgcgcccccgtaatcgcacgatattgtattttcatctggtaaacagaagtaaatgcttgtgccagagacggattgcatatgcatgggtgcttcgtggaagctgattctgtgttccgttgctgagttacggacttgctggcgatacgctgctttcgcgttcgacaatctgcgtgggaaaaatgaagtaattctgttccacctttccttcccgcgctttgagaatcaggttgatgcattgtctggcgatgaggtcgaatggctgcctgatggtcgtcagggatggacacatgcttgccgcaggatagacatcgtcgaaaccgatgatcgataattgttcgggcagactgatgccgtgctgtcgggcggcgcgatagacgttgatcgcgccgagatcgttgaacgcgaagatggcggtcggtcggtcctgctccctcatttccaggagatcgcatgccgccttgtatgccttgtcagacacgtagtcgccaaccttgatgagatgtggatccgcgctgatgccgtttttctgcagcgccgccatgtatccgctcagtcgcgcctgcgaggactgtgaattagtagggccagtgatgacggcgattcgtcgatgccccaatgatatgaaatattgcgtggcgagcattcccccggtccagttatcaatgcccactcccaatgcgtcagcggagacctggccgaccggatcgacaatcacatatgggatgttcctcgtctgcagcagcgattcctcggccgatgagatattcgataagagaagtatgacgcctagtgggttgcgttcgatggcgttacggaggcagctgctggcctcgtttcttgttgcgtattctccggaatccggtccggcgcagcttacggtgatgccgaggccaaaatctctggcgtatgaagctgtctccttgaccatttccacggtgccgttgttggtcatttcgctgacgaccagttcgattgaccgtatggtttttgttgtgggaagttttttgcggaatccagcttcttcgaggagcagttccaccctatcgcgggtctcgtcggagactccatcacggccgttgatgaccttggacacggtagcgggggatactcccgccgcttgggcgatgtcggagaccttcggtctgtttgttgttttgattgtggccatgactcttctcttttcgtatgcgacgctgcaaaaaaagcgttatatatagagtagcgaaattttcgctactctaaaacagcttttttatcggcgtattgctgtctatatagcggaaatgggtgttgtagacatggattggctgctgtttcttcgatgagtacgatttgtgcatatcgttgcaataaagcccttttaaggcgaaaaaacaagataaagaaaatttcgccacgcgcaacgaagttttatttgctcttttttgcagaaccttgtatattgaacgtaccgatgaatgaaacggcaatggcaacgatgttgttggcgggctcattcagacgggttaagaagaaagagaaaaactatgacaaatgcaacggcgaaaccggatacttccgggatgcgcaagccgaagcgcgagtacataggcctgttatattgtcttccatacgtggtggtcttcctattcggcatgatcatcccgatgttctacgcgctttatctcagcttcttcaagcagtcccttcttggcggcaccacattcgcaggcttcgacaacttcatagctgcatttaaggatgaagcgctgtggagcggtttcagaagagtgctgatttatgcggcgattcagattcctctcaatttgatcctttcccttgtggcggcgctcattctggattcccagagaatccgccatatcgcagtgccgcgaatcctgctgttcctgccttatgccgtcccaggcgtcatcgcagcactgatgtggggatatatctacggcgacaagtatggccttgtcggccagattgcgtctatgatcggggccgctgcgccgaacatgctttctgaaaagctcatgctgttcgccatcgcaaacatctgcacttggtgttctcttggctacaacatgctgatttattattctgcactgatcggtattccgaacgagctgtacgaatccgctcgtatcgatggcgcatccgagctgcgtatcgcatggtcggtaaagattccgcagattaagggatccattatgatgaccgtgctcttctcggtgatcggcacgcttcagttgttcaacgaaccgagcatcttgatgaattccgcgccgaatgtgatcaccagtaactacacgccgaatctctacgcatataaccttgcgttcaacggccagaacctcaacta

SEQ ID NO: 3703 - DNA, 33771 bp, Unknown
  R150_10m  MAG No. k141_5986
catagcacatcacggctgccacaccgaggatttcccgtcgggggctagatatatgcttccggagcatatactttccggaaacctacaggtcaatccgtgaaaatccgcgattccggacacactttttgacccttaaccctgttcggcgatgccgatcccagccagctgaagtctctcgccaccctgagcaacgccaaggtattcgacggccgctccggcgacctcgccgccgtcttccgccaagtcaagggcttcaactgatgctccaggtaatctgtggattcgttgtcggactgctgctcgccgggctcggtttcggactggtcggcggcggagtgcccggcctgatcgtggccgtggtactggccgcacttgggtatatcgccgcctccacgctcaccgagccggagcgacgcatcggcaaaatgctggtttccgccttgcccaacggtcagaagaccgccgatacgatcgacgcggcgaacgctcaactcaactcgatcgccatgctcaccaagcaagtacgtgacccagccgtcaaagccgaagccaacgacttcatcgccgctaccaaagattgagtgcaatacgtgacccgagacacctccgcctacccgacgttgcgccactacatcaccgtgtacggcgagcagaccgagaaactgttgcgctcctacgtggacgtggaaagttccggcgcacgcgatcagatagccacggtacgaatcgaaaccatcgaggcgctgcaagtgctcgaacagaccgccgccggcgaactcagccgggcggtaagcgccaagacgttgggcattacggccgactccgacgccatccaacggttggcccgcatggatggatacgacgacgtcgcaccttcgcctgtgccttcctcggctgctgatgaaggacggcatgcacccagtcagactccatctggcggcccggctcaccagtcggaccagaaaacggacgcacaatgaaactctccaaatcaaaaatcatcggactgatcgccctgcttgcggtagtgggcgtggtctgcggcacgctggtgtggcggcaatcgcaaccagcgccggccgaaccgaccgaacaggtgagcatcaccggctacctgggcggcgagaaaatcggcctgttcgatgacgccaagttcaaggcgcttgccgccaagcaaggcatcgccatcgactatcgcaaggccggatcgctggccatgatggatgcggaccggaaaggcatggattacatgttcccctcctcgcgcgcggccgtcgaatacggcaatgcgaaaggcgtcaaggccccccaaagcgacatcgtcttcaactcaccgattgtgctatacacgcacaaggccgtggcggacgggctcgtgaacggcggacttgtgaccaaggacaattcgggcgcgtatcacatgtgcttgatttggccgtgaaccagacggatgcgttcaagcagatcaaggacgacgtggtcatcgtctacccgacgccgaccgtgtggagcacccacacgctgatggccttggacgagaaaggcgacacactgctgaacctgttgaaaacaccggcggcgcagaagctggcgtgggagcgccacggcttccgcgcggccaacttcgccggcaccgattcgatcagccgattcggcgtggccggcacgctcgaccagatcccggccgtatccgaactgcccaacaacgacgccatgcaacacctcatcaccaccctccaatccgcgcaagccaaactcgtggccgacatctccatgtacgacacgatgtacacgcagaacgcccagcaataccgcgagctgaaaatgaccgtactggccggcaagaaggcgctcgccgacttcaacgccaaccagctgccagcgctggaggccgaggccgccgccagtggcgacgccatgcaggcgcaagtgctgaaggacttcaagtccaagctcgaccgttttgccaagcgactcgacgacctcgaccgcatcagcgtggttaccttgcagaccgcgccgcagatcaaaatcatccagaacgcggaccagaccatcgtggacaagatcgacaccaccatctccaccacgattccggtgtggaagagtcagatggtgatcgcgctgggcctgtccaaccagcgcaaggccctcgacctgcagaacaaggccgacgatgtgaccaacaagctgctggcgcgtaacgcggccgccctgcacaagggtgcggtggacgcggaaaaggccaaccagcgttccgtggtggaaatcgacacgctggagaagatcaacgccgaactcatcgccaccctgaaggagaccgtgcagatccagaaggaaggcaaggccaaccgcgaggccgcccaggtcaagatgcgccaaatcgagtccgacctcaaaaacgccttgctcgaaaacgcccagcagatgtgagccgttcgcgcgccagcatgctcccgttggcggagtttgcgggaacgtgcaaccatgctcccgttggcagaggtatatgagtacgcctactggtgtgcgtatatatgctcccgctggcgggagctggcagccgtaagactggctgagggtggtcacggcgctcggctcggccggcttaccggcaaccattccccgccgcaatttctctgtgggcataatcccggaatgattgccgcgctcgggaattgggtgaagtgaaggttaaaggttgagagcccgggagggttccggaaccggccacgataaccgctgctagccccgcgatacgggttggcggccggcatccaagccgattctctcctaatcaaggagtaccgattatggcaatgtttccggctttgatgaatgacacgatgttctcggatctgttcgatgatccgttctttgagggttggcgcaacacggacaacacgatgagtgccgcaatgcctgccaacatgatgaccaccgatgtgcgcgagaccgacaagggttacgacgtcgacatcgatatgcctggctttaagaaggaagatatcaaccttgagctcaacaacggctatctgaccgtgtccgcctcgcgttgcagcgagcatgaggacaaggctccggccgctgagggcgaggcttccgacagcaagtgcgcttgcgcgtccgattcgggcaagtggctgcgtcgcgaacgctacatgggctcctgctcgcgtagtttctacgttggcgaggacgtgaaggagtccgacatccacgccagctaccggaacggcacgctgtgcatccaggttccgaagatgcaggcccagccgcaagtcgagtccaagcaccaaatcgcgattgagggctgacgatacttgattcgtcccgaagtcccgcttcgagtagctttgccccctctgacgagggagctcccgcgaagcgggtgggggagagataaatcgtaaccaaaccatgcttcccacgccgcctgccctacgctttcaacgccgactaacctgacagacggtgggaaacatagccaatgcaaatgccgagtagggatttaccctacccggcattttgctgtttcaatcaccgaaccccaccctgttcgcgcgccggtcgtgtgccgttctgcagctgtacacatccgatgagtagaatgccttcgaaacgaggcaagagaggcggacatatggcgaacggcgcacagaacgcaagcggcacgccggccccggcggcaagccgttccggcggccacgtcgtatccgcgcgcgccacgaccatcggcctgatggcgatcctgctgtggagcttcatggccggcaccgtgcgcatcgtctccgaaaacttcggtgccacgcttggttcggccctgatctacacggtcggcggcatcctgctgctgatgttccggcgcccggccccgattcgcgagttccccaagaaatacttgattatcggcggcctgttgttcgtattttacgaatcgtcgatatccctctcgctgggtctggcctctaccgacgcatcctcggtggaagtgagcctggtcaactatctgtggcccacgatgatggtgctgctgtcggcgggcgtatcccatcgcaagcacgcggtcgtcaaggtgctgccgggcgcgattgtggccactgccggcgtggtgctggcggtcggcggtaattccgggctcgactggcatgcggccgtgcagcatatcgccgccaaccctttgccctatgcgctggcgttcgcgggcgcgctcgcttggtcggtgtacgcggtgttcacgccagccatgagtcatggggtggacggcacttcattgttcttcccctgcgtggccgtggcgttgtggattatccacttcgcgtccgggcaggggtggccggccgagccgccgagtctggtcgcatggctgtttgtgttgattgccgcggcggcgattggcggcggttatgcctgctggggctatggcattctgcatgggtctatggagcggctggctattgcgtcctatgccacgccggtgctgtccaccggggccggtgcggtgctgctgggtttggcgctgtcgctgccgttttggtgtggcgcgctgctggtggccgccggatcggtgctcaattacttggtcagtgcgcgcaaatagcggggtggctttgctcatggggcggtaataatcccatggggcggtaaaaccctcatggggcggtatcccaaaatggctttattctgccgtttcacaatttcttcaaaccgccccatgggccttttaccgccccatgggtaaattaacgcccgatgggcagcagcaacttactcgccgcggcgctcggacgggcagcgaatcgggtcaagcagcgtattcggatcggagatgccgaacatgctgcgcccgccggtggattcagggtgcttggcgagaacggccagcgaaatcgcccccggaatcataatgatcaccgaaagggccgccaatccccagttcacgaagaatccgagccccagtacgatggtcaccacaaccaccaccgtgacgataatcgtcaacagtgctcgacgtgggttggtttccctggtccaagaggtgctggctgcgggttttgctgttgaactggccgcggcgtttgtggctgttgtgccatcagccgtgccggtcgtgggccttgccgccgcgctcgtcgcggggtcagtaggggcgtcagacacgttatcggcgacattgccggtcgctgctggacgttgttcgtttgcgtgagtcatatccaccaacatattccctgcttccggctaaagctgggacaagcctgcgcaccgctaatccagcgccgacactggccttgagctgcggacgtccaggccggatgtgaacaggagctgaacggagtctggggaaaccatgagaactcgcgacaatttttgtgaaattgggtgacgctctatgaatcgcgcgctagtattgcgtgagcttacaagacgaggagcctggagcgcggggacgaaggatgaagaactccgtttggaagacgttcatggaattgtcgctggtccgcggaatcgtgccgtggaccgtgttcggactgaccgcgatcgcggcaatcatactgattgttgggctggcattgagcaagaagcgcggcccggcagcagacggcctggcgccggacggcgaatcgtcggcccaatcgcccgtcgacccagataaccagccggccaaccagcctacgaacgcggctgctacggcgtcatccgcagcttcgacggaagagacgtttatttcccatggcctgcgtacgccgcaacgtcgtcacttgcatccgctggccgccgcgctggccgccgccgtgctcgccggcgcgggcggactactggccacatggctgatgtccgacgtgttcatggtgttcggcgtatcgttgggctggccggtgatcctcaccgtcgcgggaggcttcgcgggcctcggcttcgtgctggccgccgccgtgacgttacggggggcccgtcgcgcgctggccgtcgtgctggtgccgctggtgctggcgtccaccgcgctcggcgtggactcgatctacggcgaataccagaccatcggcagtctcgtcggctatacgccataccccccgctcggttcggtcaccgtgcgcaaagcctcgatgagcgtcggcgagtggcgcgacaaggcgcgcaaggacgctctgccatccatgcccgactcgggcagggtgttcgtcgtcagcatcccgaacaccgaatccaagttcaaggcgcgcaaggcgatggtctacctgccgcccgccgcgctgtccgaccgcccgccggccctgccggtgatggagctgctcgccggtcagccgggcagtcccggtcgcctcatcgacgccggcaacatcgccgccacgatgaacgcttacgccgccgaacatgacgggctggcgccgatcgtgctcgcacccgaccagaacggttcggccatgcacaacagcctgtgcgccgacaccacccgaggcaacgccgaaacctacctcaccaaggacgtggtgaactgggccagggcgacgctgccggtagccaagtcggcccgtatgtgggcgatgggcgggttctcgcaaggcggcacctgcaccacgcagctggtgccgcgtcaccccgacatctacggtgcgatgctgccggtggatggtgagctcgagccgaccgacggcagcgtcgagacgatggtccggcgatatttcgccggcgaccgcaaggcctacgacgggcaggtgccggtcaacgccatcgccgccaccggcacggccggccaggcgctgttcgccggcgctggcaaaggggatcggaagtcggtcgccaacatgcgcaccatcgccgcggccgcccgcgcggccggcatggagaccaccgaactggtcgtgcccggcgccgaccatgactggcatgcggtgcaggcggtctggaaccccggtctcgactggttcggcgcgcgaaccgggctgggcgaaatgacgaaatcgttggaggaatacccacaagtggaggtgttgcaatgagcgaagaacaacagcatgggaacgcgcggccggcggccatgccgcagacgcggcggcccttgcgggacgcggaaccctcgcggacgaagcccgccacgacctcccgcgccaccaaaccgcatacggcaaggtccagccatgcggcggaaagctggcgtgaactggccggtgacgtgcggcagtgggcggacgaccaccggctggccgtcaccgccacggcgacgctggtggcgctgaatctggcggcgtggctggtggccgcgatggccggattcgcgtttccgctgcggctcagcaccagcatggccgcattcaacgccggcaaactcatctgctcgctgttcctggcgcgcggcgtcatccaactcatggtcgacgccgtcctgtggctcgtcatgctgtcgatagccgaaccatggctcggccgtgtgcgcaccgtcgtcaccgcgctcgcctgcgcggccggcggcgtgctggcgggcctgaccctgtgcgcggcggccggatggatgttccaggactccctgttcgtctcccgcatgcggttcgcattgagcccgctggtgttgccggtcggcgcgctcatggcggccagcgcgttctgcagccacctatggcgcaggcgcatccgactcgtcggctatgtggcgatcctggtcacgttgctctacagcggcaaccccagcggctactgcatactcgccgccgcgctgatcggccatgccgccggccgtgtgatggccggtccgcccgcgcacgtcgaagccgaatggcactggctgcgcagcacctccttcgaggcgcggcgcatattcgcggccatcgccgtggtactggccctggggccggtcatcgccatcacctcccataaccatgcaggcccgctcagcacgatcggcctgctcatgagcccggtttccgtcgacgatggcatgctggccaaatgcctggccggtgacacgcacggcggctgcttcctgcagttcgatctgttgcgggcctcgatgcccggcgcggtgctgcgctcgctgctgcccaccgccgtgaccttggtgctggcgtggggcctgtatcgcggacgtcggttcgcggccatctgcaccgtggccatcaacctgttcacggtggccatcgccgtcgcctactatctggtcgtgccgctgagcttcgcgccggacggcatggcctccctgctgcagcacggcgcgatcgtggcctgcgtggcgaacgtcctgcccccgctgctgttcgccatcgccctgctggcggcgatgaaacacttcccgatccgcatcggctggtgcaggctggtcggcggcatcggcgccatcgtgctggccttgctggcgtgcgccgccatatacctgatatacggcatcgcccaacccgccaccttctcgccacgcgctacggcctcgtcgctgctggccgagctgccgggacgcttcctgcccatcggcttcctgagccatatgaagctgtcgttcgtgccgcgcactccgatggcctcgatcatgtaccaaggcgtcggcctggtgttctggatcgtggtgctggccgtggtgatccactggatgggcgacgtgagcgaatcgaacgagcgagcccgggcgcgcgccgaacgtctggtcgaaaccggcggcgaatcgatgagcttcatgaccacgtgggaaggcaacagctactggctgtcccccacgggcagatcggccgtggcgtatcgcgtgctcaacggcatcgccctgacctgcaccggaccgttcggcgatccggcggaatggatggacgatctgaacggtttcgcccagcactgtgcggaacgttcgctgtcgccggtgttctacggcgtgcatcgggaacagcgcgacgcgttgctggaagccggctggaactccatcgaggtcggcagcgaaatggtggtcgacccgcgcggctggaagacgaccggcaagaaatggcaggacgtgcgcaccgccatcaacaaggccaagcgcgacggcgtgaccgacgtgcagtccacattcctggaagcgtcgcttgatgtgcgcgaacagatcgaggacatctccgaggagtgggcgcagctcaaggcgctgccggaaatgaagttcacgctcggcggcgtcgaggaactgcgcgacccgcgcgtgcggctgctttacgccatcgacgcggacgggcgcgtgctgggcgtcaccagctggttgcccacctggcgcgacgggcgcatcgtcggctggacgttggatttcatgcgccatcgcaccgacagccccaacggcatcatggagttcctgatcgcgcgcatggccgagcggctgcgtgacgagggcgaagccgatcccacgcacgccgtggagttcatgagcctgtccgcggcgcccctggccggcatgaatcccgatcgggacaacgccggggaggacggggcaccggccagcgaaggcacgcaggtgctccaacacgcgctgcagatcgtggccgactggatggaacccgcctacggcttccactcgctgttcaacttcaagcgcaagttccagcccaccgaagcgccggtctacgtgtgctacccggacccggcggcgttgccgcagatcggactcgccgtggtgcgcgcctatgtgcccagcgtgacggccgccgaagtggccggcatgctcagcacgctgcggtcgtgaaggtgtgcacacgggtacgcaggttagccgattcgagcctgagacggggtatctgctttcagagaggtacatttggccccttgcggacaactaactgccttcaaagaggtgcctgaactctgaaatctcgagtatgagcgttgcaatgacaacgtttgtactcggggtttcccgtattcggtgcctctttgaacgaagatagcattctgcagaagcccgaatgtacctctttgagcggagaaagcctgacaaggagggcgcggcaagcgctatctccgtttcgaggggctgatttggtctctcccggaggtctactcccgtttcgaggggctgatgccgaagtattcacgctccaaaatcggcggaatggcgttggcgcggatgggtttttacatgcggtctagcggccgaccagccccttgaaacgggagtagacctccggcgggggtcaaatcagcccctcgaaagcggttttgccggtgcagaggtgtcgttgactgcatcgcgagccgcctcgacgtagtaacgtggggcgtatgagcgaacgtaacgaacacaatgacggaaatacgcaaaccgcatacttcgccggcggctgcttctgggggctggagcgctacttccagaacgtcgacggcgtcacggacaccacggtcggctacgcgcaatccaccgtcgaatcgccgacctacgagcaggtatgcgcgggcggcaccgatgcggccgaaaccgtgaaagtcgagtttgacccggcacaggtcagcctgcggacgctgacattgctgttcctggaggtcatcgacccgttctccgtggaccagcagggcgaggaccgcggccggcagtaccgcaccggcatgttctacacggacgagacgcagcgcgccgtgtatgtggcggctctggagcagctggtcgaccgccagccgcagcgcccggccgtactggtcgaaccgctgcgcaacttctacccggccgaggcacaccatcaggactatctggtgaacaaccccggcggctactgccatgtaccgatcgccgcaatcgcgaacgtaaaacgccgtcagaagtacgtggaacgcatctgggatctgacgcttgagcagttcgcggtcacgcagaacgccgctaccgagcgcccgttcgtcaacgagtatgacgaggagtttgagcccggcatctacgtggacatcgtcagtggcgaaccgctgttctcgtcgcaagacaagttcgattccggctgcggctggcccgcgttctcccgcccgattgccggtgacttgctgaccgagcatgaggaccaccgcattccgggccgcgaccgcatcgaagtgcgcacgtcggacacacagattcacttgggccacgtgttcaccgacggcccggccgaccgcggcggcctgcgctactgcatgaattccgccgccctgcgcttcgtgccgcgctcgcgcatggccgaggaaggctacggcgactggattgcggttgtggatggggatgatcaggcatgagcatggagaatatcgcgggcgctcgcaagcccgccaagcgtgaggatgagcacacggtcgccggcgagcatcgcatgatgcgccgtgcggaccgcgaggtgaccgatcccgagcggatcgccgcgatcatcgccgcctgcgacatcgttgaagtggcctatgcggatgccgagggcctgactatcgtgccgctgaatttcggctttgattacgacgaggcgactggcaagctgacgctctggttccactccgcgccgcgcggccgcaagctcgacgcgattcgcgccgccgccggtggccgactgtccgtggctttcaccatgcagaccgactgcgaggtggtggcgggccgcaccacgtgcaattggggtgaggcgttcaagtcgatcgtcggcaatggcacggcgtcactggtcgaggatctggatgaatgccgccacggcttgcagacgctgatggcacagcaggcgcatatgccgaatgtggaattcactgatgcgcaggtccgcagcgtcacggtgtggaagattgagtccgactacttcaccaccaaagtccgcaccaaacccgtgcccgcacacatgcatcagcgttagccggggatagcgcgccacctccccactggcgggaggcagcgcgcagcgccggtggatggcccacgtccggacccgatagacttgccgccatggcagcagtgacagtggtaattaccagctacaatcagggcccgttgattcacgaggcagtcgagtcgtcattggccccagacggttcgtccggaacggatcatcatcgtgaacgatgggtccgatgaccacgcatccgtcgagatgctgaacgccactctcgacgattgccggcacggggcgatggatgcgaatggtgtggccatcgacctcatcggccaggcaaacgccggtccttccgccgcgcgcaaccgtggcatcgccgccgccgaaacgccgttcgtagtggtgttggatggcgatgaccgtttgcggccggccttcattgagcgcacgttgtcgatgttgtccgccgacaaaacgatggtcgccgcattcggctggctgcagactttcggtgtcctggaatcagtggtccagccgactggtggcaatgccgccgcgttcgtgtcgcataattgctgcccggccacgtgcatgattcgccgtgtcgcgtgggagtgctgcggcggctacgacgagtcgatgcgcggcggcttcgaggactgggacttcttcctgtcgttgttggagtgcggattgacggtggaaaacgatatctgcggtgctggggttactggcggtactgagcatgtcggaggttttgggagtgcctgggatacagagaatcccgcaaaagacgcggcccatatcggcatcgcccccgagccgctgatcgagtaccgcacggccccggcctcctcaaacgtgaccagcatgaccaagcgcctcgatctcatgcgcttcctgatcgccaagcaccgcgatctctacgccgcgcacatcgccgacgccatcctcggcgttgaagccatctccatgagccgcttaaccatgtgggaatcgttgatgtgcggtgacaccaccgccagccaagccttcatgacccaccccacctatggcgacggtggaatggccgccgccgtacgcttgcggagttgagaggcatcagctgaccaaatgccgatagagctccggatcgattggccgggccaaccgcaggatcgacagcgtgaccttcacgctgccttgtccgcttgcgtcaggtttggtggtgagctgagggttgtcaaacgcagcaacgtggccaacgtagtagtacttaccctcggcctcttccgccttgcgcataacgaataacgggacgaaatgcgtctggccccaattcgggccaatgccgttaagcgcccattggaattcgggagactgcggagttcgtccattcttgctgaagtatttcatttcctgtgtgctcaggaattcatcttcgtattgacttgccgcgtatttcacgaagatgggcatggtattggtttccttgtcgaggaggtaaccacccacgttttgcggagtattctccttcttccatccgcacagtcgcatgacgtctgccatggaatatttgcgttcgtacaagaacatgtgatcaaagacctgttgcctggcggcggcctcacggaatatatctcggcaattggccataccggtgcgcagagtgtccgcaaagaagatacggaacgttctgttcgtggcaagcatatcggcgaatctgctgttcaaccgatatgcggtaccgttttctgtgccggtgctgttcacggcttcgactaatggctgattgccgaaacgattgcagtttgggccggtgaaatatgagtaatcgagcacgctgatcgcagagtcgaattgcgtgtctgaaccatcggactgcgggaattcagtacgaatcgcatcgagcaattcgctgcggccgattggcgagcccgcactccaatgctgcggtacgtcgtcgtcgagccgttcgctgacgaaatggcatagctgagcaagaatgaccaattcgtgcggtcgcaatccgggcagcagcagctccgctgccatcttgagtatcgcgtcttcaacgtcggtcaccggctccaactgatcctcaaatgtcgcttcatgatgtttgcctttgcccaggcttttttcacgggaacgcacgaaatcaagatagttgctgcgcttcgatgcgatggtatacggcagtgaggggtcgtagttatagatgtccgtaagcatggggatgcggcccagctcgtaacggacttggcgatactgttcggacagctttttcatgtcggaccagtcggcggtgtccaaagacttaaggatgcgctccttggcgatcgggtcgaaactgatggacgacaggccgattgactttctctgcaggttcttgcgagctctgtcacggtcgccggtgttgccgtataatgccaccggaatcagatagttgttgttgtaattgccaatgaaatcgataaccacaacgctttctttgtgcgggaatttgcgcagtccgcgcccgagctgctgcgtgaagataatgctggattcggtgctgcgcaacatgacgatttggttgacggcgggaatatcaactccctcattgaacatatcgacagtgaagagatagtcgagttcgccttcaatgagcttgcggacgtattcgtctcgctgcgtttgggacacgggcctgccgtcatcgtccgtgctggtaacggcagcggtgcgataggggcgttcggcttgttgattccactgttggttaaacagctgggatagcttatgggcttcctcctgtcgactgcagaacacgagtccggtgaccggaatgttgaactgcccatattcctgcaacttgtcaatgatgtagcagactcgcttttcggtggcaagctgctcgatctcgtacttgagctgtttcgagtccttcgcatcaaggcccttggagacatcgagacgatgggcgattccattcggatcgtcgttggagccaaggtattccgcaacaccgtagtagtggaatggacagagcatgttctcgtccaacgccttttgcaagcgaatttcgtacgcgatgttatgcccgaatagctcgaagatgttgatgccgtcggtgcgctctggcgtggcggtcatgccgagcatgaagtcggcatctttgaaatgattgatgacgcgctgatatccttcggctccagcgtgatgaacttcgtcaaccagaacgtagtcgaattcatcggatttgaattgcgccaaaacctccggctgccgcatcgtctgtaccgtggcgaatacgtagcggcggtcctgttgcttgctggtgcctgaatacaatcccaattcggattcatcgcagccgagcaccttttggtaagacttcattgcagtttgaagaatcatctgctgctgggcgatgtacagcatgcgcttcggctggcattcgcgtacgtcgaatgcggaaaggtacgtctttccggtgccggtggccgacacgataattgcgcggtgctcgccttgttcacgaatcttcttgagattcgccaacgcctcctgttgcatggcgtttggctgaatgtcatgcccctcaagcgactgcagaatctcatgacgtggtggggcgtatttcttgaaatcttcctcatactgtttgatccactcttcggtcagcggaacggaatcagccacctgtgagtcgatttcatcctggaactgcccgaccagctctccatccgccagcgatgagactttgagattccattcgcgttgcgtggtcaatgcggctccagtgagattggaactgccaacgtacaggtcgtaatagggtgtaccgtctttcatgcggcgagaaaagatatatcccttgggatggaatggttgtccttgagccattgcggaaactgaggtattacgggaaccttcccacacgcgaacgtcaacaccagtggtgttctgaagatgcagcagctcccagaatgccctgggatcgttgaaatgatttttcgttgaggtaatcagtgtgcccgctcgggtcgctgtttcatggtgacttctgaagtcttcaaataagctgagcacggcctcagccgagacgaatgcgacagaaatgtcgaaggaatcgctagtagccaaggaattgccgatttcctcgcgcatggtcaatccaccggggcgatttgcgatgagggtcggcttatattcgccgggagcatctgagcgcggctcgatcagacctgagatgacatcttcgaggatcgagggggttggatcagaatcgtgatgttgcgtgttggctggagagcctgaggtgctgaccagatttatagacatgttgccctgttcccttgcgattcggatcgtttgatgactgcctgactgcgctgtggcgcgttcatcggagcgtcagttgtttgttcgcgataatcgcgactgcttcgcgatctaccggagcccagttcaatgtcggcatatcagcaggattcagccatcggatatcggtgtgctcggtgagatgcggcgtaccggcgatgaggtgacagatgaatgtggtgagccgcacggttccaaagtcgtaggcgtattcgctggtacatacctcttccgcgacctcaacttcgcataacagctcttcttcgatttcgcggtgcaaggcttgccgcgctgtttcatgaggctcaattttgccgccggggaactcccagtatccggccaacgactttcccgggccacgctgggcgcatagtacggtgccgttggtgacgattgcagctcccacgacgttaatgattttgcgttcccgctccatgaacaaccaggatacaacgcttcacgatccacaagcgatccacgatcctcggtggttttgcatatcgatcctgatgcttttgattatgcgatcggacgggtcgaaaatgtcggtgtggacgctgccgactattgtggtagccaagagaagcgatccgtttccgaggtgagattcgggaacggtccgactctcggcagtgatttatctacgcagacaagccaaaggagcctcgccatgattctcgtcaccaccaccccgtccgtcgacggatacaccatcaccaattaccagggcatcgtcttcggcgaagtggtatccggtgtgaacatgttcaaggatcttggcgcgggcctgcgtaacatgttcggcggccgcagccagggctatgaggaagagctgatgcgtgcccgcaacgaggccatcgccgagatgcagcagcgtgcggaggcgatgggggcgcacgccgtggtcggcgtggacatcgactacgaggtgctcggcgccgacaacggcatgctgatggttaccgcgtccggcaccgccgtgcagatcgcgcgtacggcctgagtccatcgagcacagcctgggcccggactcgtccatcgagccgggctttgtcggttatcgtgacgcattgcactgacgctcatgaccatacgaatcgaagcatacgaccggctgcccgacgcggcccgcgccatccgcgagcaggtgttcatccgcgaacgcgactggcggccggaattcgatgaatgggatgccgcgtccgtgcatctgctggcgttcgattcggataatgatgcgcccaatcgccccggctcgtccgcgcaattggcctcacgcagccagcccattcagcccagccagaatcaccccgtagcgacctgtcggttctacgcggaccccgatcatcccgaccagcccgggcgatacatcatcgcgcgcctggcggtactgcccgaggcacaaggccggcatatcggctcgcggctgctggccgacgccgaacgccgcatcgcgcaagccggcggaaccatggccgccgtgcactcggaaaacgaccactacaagttctatgagcagtgcggctaccggctcaccgatgaagtctatgaaggcggccgtcacggctggctgatcaaggacttgattcttggctccgagaattaagggccgctgtctgtcccgcgccgtgttcaaatcgctgcaatacagcgagttcgaagcatcctgtatgaattgctggacgactacagcgcgcagacaatcagataaatcgccacgacgtggcaggcgtacccgatgaccgtgcccaagtgaaacacctcgtgaaactcgaaccagccggggacggggttcggcttgcgcagcgcgaagcatacagcgccggcgatgtacgcggcgcctccgcatgcgatgagtatggtcgcagccggacccactgcgggagccgtccatagctgcggaataagcgtcaccggcgccaatcccagcacaacatacacagtggtgaacacccagttcggcgtccgcagccagacgatatgcagtatcgtgccaatcgccgtggtcgtccaaatcaccgtgagatatggccggcgaatcgccgggctgagcgcgaacagcacgggtgtgttggtgccggcgatgatgaggaagatgttcgaataatcgatgccgcacagcacgcgagtcaccttcgcgctgcgccatggcacgacgtgcagcagcgcgctgttgccgaacagcagcatggccgaggcgccgtacaccgcgcaggccgctttgaccgagccggccggcgcgatgcagatgagtacgatggacgccgcgatgcacagcggcagggtggcgaggtgcagccatccgcgaaggcggggcttgcgtatgccgaatgcgtccacggggacgatctggcgcttgatcgccttcagtgcggccttggcttggcggtagcgcgattgcgcggccctgtatcgggccgatgcacggtccagtgcggtggggttggcgcttgcgctggatttttgactcgcggttgcggaaggcgcaactgttgcggcggaagccatggttcgtccagatggcgtgctgatggaaacgctcatactgatcacctcgctatggccggcgacgctctcccgaccactaacctacgctaccgtaacttagtataggcccgcgcaataatcaaggttgatttcgtaatgcttacagttcttccgtggtgtggtattcggtggtgcggttgcggaatacatcgccgagtctgtgaactcgtattatgcgtgtctgctgggtccgacttgtgtcggttcctgatttcggattgctgcgaatgatgctcccgacgccgccccgccagttgccggattcgtacggctcggccgttcggccgagctggtcgtcggtgactccagatacttcgttggtttcgtctcggttcatgatgttatgtaatgctagtttatggcggatggaaagttgaggaaagttaaatctgcttcatgggcttctctctgatctgtatttgtcccggttcatatgtcaatcgtttgacctgtcgaccggggcagaatccgctgtcccggtcggcgatttcggcttgttttcgtgaaccgggacactccggtttcctcaactcatatcgtctggcagacggaatcggcggaataaggccgattctggaattggcacgttgtcccggttttcgcataaatcgattgacatttataccggggcaacaaaaattgtcccggtttgcaaagatcgcccgaaatcgcgaaccgggacagcggattctggcctggcttgaacgtcaaacgattgatgcaggtaccgggacattttccgccacgaaagttgggccgggccataagccttaagtcctaaagccccccctgaaaaacggcgcttgcccggataaagcaaaagggctggaaccttccgattccagccctttagttgctggtgcgagtggggggagttgaacccccacgagcatacactcactgccacctgaagacagcgcgtctaccattccgccacactcgcagacaatcgactaacttacacccggctgggtaatcatgcaatcttcggcgtgtcgcatgggaggcagggatatatcgcttgtgggtctcctgcgggcgccgtgatctttgagggtggcggcactcccctcagtcacttcgtgacagctcgtccgcaattaaggacgggccttgcctgcaacctgctggttcgactatcgtctcaccttcgactacaaacagcccactgggctgtttgcttaacgtctcagcctcagcgaggggagcagagagaagttcggcacaagccgcaacgaaggagaaaaactcacaaccctggccggcgctcgccgttgccgtagaagtgagccatcgtgtcgtcgcggaactcatcgaagtatccgccgtcgatggcggcgcggatgtcgtccagcagcttcacgaagaaatgctcgttgtgaatcgtggccaacgtgaagccgttgaattcgcgtgcgcgaagcaggtgatcgacgtatgcgcgcgagtagtgacggcacgtgtagcagtcgcatccttcctccagcgggccgaaatcgaacttgtgctgggcgcgtttgatgttgtatcggcccgacctcgtgtagatcgcgccgttgcgggcgcaacgtgcgggggccacacagtcgaaggtgtcgccgccgttctccacgcaggcgaagatgtcgtccacggaggcgatgccgagcacatgacgtggacggttctccggcatcgcgtcgcagatccacgcgcatgtgtcgccgatgagacgcttctcgatcgcgccgccgatgcccacgccgtcgaagtccagagaggcgatctgcgaggccgcgcgccggcgtagatcctcgtaattcgcgccctgcaccacgccatacaacgcctgatacggattcccgactcgatcagccgtcagccgctggtgctcgtccacgcatcggcgggcccagcggaaggtgcgctccaccgagtcctcctggtaggagcgggtgttcatcagcgtggtgagttcgtcgaacgcgaacatgatgtctgcgccgattttgtgctggatgcccatcgaaatctcagcggagaaacgatgtgcgtcaccattcaaaggcgacttgaacgtcacgccgtcctcatccacccaggccatgcgctccttgcccttggcgatgatgtcgtccgacttcatgccggtcacgtccattgccagcgtcttcttgaagccgacgcccagcgacatcacttggaaaccgccagaatcggtgaacgtgggcccatcccagttcatgaaacgcgccaagccgccggccgcgtctagcacgtcctcgcccgggcgctcgaacaggtggaaggcgttggccagcaggcactgtgcgcctagatccttcatctgctcgggcaacacggccttcatcgcggcttgcgtgcccaccggcacgaaggcaggcgtgcgaatatcgccgtggggcgtgtgaatgatgccggtgcggccgtatcgggcaccgtctcgcccaagcccgctggccgtggatggcaggcgggtgatcgtttcgaaatggaaggcgctgcggtcgccgggctgtccgggctgtgcgcccaacggatgttcaagaaggctgatcgtcatatgttcactttaggcagaagggccagaaaagggccggaaattgtgaagaactcggtttcgaggggcggatttcgccgctcccgaacgtctacttccgcttcaaggggctcccggtcaagtaggccggctgcaaaaatggcggaatggcgttaaatgagggcccttgatactcggaattgaccgcgcgaacagccccttgaagtgcaagtagatgttcccgaaacaggaaatcagcccctcgaagccgagatgcccataagactctgcgatgattacgcatagactttcaatcaacgttcagaaaacctccagattgactgcctttactactgaggtagcacacgagaagtggcaatgggcaagtgcccgaatagccgccgaacagacgtgataggaatttaggaaaaggagcagcaatggctgacgaatttaacccgcagggcgtcgaccagaccccgcggaataacgaaaaccccaatagtactgccgataccggcaacgccgagccgaagaacccgtttgtgggtggcgactcggttgatgccggcaacgccagcgattccagcgagcagcaagccccggtttcctcggccgccctcgctgccgatcagcagcctacgcaagccgctaccgacactgccgccaccgagcccatcccggactacgcctccgccaagggcgagagcacggtggtctcctcctcgccggcttctccggcagcaccggccgcaggccagacctcggccacaactccgctgtatcgtccggccccggaatatggcgcttatggtccgaccccgactcaggcacagggccagcagggcggccaggccggcagcaatgcccagcccacgcagcaattcccgttcggtcagcctgcacagcaaaccccacagggccagcagggcaaccgcaatccctactacaccaataacccgcagccgcagggcaacggcaatccgttcaatccgcccacgcagccgcagcagaacaacggcaacccgtttgccagccagtccggtcagaatggccggaatggccagcagccccagcagggcggtctgttcggtttcggcactcccggtaccggtacgccgaacggtcaaggcccggcccagccgggacagcccggtcagcccggccccgccaagcagggcatgtccaagacggcgagcaacatcctcatcgccgtggtcgccgccgttctggctgcggccctctgcctgggcctcggttacggcgccctcaccagcggcctgatcaccttgccgaccagcaattcgctgtccaacgtcagctcgaataagtccggctccgggtccgccaccgccaagagcggcgaagcccccgactggcagactgtcgccagcgatgtctccggctccgtggtctccatccagaccgcgttgagcaacggcaccgccaagggctccggcgccatcatcgacaccgaaggccacatcatcaccaacaaccacgtgatctccggtgcccagcagattcaggtgacgcttgccaacggcaacatgtattccgccacgctcgtcggcaccgacaccaccaccgatcttgcggtcatcaagctcgacaacccgccgagcgacctcaaggccgtgaaattcgccgattccgacaagctcgccgtcggcgagaacgtgatggccatcggcaacccgctcggctacgacgacaccgccaccaccggcatcgtctccgccctgaaccgcccggtgaccgtgaccgacgacaacaacaacgagatcgtcaccaacgccgtccagatcgacgcggccatcaaccccggcaactccggcggcccgaccttcaacgcggccggccaggtgatcggcatcaactcgtccatcgcctcgaccgccacctcatccgactccgcgggttcgatcggcatcggcttcgccatcccgtccaacctcgtcaagcgtgtggccgacgaaatcatcaaggacggtaaggtcaagcacgttgccctcggcgtggtcatcaagtccgacacggttgaagccgacggtgtgacccgcggcggcgcgaccatcaccaagtccagcgccactggcagcgcggtcgtctccggcggcccggccgacaaggccggcctcaaggagggcgacaccatcgtggccttcaacggcaacgcggtgaacaacaactactcgctgcttggttacgttcgtgccgcggctttgggagacaaggtgacgctgaccatcgtgcgcgacggcaagaccatggatgtggacgtgacgctcgatcaggaggagtcgtcggtgaacggttcgtccagctccgattccaacggtaacagccagaataagcagaacaaccagaacggcaacggccggaatggttacggcaatggcaacggcaacaacgatggcggcaccggtgacggcggcggcttctccgacccattcggcctgtggtaaagccgactcgacaacgtcacacggcgttgagcggtaaccgttgaacgccgtgtcagataggcaaaggtccgcagcagtgagcaactcctgttgcgggcctttcgtatacgcgggaagcgtttggctgggtcggccggagcggcggcagatatcttgttccgtgggcttttgtatgcacgggaatcgttctggcaggacgtcagctgcaggcgcataagggctgcgagcccctcatatgcacgggaattcttggcggaatcgtaggaggggggcgattgatgccttccgtctgagctgccaacgtagtttcgccgcccggcatgtcgcgttcaggccgctgatagggtaggccaagcgctgattcgggcaatgtctcgaacgatgcgcacaataattcaacacataactaaaaacgatttctttacgccgtgtatcggatggtcgcgcggagccgaaaggccctaagcaaagccgccggtgggttaacaaggcgtgaccgcagcgccgattgcgcgggccacgcttgccgcaatcgactccgtatacgagcgtaaggagcaatgatgagcggactcatcagattcttcaccaaaatcctcgacatctgccgacttgtgccgatgcttcccgttgttgttatcgccgcaatcccgctggcattgctgggcgattggcgcccatggggcaacgcaattgcgatgccggtgctgggtaatcctggtgtaggccaatggctgataatcgcgctggtggcaatcattgtgattgacacagtgcgtggcatgattgacgatttgcgccacggacaagtcggcgtcgatttgctggccgtagtggcgattctttccaccgttgccgtccgcgagtactgggcaagctgggcggtcatgctgatgattacgtccggcgaggccattgaggaatacgcgcaggccaaggccgagcacagtttgaccgcattgatgcaggcagcaccgcaaactgcgcacgtcgtcaacttgcctggcgtggggtgtggggctgccgctgataaggacgattcgtccgatggcttccggcgtgtaggctcggttccggcgacgtcctcccctcagtcgacttcgccgacagctccccttggagaggggaaccaagtaccgccgtcgaggggagctgactcgcggagcgagactgaggggagctggccggctgaggccgccacgtaccgcttcgacacggtgccggtcgagcaggtgaagctcggcgatgtgctcatggtgttgccgggcgaaaccgtgccggtcgacggcgaactgctttccggctcggccacgctcgatctgagcaacatcaatggcgagccggtgccgcgcgaggtgttcgccggtgcccgagtgatgtctggcgcagtgaacggttccactgccttgaccatgcgcgccacccaggtggccgccgattcccagtaccagcgcatcctcgaactcgtcgcttccgcacaggagtcccgtccggccgtggtgaaaaccgccgaccgattggccgttccgttcactgtgctgtcgctggtaatagcgggcgtcgcctgggcggtgtccggcataccgacgcggttcgcccaggtgttagtgctggctacgccctgtccactgcttatcgccgcgcccgtggcatacatcgccggtactggccgtctcgccgccgccggtgtgctcatcaaggcgcaggatgtgctcgaaaaccttggccgcgtcacccaggtattcttcgataaaaccggcacgcttaccgtcaagcagccgcaagtggtgcgcgttgagatgctgcctggagctgagacccgtcttaatgaggaccatgtgctgatgatggccggcgttgtagagagctattccgtacacatcctgtcgaagggcatcgccaaagccggtgccgacgcgatggcccgcttgcgtcagcgtttcgcggacggccagcgtctctgccccgaaccagaggccagctggcccggccacggccgcgaatatccggtcgtcaagaatattaatgaggactccggcaagggcgtgtccggcgaggtgaacggccatgccgtccgcgtcgggcgactgtcgttcgctgcagccggggaggatgggttcttgactgccgaggtagcgggtgtaagccgggcggatggcccacggcaggaggcggccgacctcctcagcccgcttcacggacagtcccctctgggcggggatactgaggcaggatctggccgtacgattgccgggaacactaaggaaaaggaaacgctgcgtacgcgattcggtatgctacagccggacgaaatggcctcctacgtgtccgttgacgggcaactgatcgcccgcatcgtgctgcgagatgtacctcgcgccaacaccaaaaccgcgctcgccaatctgcacgaactgggtgttaccaagctcgccatgcttaccggcgataagcacgcctcggccgaaatcatcgcggacgaagtcggcatcgacgaggtccacgccgagctgttccccgaagacaaggttgccgccgtcaaggctgccacggaggcaagcgccgcgccggccgggcgcgcgaatcacgccgccagccctgtgtccgatgccgtagatggcatccggtccgatggttctcaaccgtcgcgttctcgatgcagccgcgccgccgcaatccgcaagccggtcacgatgatggtcggcgacggcgtgaacgatgccccggtacttgccgtcgccgatatcggcgtggccatgaccgacggcacttccactgctgcttccgaaagcgcccaagtggtcattatgaatgacgatattgccgctgtgccgcgcgctatcgccattgcacgccgtaccaagcgcgtgatgctgcaggccgtgatcgctggtctcgtactcgccaccatcggcatgattgccgccgccttcaacctcattccagtgatcgtcggcgctttcctccaagaggccatcgacgtgatcagcatcctctgggccctcactgccctcatcgaccgcgactaggcggggtatctcctcgactgagtcgcggttttgccccgctgacggtctgtaagcggggcgattctgtgggctaataggggttttgctccactcgtggtctgcgagtggggtgattttacggtctaatagtggttttgctgcgctggtgggtgttcagcggggtgccttggcgggttagtcgcagtttcgctccgctgatgggctgtaagcggagcaatttttcgggttactcgcgattttgctccgctggcggtctgtgagtggggcaatttcttgatcgactcgtggttttgccccgctggcgtgaggctggcagagggtattaggcacaggattcccaccactcacccctgttgcaacggaaggctttgcgataacctgtaacgcgtgactgaatctgtgaacactgaacttcgtattgctgtaatcggcgctggcccggccggcgtctattcctccgacatcttcctgcgccagctcaagaaactgggcgaagaactcggcctcggcaccaaggcccgcatcgacctgttcgagaagctgccggtaccgttcggtctggtgcgttacggcgtggccccggaccacccgtccatcaagttcatcgcctccgcgcttgagaagacgctcgacaacccgaacatccacctctattgcgacgtggaattcggcaaggacgtgactcttgacgacctgctggcccgttacgacgccgtgctgttcgccaccggcgcggtcaaggacaagccgctgaacctgcccggtgccgaccttgaaggtgtgtacggtgccgccaagttcgtcgaatggtatgacggttaccccaccggtgcccgcgaatggccgcttacggccgagaacgtcgccgtgatcggcggcggcaacgtggccatggacgtggcccgcgaactcatgcgcaacgccgacgacctcaaggccaagaccgacattccggacaacgtgtacgagggcatcggccagaacaaggccaaggtgctccacctgttcatccgtcgtggcgtggcccaggccaagttcagcgtgcaggaactgcgcgagatggagaagctgcccggcgtgcagctcatcatcaatgaggacgacttcgatttggacgacgagaccatcgaggtggccggcaaggacaagctcacccgccagatggtcgaggaactgttcgccatccgcgagatggccgaggacatggaagatgacggcgacgtcgacttcgaaggcaacccggccgaccgcaagtactacgtgcacttcaactccgcccctaccgagatcctcggcgaggacggcaaggtcaaggccatccgcgtggagcgcaccgaaaccggtgccgacggcaagatgagccgcaccggcgagttcaccgactacccggttgaggccgtctaccacgccatcggctacaagccggccgaggctcccggcattacttacgacgagcacggcgctcacctggccaacgccaatggcgatggccgcatcaccaccgaagcggacggcggcgaagtgcgcgaccgtctgtacgccactggctgggccaagcgcggcccggtgggcctgatcggctccaccaagtccgacgcacttgccatcgtgaccaacatgcttgaggatctggccaaggccgccgaaggtggtcgcgtggccgaggatcgcgaccccgaatccatcgaccgactgctggaaagccgcggcgtcaagccgattgacttcgctggctggaagaaggtcgacgccttcgagcgcgccgaaggcgccaaggagggccgcgagcacaagaaggtcatcgagcccgaccagatgcgtgagctcgctctggcctgattgactatcagctcatcgcaccggcaactgcaccagcagcaatcggcgcgattgatacatcgataaataagaacgccggttatacgccagcgttcttatttatataaaagccagtgtcatgccagtcgagcaggccgatgggccaaacgatccaagcagccaaagcaggccaaacaagcaaagcgtcccgatcagaccaatcggtaaagcggtaaagcggtaaaacaggccaagcaaccgcactgtcaagcatcgtcaatctcatgtaaacaggctattccgacccccgccaaccgcaccgtaagcaccgccaacccccatccgattcacccctcggcgcacatccagccaatattcaggcagtgattttagtgtgagcctcatggatgccaaagtacgggtgcacggccatttcaacggcctgaagactacgctgctgttcgccttgatgtgggccatcatcatgctgatatggtgggccacgggcggcaggcagcagacgctgggcatctacgtcattatcgggttggccaccacgttcggctcatactggttctccgacaaactcgccatcgcatccatgggagccagggaggtcagcgagcaggaagcccccgaaatctaccagatcgtgcgcgagctgagtgccaaggccggcaagccgatgcctcgcatctacatcgcgcccaccatgagtccgaacgccttcgccaccggccgcaacgaacgtcacgctgccgtatgctgcacgcagggcatcctgcagattctgaacgcccgcgagttgcgcggcgtgctgggtcatgaactgatgcacgtgtacaaccgcgacattctgacctccgccatcgcctctgccatggccaccgtcatcacgtacctcggttattctctgatgtatttcggcggcggcaactcgcgcgacgaccgcgataattcaggcggtctcggcttgatcggcgtgctcctcagcgtgattctcgcgccgattgccgcatcactgattcagatggccatctcccgtactcgcgaatacgacgccgacgaagacggcagtctgctgaccggcgaccccgaggccctggcctccgcgctcaacaagatctcctatggtgcccagaccacgcccatgcgcaaaacggccggcacccagtccgtctccgcgatgatgattgccaatccgttctccgcggtcggtttctccaaactgttctccacgcatccgccgactgatcagcgcatcgcacgcctgatgcaaatggccaatgaaatgaacggcactccggtggccgcatccacgtattccacgcgcgcaattcactagtccagcacagaactcaaaccggcacatggcgcaaggtgccgcataggtgatacacttgcctctcgtgcgtggaagcgcacatgcggacgtagttcatcggtagaatgaaagcttcccaagctttagaggcgggttcgactcccgtcgtccgctccatcgattttccttgaaatttcaacggttttccctcttttgagagcttattttcctgccgtatgaccgctatatgagaacaattcacgtcgtccgcgtatcgtgatgggcgatgtgtgaacccaagaccgctgcaaccaatggccaaccaacgccaaccctcgaacgcaccccgcacgacatcttcgtcggtgccggactggcgctcgccggaggcgtcttctggggcgtcaacgccaccgtctccaaactcctgatgaacgactatcacgccgatccgctgtggatcgcctgcgtgcgcgagctattggccggtgtcatctttctggtttgcgcaggaatcttcacgcctgacaagttcatcaactcgcttaaggactaccgttcctacccgagactcctgctgtgcgcgttcttctgcgtgctcatggtgcaggtctcctacttgaaggccattgactggaccaattccggcacggccacagtgctgcagacgctcaatctgctggttgtactcgtattcgtatgtattatgggcaaacggctgcccggcaaacgcgaaagcatcggtgtggtactcgcttttgtgggcacggtgctcatcgccacaggcggcgatctcagccagctcagtctgccgctgcccggtctgctgtggggcctgaccgatgccgtatgcacgtcactgcttgcgattctgcccatcgcattaatggccaaatggggcaacttcatggccagcggcgtcatgttcatcgtttccggcctaatgctgctgccgctcgtgcgcccgtggaccaccgcccccgcgttggactggttcggcattggtctgatggtattcaccgtggtgttcggcacattcggtgcctattggctattcctcggcggcacccagcgctgcggtgcaatgcgcgccaccatgctcggcaccagtgaacccgtaaccgccactatcaccggtgtcctattcgccggcgcggtctttaccccgaccgatttggtcggcttcgccatgattatcatcatggtgttcctcgtgagatagttcacagctcgcctggctccagaacctagtctggcgggcacaccccgagcgataatgaagccatgacaatcgcaacaccggaacgttatgccgaaatgctagacgccgcacgacgcggcggctacgcttaccctgccatcaacgtgaccagctcgcagacgctgaacgccgcgctgaaggggttcgcggatgccgaatccgacggcatcatccaggtgtccgtcggcgcagccgcatacctttccggcatcggcgtcaacgaccgtgtcaccggatcgctggccttggccgcttttgcacacgaggtcgccgcgaagtacccgaacatcaccatcgccctgcacaccgatcactgcgccaagcagtatctggacgaatgggtgcaaccgctgctcgcacatgaggccgatcaggtggcgcatggtcaggagcccacattccagtcgcatatgtgggacggctccaccgtgtcgctcaaggaaaatctggacatcgccgaggagctgctcgataagtcgcaggccgcgcacacggtgctggagatcgagatcggcgcggtcggcggcgaggaagacggctattccgccaaaatcgacgaacgcctctattccacgccggccgatggccttgaagtggcccgtcgccttggtttgggcgagcgtggccgatacatggccgccttcacgttcggtaatgtgcacggctcctacaagcccggcgtggtcaagctgcgtcccgccctgctcggtgatattcagtcccgtgtggcgcgcgcggtggtcgagggtgagctgcccagcgccgccggcatagtcgactttcccaacggcaagccgttcgaattggtgttccacggcggttcgggctcccgtccggaagagattgcagaagccgtgagccatggcgtgatcaagatgaacatcgacaccgacacgcaatactcgttcacgcgcccgattgccgaccatgtgttcgagaactatgacaaggtcctcaagatcgacggtgaagtgggcgaaaagaagttctacgatccgcgttcctggggccgcaaggccgaggaatccatgtccgcccgcgtggttgaggcatgcaagcaactcggctcggccggcaaagcactcagataacacccaaataaactgtcattcgccgtggcggcgccttggtgtcggcccgcctcgcgcaacgcgcggcaaagacaccagaagcccgattgcgtgagatggccgcgccccgagtagagggtgtaaggtagtctgtttccggcggaatcgtgcgaatgcggaggtgtgttatgcctggaattgttcttatcggtgctcagtggggcgacgagggtaaaggcaaggctaccgatctgatcggcaccaaggtcgattacgtcgcgcgctttaacggcggcaacaacgcgggccatagcgtggtggtcggtgacgagtcgtacgccctgcacctgctgccctccggcatcatcaacccgaacctgaccccggtgatcggcaacggcgtggtcgtggacccggaagtgctcttcgaggagatcgacggcttggaatcccgcggcatcgattgctcccacctcaaggtgagcgaggccgcacacatcatcgcgccctaccaccgcacactcgacaaggtgactgaacgcttccttggcaagcacaagatcggcaccaccggccgtggcatcggcccagcctacgcggacaagatcaaccgtgtcggcatccgcgtgcatgacctgttcaacgccgaccatctgcacgacaaggtggaggccagcctgcaccagaagaaccagatgctggtcaagctctacaaccgtcgtccgatcgacgtggaccagaccaccgaggagctgctgaagctcggcgaacgcctcaagccgtacgtggccaacaccggcctgattctcaacaaggcgcttgacgaaggcaagaccgtgctgttcgaaggcgctcaggccaccatgcttgacgtggaccacggcacctacccgttcgtcacctcttccaacccgaccgccggcggcgcctgcaccggcaccggcgtgggccccaccaagatcacccgcgtaatcggcgtctccaaggcctacgtcacccgcgtgggcgaaggcccattccccaccgaactgctggacgagtccggcgaatggctgcgtcagcagggtcacgaatttggcgtgaccaccggccgcccgcgtcgctgtggttggttcgatgcggtcgtcaaccgttacgcttcccaggtcaacggcctgaccgacatcgtgctcaccaagctcgacgtgctcaccggcctgaaggagattccgatctgcgtggcttacgacgtggacggcgaacgtcacgacgatatgccgaccgatcaggccgccttcgccgcggccaagccgatttacgagaccatgcccggctgggatgaggacatctccgactgccactccttcgacgagctgcccgccacctgccaggcctacgtcaagcgtttggaagagctgagcggctgccgtatctccgcgatcggcaccggtccgcagcgcgaccatgtcatccagatcaattcgctggtcgactgaccgtctgcaacgaatttcccggcttgactggtaacgacgcggcacatgatatccgccggctgattccgcgattcgaccacttgaagtggaagatggcggcggccggcatagtcattggtctggtttca

SEQ ID NO: 3704 - DNA, 22772 bp, Unknown
  R150_10m  MAG No. k141_6372
tgcgctggaactgatcccattcatggcgcacaatagcctcgcgcagttcatcatcagtcagttcgttggtcatcgacgttcctttcactaatatctccctctgatgagggagatggcacggcgaagccgtgacagagggagcttgaatctacaaacttctaagcaccggatcatcagaggcgatgtgttcctcgacatacgggcgctgccattcgaggaaggtctcgccggacgtggtcaggtgttcgcgtttgagttccctgacgatatccaccgcaatctgctccacaacatcgttgattttctcgattgctggagccgcgcccttgccgccttcgccgaatccggccccgccatagcaggctgtcgaactcaatcgcatcacggtttccaactgttcgcccacgttcggcaacagcgcgaacatcgagccagacagcttgcgcaatgctgcgaactgccacttgtaatacggcatatagcccaccaccatcggcacgttaaccaggaacaccaacgaggcggtggcctgcacgaactcgtggatggacagccatgcggccgcgccgtcgccgcgcttcaacgaacgcggcagattatattgaccggcttgggcgatcatgccgagtcgcttggagatcagcgcgagccgcacatcgtctggcatgtttttgaacccttggcgcgtcttggaaaacagaccggtgggatcggcgaacacctcgccattggtggcggcggccaaggtcgattcctgaagcatcagccactcgtgcggcgcggtctgcgcgggcgcagtgcgatacccggtgatcgactcaaagaagtcgccgatgcggaacacgccgtcacggcgattcgcgccctgtgcgcgcggcgtgacgggggagagcggtgcatcaatcggagtcgtcatcgcttccgccacatcagaggacgccgcgcctgactcggcagtggcggtatcgtccgtagcggtgccgggggtgggtgcgtttgtcgcatcgggtatgacggtggagcctgcacctgcggaggggaatgtcccggaagcatcggatctggcatgcgcctcgaacgtcacgcggccttgcgcatccacgctgaacttgcgcggcagcgcctcgtaatcggcctcaagttgctcgccgatggccgcgtaatcctcatccgtaagccacaggcagaagcgcgggccgaaatcgtggtcctgcgaatacgcatcatcgaatccgtagcattccgagccatgacccaccagaccggcggcgatacgcccggcatactgcggatacttcgccgcaatcatcggcttgcccatctgcgtccagaacgcgcgggccagcttcagtccggacaccgggcatgcggaaacggcctcggccgcgcccgcagaaccggtcgacaccgaaacggtggatggggaaaacgccgcgttcgcaccggtctcgggtaacgcctgcgccaatgcgcccggcgtatccgcgtccacggccgatgacgcggagccgacctgtgcctcgacgcccgcaccggtcttgccctgtgccgggctgtccggcagccgtgatccggactggggcagcgcgcctgcatcgccggcaacacccgcattgtcaaccgtcaccccggccttcgccgcctcttcctcggcctgccgcagattgtcggcggtgatacgccagtaatcggtgtccttgccgtaacatttctcgatcacggccagcgcatgccggtatccagtaactgcatccgcatgccgtctctcggcaaagcacacctgcgcgaagcccgccagtgcggaggcataatgcgcggaatgttccagatggccggtgcgatagatttccagtgccttggctgcatgccaatgcgcgccctccaacttgtgttcggtcagcagggtcaacgccagattcgtgtgcgagctggccacgtcgatatccgcgtccgggttcacgctcgaggcttcgataatgcgcagcgcttcacgcaactccagttccgccttgtcgggccgattcgtctcgctgtagagcatcgatagattgttgtgcagtgctgcgagcctacggtcggtgggtgccagcgaatgccggcagacactctgcgcctgatgatacaaatcctcggcctgatcgtattgttgggccgcgcgcatcgcggtagcgcaattgattagcgtggtggcccacgcctcggatgtgccggtggtcaagcccatacgagcggccagttccagcgcccgctgcacaatccactgattctccttgtgccggccctgcgagcgatagaagcccatcgtttcgttgagtacggtgagcagtccggcctcgtcgccggcgttttccgcgtccaccatcgcctgttccaagtacggaccggcttcggtggctgccgcgtggcgatcgaaaatcgcgtccagtccgttcaggaattgttgggtatcaaaggttgcgggcgattgatcggcatcgtccgtggcctggttcgcagtagaatcggcaccttgcgctgcggccgccgcatcggtgtcgtcggcatcgtctggaccatgcgcgaattgtgcggcgaattgtttgagcagtgcttcctcgtccataccgccagacctccctgaatcgtgtctgatttcagtctattaatactgtaaacaaacgcgtcagggagtttgctgtgagcttggtctcagtccaccttgatttcgcgcatgcggtgaatggcgtcggtatcggtttcgcagcgccacgagtagaaggccagcagccctacggcaagcagagccagcggcataccgcccagaccggtatagcgatagttcatcgagaaagtggtgagcatcgcgccgccgacaatcgagccgatggcattgccgaagttgaaggccacctgcacggctgcgccggcgatgagctcgccgccgccttggccggcttcggtcatcaacagctgttgcggagcggagatgaagaacaggccgaaggcgatccagaaggtcagcaaagcagtagtgccctggtttcccggcagtagcaaaaccatcagcaagccgatgcaggaaatcgtctgacccagcgcggcagtgccggcgtggcgccatttatctgtgatgcgaccgccgataagaccgcctatcaccatgccgaagccggcaagcatcatcaatagcggtaccaggttagacgaccagccaccggtcttctgcagccaaggggagacgtagctccaccagcagaacacgcctgcgttgccggtgaatacggcggccagaatcacccacggtccacgacgagtaaggaatttgaactgaccggcgatgccggcgtccttaatcggcgcaacgaaggggatccatgccagaactagcacgatggtcattgccgcccatgcagccagaataccgaatgcgaggcgccaggataggaactcagccatcaaggtgcccgccggtacgccgagcatattggctacggtttggccggtgaccattaccgatacggcttgtgcttctttgcccttgtcggccaaggttttggcgatgagtgtggcggtgccgaaaaatgcgccgtgcggcaggccggcaatgaagcgcgcgacaatcagcgtggcggcattgaccgagaacgcggaggccagattaccgataagcgcaatcaccataaacaatatgatgaggttcttcggcggcaccttgcggccgaacaccagaatcagtgtgccgaagcacacgccgatcgcatacgcggaaatgtaatggcctgcggtggggatgcccacgccggtggcggccgcggcctgcggcagaatacccatcatcacgaactcggcggcaccgagaatgaacgcgcccgaagccagtgcaagcagactcttcttcatggttcctctaattacttcagtattacttacaaaaacagtgcggcaatcgattgattcgagcgatatattacggtggtccgccaacaaatacgggccttgccgcgacgcggtttgtcgctgtgcgcggcgggttgtttaccgctgtccgatcgcttggtctgattgttgggttaggaaacgaaaaaccggattgctgatttctcaacaatccggtccaattgtcgggctggcgggatttgaacccgcggcctcttcgtcccgaacgaagcgcgctaccaagctgcgctacagcccgtttggcaacagacgtagatattacattgtggtggtggacaatgcaaatcggcatgtcgcgagtgttgcgtgatggtggattcgccgtgtgtacaggtctctcaagccttgtgcagagccggttttgcgtcatgtgagcgggtgttcagatggccgtacggtctgccgggctcataatcgccggccttgcgtacactgatgaatcatggctgaagttgtcgaaaataccgaaaacactgagaatgaaaccccggccgtcccgcagatgagcaccgtcgaacgtgcggaaatgctgctcgagcaggacgccaccatccgcgagaagatcaagtccggtgccacgctggacgaagccgtggacccctccaacaaggagttcggcccgctggctcaccccgagcaggtgcagatgcgcgtggccaagcgcgcgatgatgcttgaggccggcatcgccccctacccggtgcacttggacgtcaccgacaccatcgaggcggtccgcgccaagtatgacggcaagctcgaggctggcgaagagaccgaagacatggtcggcattgctggccgcgtgctgttcctgcgcaacgcgggcggcctgtgcttcgtgcagctgtccgccggtgacggtaccaagattcagggcatgatctccaagaaggagattggcgccgactcgctcaagcagttcaagcagctcgtcgaccttggcgatcacctgtacctcaagggccgcgtcatcgcctccaagaccggcgagctgtccgtattcgccactgagtgggctatcgcctccaaggccctgcagccgctgccggccctgcacaaggacctgaacgaagacacccgcacccgcaagccgtacatcggcatgatcgcggacgagaacatccgcaacatggtgcgcaaccgctccaaggccgtggcctccctgcgccgcacctttgacgaccacgacttcctcgaggtcgaaaccccgatgctgcagaccctgcacggtggcgcggccgcccgcccgttcaccacgcacatgaacgccttcgaccttgacctgtaccttcgcatcgccccggaactgttcctcaagcgctgcctggtcggcggcatcgatcgcgtgttcgaaatcaaccgcgacttccgcaatgagggcgtcgacgccacgcacgcccccgaattcaccatggtcgaggcctaccaggcctatggcacctatgattccatcggccagctggtcaaggagctcgtgcagaagaccgccatggacgtctacggctcgcacaaggtcaccctgctcgacggcaccgaatacgacttcggcggcgaatggaagaccatcagcatgtacgattcgctgtccgaggcattgggcgaggaaatcgtgccgaacggcggccctgagcatcccggcacctccgttgagcatttgggcgccatcgccgacaagctcggcgtggagcgcgacgacgtggagaaccacggcaagctcgtcgaacacctgtgggagcacttctacgaggacaagctttacgagcccaccttcgtgcgtgacttcccggtcgaaacctccccgctggtcaagggccaccgcaccaagcccggcgtggtggagaagtgggatctctacgtgcgcggcttcgagctggctaccggctactccgagctcaacgacccgatcgtgcagcgtgagcgtttcgtggcccaggccaaggacgcactcgccggcgacgaagaggcctgcgacatcgatgaggacttccttgaggctctcggcgtgggcatgcctccggccggcggtatgggtatgggcattgatcgactgcttatcgccttgaccggtgccacgattcgcgagaccatcaccttcccgctggtcaagccgctcgttggctgattaggcatactctggctcccctcagagaggggagccagagttatatatgaaagggattgcttatgtctatcggcttgtgggttcggggcgcgcgtcccaagaccttggtcacttccatcgcgtcggtgatggttggggcggtgatggcgtacgtgcatatcgagcggtcgggcacctgcatcgcaatatatccagaaccggcctcctgcgccacggcccgtgaacagcagaccttgctgatggaccgattctggccggtgaccatcctgtgcctgctagtcgcgctgttcctgcaaatcgccgtcaactatgcgaacgactattccgacggcatccgcggcactgacgccgggcgtgacacggacgaatcgaaatcaggcaaaccccagcgactgaccgcatccggactggtaccggccaagcatgtactgttcgcggcgatgatttgcgccgccatcgcctgcatatgcggtgttgtggcggtcgtgctcgcccaagcatggtggttgctggccgtgggcgcggcctccttgctggccggctggttctacaccggtggcaagcatccgtatggatacgtcgggctgggagaagtcggcgtgttcctgttcttcggcttggctgcggtattgggcaccgaatacgcgctgtgcggcacggtggacgtcggcggactattgggtgctgtggcggctggcctgttctcctgcctgatcatgatggtgaacaatatccgtgacatcgacgaggatcgtgagcatggcaaacacacgctggccgtacggctgggggagtccggcgcgcgtacgttgctgattgtgtgctgcgtcatcgcatggatcatcgccctgctgatgtgcggtacattatggtggccgtggggtgcggtgctgttgctctcgggcaccggaatacctgtgcgcatggtctccagcgtgaataaacgtcaattccgcccggctctgaccgccgccagcttccagaccttgctgtttgcggtggtgctggcggttgccgtggcgctatgagagcgaaataataagacgaatactcgtgtttgggcgcacgcggctgtagactgaaccgtatgacttataaactagtactgctccgtcatggacagagcgcatggaataaaaccaaccagttcaccggctgggtcgacgtaccgctgaccgagcagggtgaagccgaagccaagcgtggcggcgagctgctcaaggagaagaacgtccttccggacatcgtgttcacctccctgctgcgtcgcgccatcaacaccgccaacatcgctctggatgccgcagatcgtctgtggattccggttcagcgtgactggcgtctcaacgagcgtcactacggcgctctgcagggcaagaacaagaccgagatccgcgaagagtacggcgacgagaagttcatgctgtggcgccgttcttacgccaccccgccgcccgagatcgacccgaacgaccagtacgcccagaacaacgacccgcgctacgccggcgatccggttccggaagccgagtgcctggccaacgttgttgagcgtgtgaagccgtacttcgagtccgccatcgagccggagctcaaggccggcaaaaccgtgctgattgccgctcacggcaactccctccgcgccatcgtcaagatgctggacaacctgtctgaggaagagatcgccaaggtcaacatcccgaccgccatcccgctgctttatgagctggacgagaacttcaagccgatcaagccgcgtggcgagtacctggacccggaggctgctgctgccggtgccgccgctgtcgccgctcaaggccagaagtgagcctaagccgctaacacggtacaagctgtaaggggagtcgcacataatgtgcggctcccctttgctatgcctgccaaatccccatggggcggtgattaccccatggggcggtaaaaccctcatggggcggtaaaaccctcatggggcggtaaaactctcatggggcggtatgccagaatggcttaattccgcggtttcacatatccttcaaaccgccccatgggcaagttaccgccctatgggtgttttgccgccccatggatacgccggtgtaccgcccagaagcaacaaaaaaacggcgtccagccgtagccggatcgccgctttcaggcatcctcctcaaaccataggaggacaagtgttcagttattcgcccaatgtgaggacaagccccaatcagtcgatgtcggtgccctcgtcgcgggtcggctccttggtggggtcgaagccggagacgatgtacaccacacggcgggcggcggacacggcatgatcgccgagacgctccaggaagcggcccagcagcacgatatccacggtctgctgacgggtgatgtcatcggacagcgccagatcgaaggtctggtggtgcaggttgtccagcttgtcgtcggccaggatgatggcctcggcggtcttggcatcgcgatcggagagcatggccaccagctggtcagcggtgttgtccaggaagtcgatcatctcggcgaacaccggctgagcggattcgggaatcgcggcggccgggtaggtgcggcgagcggcctcggccacgtggcgggcaagatcgcccatacgctcgaacgtggaagccagacgcatggtggaaacgaccacacgcagatcggtggccaccgggttctgcttggcgagcagcttgacgcactggtcgatcacagaggactccagggcatcaatctcgatgtcgccgtcaatcacagtctgtgcggcttcaacgtcctgattcagcagggcttccccagcgcctttgatcgccttgcgcacgttctgcgccatacggtcgaggtcgtcagcaacctgcttcagctcctcgttgaaaataacgcgcatttctctagcctttcatgcttgcttattgcaacctgtaccagtgtattattccagtacttgttccccacttcaacgtaggtaatggcaacctcaagttgttctactgttcattgggttgttcacctgaaattcatgttaccggcgcgccggcaaaccgcaatcccagcgtgtggtgtgaaagaatgggggcatgacacagatgccgctcgtcgccgcgattgctcttattgtcgcggctgttttatttgtggtgggaatcatcacgctcatcgtgggatttgcgacacatcgagtgtccgtggaatcgccgctggccgatgatgacgacaatgacgatctgtccgacgacaccgccacgctgctgtccatgctgccgggtgcgtccgtggtggtcgacgagcacgacgaggtggtccgctgcaatcccgccgcctaccgcctgggtgtggtgtcagatgacgccatcgcccagcagcaggtgctggatgccattcacgaggcgcgcaagtctggtggcaagcgccagttcgacttgaccaccgatactccggagcggtacgtcgcagaccagaacaagggcgatcacgtcgccacgcagtccgtccaccgccccaactggctgaaggtgactgtagggcgtatcaacgagcagttcgtcatcgtgttgattaccgatgtcagtgacgtgattcgtttcgctcaagtgcgtgactcgtttattaccaatgtatccgagcaattgttgggccccactgaagctctggccaaactcgccgattcgctggagtccggcaatctggacgaacagcaggtggctgccgatgctcgccaggtgcgttccagctgcagcaagctcaaccatatggtgtccgatttgctgctgctcatacgcgcacaggagccgattacgccgtcttccgccaaccgactgaacgttatggaacagctcgaggccacggtggcgcgactggagccgcaggcggccgcggctggcgtgcagctgaacatcaagggcgacgatgatctagtcatcaatggtgaggcggatcagatcgacagcgccgtgaccaagctcatcgaaaacgccatcggctattccaaggaaaatggtgtggtcagtgtgtccgcatccaaagacaaggatggcgaccgtgcggtgattcgcgtgatcgaccagggcgcgggcatcgcgaagaaggaccagacgcgcatcttcgagcggttctaccggggtgcggaacagagcaatcgcacggcggatggcgtgggccttggcttggccatcgtcaagcatgtggcgctaacccatcatggcgatgtgaccgtatggagcgcgcccgggcaaggcagtacgttcagcctgacgttgccgttggcgcagtgaactttattactgtccgaggcggcggtagtcccagcggtcgaagtattcccaaatcagcagtagcaagccaataatgacaccggccacgcacataatcaccaacggcattacgctgtagcccacggccagcagaatcagcacgacaatcaacgccacaatccatagaccggtaccgatggcaaacaccttacgtaggtccacccgtacgggcttgggcgcgggtttgcggacggcagggtcaatgagaggcgcgaacttcatactcatgcactgtagtaagagtagggaggggcgtcaaacacctctccctacgatttattcaatcggtatcagttgagaccgatcaatgtgcatggcatatatggtcggccatgcgaggcatagaccgccatcacaggtgctcgaccacatagtcgacgcacttggtgaaggccatgacatcagccggttccaccgaggggaacacgccaacgcgcagctgattgcggcccagcttgcggtagccggcggcgtccacgatgccgttctctcgcaggatggacagtatctgggaggcctggacgcgctcgtccagatcaatggtgaccacggcgttcgagcgggcgtccgcatcgacgacgaacggagcggcgtattcggagcgctcggcccacgagtacaggatggatgcggacttggcgcaacgcgtggtggcccaggcgaggccgccgttgctgttgagccagcgaatctggttttccatcatgatcagggtggccacggcgggcgtattcagggtctgatccttgcgggagttgttcagtgccgtggtcagcgagaggaacggcggcacccagcgatgtgcgccttccagatgagcgcttgattcgacgcatgccgcacgatcgatggcttcgggggagaggatggcgacccacagaccgccatcggcaccgaaggccttctgcggtgagaagtagtagacgtcggtctggctgatgtccacgggcaaagcgccggctgcgctggtgccgtcgatgacggtcagggcaccggcttcacgactgccgggcacgcggcgaatcggggcggccacgccagtggaggtctcgttgtgagcccagcaatatgtgtccacgcccttggtgagctcaggcagacggtaagtgcccggctcgccggggaacagcaccgggtcttcaaggaagggtgcgttcgcggcggacgcggcgaacttggcactgaacgagccatacgtgccgaatgcggcgcgacgggtgatcagcgaagcgcaggcaatctcccagaacgcgctggcgccaccgttgccaagcgccacctcatacccttcaggcaggtggaagaactcgcgcagaccttcacgaatcgaagcgaccagttgcttgactggtgcctggcgatgtgatgtgccaagcagggtggtggcgccggcatcgagcgcggcgatctgttcggggcggattttgctgggaccggagccgaagcgaccatcttcgggcttcagcgactcgggaatactcagtgtgatagtcatggtttcaagggtagaccagtgttggggaatatcgcggataatgctcggtgtgcgggattgctgcggggctactgcggaattccggggtgccgggcggtagtagcggcaatgcggaatgcagtgcagaatgtacgcagcacatcatggctacggtgtgtcggaatgacatgagttagtgattcttccgataaccggatagtgaggttcgggaacgggcggaaacaaggcagtctttcaccctgccgcacggttacgtaaatcgtttgacatgcccggatggtggggggtcgcattgaggattgacctctgttcgttgtacagtactcaattgtgccggtcatacggggtcgttgaaagggccccgccgaacccatccaaggagttaacgtagtatgaagcatgcttcgcataaagcgaccacggtctcgcgccagaagttcagcttagcgaaggcattgtttgcctccggcaagggttctcattccgttcgtgccgtgcgcgcggtgcaatccgctggcagcgacgccgttgttttggggcttgatccggccattgccgagaagatcaatgaaatcgctccccagactcgtcgttccattcgtgaggccgctcgtgccgctgaacgccgtagccatattcttgcctcggcctcactggccgctctggtcggcacggccgcaggtgctctcgcattttccaacaataaagacgccacgaactcgttcgtggctgatccggccacgacgaccacgcagattaagcgcatcagcgatgtgactgcggcttctcgttccgaagcacgtactgatctgagttcatcctccgttaccgcacagtccaccaatgaaggcggttgggggctgagcaattcagacagcaccttggacgccaagctgatgaatcgcaataatgcgaacaatcctgtggtgtcggctctcatggatgccgatggcgatgctgtgccggctggcttcaacccgaaccatgccgttggcaccaactccaacaactatccgtggggtcagtgcacgtggtacgcgtaccagcgtcgtgccgaactgggactgccttccagcggcaacttcggcaatggtggcgagtgggcggcgtcagcttccgctctgggctattgggtggacaacactcctcgccatgtcggtgatgctgtggtgttcgctcctggccaggccaatgccgatggcacatacggccatgttgccgttctggaaaagatcaatgccgacggctccattgagatctccgaatccaatgccaagggattgggtgtgatttcgacccgtacgttcagcgccgccgaagccggtaagttccagtacgtccactactgattcatttcattggcttacattcggtgattactgttcggatgtgacgtcgccctatcggcaatcgttcgcgcgaaatgacatttcaagtgttgcgaccgcgtattagtccgaactgacctgtgccgacacgccgatatatcccaatagctccggggtgttttatttcttccatcctgtacgagttaatgcgcaccgtgtaaggtgatggttctatgaagaccaaaactgtagcttcttccattgttgccgcgattgtctcctgtgcttgctcgtttatgtttgttcctacagcgactgcagctgagggtgttactgtgacttccaccaagtccttcccctcgtacacccaggtgcgcaaagatctgacgactgaagccactgccacgagcgttgaggacaatgctgattggggcggcattgagaacctcgatgtgccgcagacggaatctcaggcggaaaaggatgccgcagcggccaagaaggctgccgaagaggaggccaagaagcagacggaggccgaggctcaggcgacccagaagcaggccaacgccgcgagccgtaatgagtctcgctcttctgttacttattccgatgccagtggttcggtttccgctggtgccggtgcctctatcgaccgtgcgtattctttgatcggacagagcatggactgcaccgcattggtcagtcaagcgttggcggcccgtggtattaacttccacggttggcctgaagagtacgtcaatgttcccggtggccacgtagttatagacgggtccctgcagccgggcgatattctgatttatgccaacaccggtggatggaatggcggcgcgcactacgatcatgtggcgctgtatgtcggcaacggtcaggcggtccatggtggctggaacggctacagcgtggctctcgctagcgccatgaccgaaaaactcaccatcgtggtacgtatcccgtgatgcagtcttattgattgatatattgcaggcctcggatgccaatcggtatccgaggcccgttgcgttctcctgccgagtgatacacccgcgacatcatcttcgaaaagacattcctgttatgaaatcgacccatgtgtgctaaggtaaggcgctgatgacgaacgttaagaatattatttccacatcagtggcggttatcgccacgggtgccatgtttgcatgcgtagccccgtttgcctctgccgattccgcgcagacgagtgctatggtgtcctcacgttctttcccgaaggcgaattcggtgaagaagaatttgttcgccgaatccacctccacttcggttgacgagaactctaaatggggtggcatcgagactcttgatgtgccacagaccgagtctcaggccgagaaggaggctgctgctgcggcggcggctcagaaagccgctgatgaagctgcggcagcccagtccgctgctgctgctgcagccagccgctctgaacagcgtgcgtcgattccacaggttgacttgggtaaaatgactggcactggcgctgagcttgccagcttctcactgaagttccaaggctatccgtatgttgccggcggcaacactccggcaggatgggattgctccggttttgtacagtacgtcttctcccagtttggcatttccctgccgcgaacctctggtgctcaagccactgtgggtactccggtcgcaagcttggcggatgccaagccgggtgacattcttgcgaatggtactcatgcggccatttacatcggtaacggacaggtgatgaatgctatgaacccggtgcagggaacggcaataagcaacgtttccgtgttcggtggagctggatattccattcgccgcgtgatgtaacaagaattatgcggtaagcgaattcgtattaaggcacgtcctttgggatgtgcctttttcgtatacgcggatttctttttgagcggaggataccggccaaaccgagtgtcgcggggtattgttggaggtacgtggtattcgtgccacaataacttcaaggaggtcgtcatgattaacgacaaggccattctcgtcggcgttgacgggtcgcatgccagttacaaggcaacatggtgggccgcgaattatgcaaagcacgcggggctgacgctgcagattgtctgcgcatattccctgccgagctatgccgccgtttcgttcgatgcaacttacacggcgatgggggacgataacgccgcgcattccgatgctcaggagattctggccaaggccaaggccatcgcagacgagcagggcgtcgaagccgccacactgattgttaccggagacccggcatcggtgttcgtcgaattgtcgcgtaactacaatctgatcgtcattggtaaccgtggcaagggcggtctggccgagcgtctgctgggcaccacgtcctcgtcgctgccggcatacgcctactgcccgattgtagtggtgccgtacaccgatgatgacggcaacctgatgcacctgaacaacacgattaccaaggtggccgtaggctccgacgaatccaagtggggtctgaaggcgctggacattgccgccgacttcgccacgtgctggggtgcggaactggacgtgatttccgctgtgccgaacctgaagggcgtggatggcgaggatgccatcatggagtcctacaaggacgatcttgaggtgcgtatcaagccgttgcaggaatcgcatcctgatctgaaaatcaacaagcagatcgtttccggcccggccgtcagcgcactgaccaaggccagcttcgatcacgatgtggttgttgtcggttcccgtggtcgtggcggcttcactggcttgctgctgggctccaccagccagggactgctgcagcatgcggccggcccggtgtacgtggtgccacgcaagtatgttgaggctgcggaatcgcgtctcgacaccgtgccgagctcgcccgccgaagtgcctaccaagtcgctggaggagattgccggcgtcgaggagattccggtgtccgcagccgagcctgaagtcgcccagcagatcgaaaagaccatcgatcccgacaggcagtaaagtccgggtatacaatgagctccctcatcagagggagctcaatttattagtacgtcggtttattagtacgtcagtgcttgacggtgacgttcatgcgcaccggggtctcctgtacgtaggtgtgcttgaccgtgcagcccttgtcgatatggcgggtgacgcgttccttgagcttgttggcatcctcctcggacaggctggcgtcagaagcatcaatcaccacctgctcctcgaaaccggtgtaggcgtcgttctcggggtcgtacgtgccatccaccacgatcttggcacccttgccctcacccagcgtatgttcgatggcgaactggctggacagcgcggcgcaaccggccagcgcgaccttcatcagatcgcccggcgtgaactggccacgatccttgccgaacttaatgtgcgcgccatcgtcgctgaacgcatcccacgaaccgtccttgttgcgttcaacccacagtcgcttacccatagctgctcctttattttcagccgccggcgatctggcccatcgccatgccagcgggggagcgcggcacctggccgctctcccgcatcatcggacttctctattatgcccctaagctacactggtgcacatggctttgaccgaagaacaactcgcagatattcgctcccgtatccccgcacgtcccgaaacggacattccgatgccctatgaggacctggtgcgcaagatcctgaccgaaggcacgctgaagtccgatcgcaccggcaccggcacgatttccctgttcggccagcagatgcgcttcgacctgtcgaagtacttcccgctgctgaccaccaagaccgtgttcttcaagggcctggcctacgagctgctgtggtttttgaagggttcctccaacatcaactggctgctggagcacaacgtgcatatttgggatgagtgggcggacgagaacggcgacctaggcccggtctatggcgtgcagtggcgttcctggcccgcaccgacccccgaggacccgaatcgcaccatcgaccagatctccaatgtgctcgacctcatcaagcatcatccggattcgcgccgcatgatcgtctccgcgtggaatccggccgaggtggagaagatggcgttgccgccctgccacgcgctcttccagttctacgtggccgacggcaagctaagctgccagctgtaccagcgttcctgcgacatgttcctcggcgtgccgttcaacatcgcttcctactcgctgctcaccatgatgatggcgcagcagaccgggctcaagccgggcgaattcgtctggaccggcggcgactgccacgtctacgacaaccacgtcgaccagttccttgagcagctgggccgcaagccctacccgtacccgaccatcgagattcgtaaggccgattccctgttcgactaccagtatgaggacttcaaggtcgtcggctaccagcatcaccccactattaaggcacctgttgcggtctgatgctgattaccatttcgtggacagcgaagactgtgaaggtgacggaccccgagtcttcgctgtccactacactaaggcccagttccgcaatccaggaggagtaagcgaaatggagcatgacagtagccgtagcggctatcacgaacccgagcccggatctgccgggctgtctgccactgaagaagactggggtgacgattatcccaagaccttctcggtgaatcttatctggggcgaagcccgcgacaaggaaggtcgcgccggtgccatcggcctcaatggcggcatgccttggcactgtgccgaggatatgaagcatttcaaggagctgaccgtctcccatccggtgattatgggtcgtaagacttgggaatcgctgggggtcaagtaccggccgctgcccaaccgcgacaacatcgtcgtttcccacgatccgatgtaccgtgcgccgggagccactgtggtcaccagtcttgacgacgcgctcgatatggcccgtcaggaggcgattccggacgacggtctggaccgttcggagatttggatcctcggcggcgcccagctgttcgccgaggctttgccgttcgcggacaaagcctatgtgactgatctggccgccaccgtggatgccgacagctacgcgcccgatatggcgtcgctggtcgaggccgggatgtggcgggaagccgaagtgggcgagtggcatacgcccgccaaggaggagtccggcatcgattcctatcgtttccgtatcttggccaaaaccaagtaagcatgcgaatccggcttgtgtcctttatggcggcatgagccggattcatattcattcgaccccaaaaacacattcgggccgtgtgcggcccggtgaagcccgattgaggattgattcaaagctatgagcaatacccagccctacaccgtaatgaccgtctgcaccggcaatatctgccgttcgcctatgggcgagattattctgcgtcacttctttaatgagcgcggtctcggcgaccaggtgaacgtggaatccagcggtgtgtccgacgaggagtggagccatccgatcgacccgcgtgccgtgcgcgtgttacgcgaacgtggctatggtgatgagattccgcgtgaccacttcgcacaccgcatctcacgtgaggaaatcgaccgtaccgacctgttcctgccgatgaccgcctcccacatgcgcgccctgctgcgcatgctgccggccggcaagcgcgccgaagtgcacatgtaccgcagcttcgacccgaatctgcccaagccgaagcccggccgcgaggatcagattgatttggtggatccgtggtacggcggcaagcacgagttcgaggtcgccatcgaccagattgaggaagtcgctccgtacatcgtcgattgggtggcgaagcagctgtaggaatcggcctgtggccgatgctgtgtgtttcgcagtcttacgaccgcgggtctctacctccgcttcgctgcgttcagcacctccctcacagagggaggtggtcgccgaaggcgaccggagggagagatcaacgaaggagaagccgagcccaacctcagaacaccagctgcaccagtagcatgtatacgatcgtgccgccggcgattgaaagcagcatactgcgtttccagacgtgcagcagcacgatgacggtgcaggcgatgagttccggaaggccgtgtgaaccggtcagaatcggggtgttgcgcagtgcgtataccaccagcagaccggtcatcgcatagggcaggactcggccgaaatattcgatgacgcgcggcggctgcttggattcgggaaataccaggaacggcagaaaacgggtgcacatcgtccccagcgccaccgtcacgatggtgagcgcgccttgccagatggtcatcgtcatcgcgtctgtccttccttctgctggtccgctgcgtggctcatggcacggtctgccgtggcttccggggcgtcggcggccggccgcaacacatccagatgcgggcgcaacgcgacgaacagtatcagcatggcgatcattgagggaatcatgaaatcattggccccgaatatcagcaggcaggccagcgacgtcagcacaccgatgacggcggacagtcgctcgcgatgcttgccggcgagccactgatcgaggaagatcaccagaaacagcgcggtcagtacgaaatcaagaccgtcggtattgaacggcagatgcgcgccaatcagcccgcccagtgtggcgccggtcacccaatacagctggttgcacagcgtgacccagaagtagaaccagcttcggtcgataccggcggggattttcgcggtggagttgatggcaaaggtctcgtcgcacatgccgaaaatcaggtacggacgcttccagccgagccccttgaatttgccgagcatggatagtccataaaacaggtgacgggcgttgaccatcagggccagcagaaagccggcgagtgggttgaacgcggagagcagcagattcaccgtgacgaattccatcgaaccggcgaagatgaacgcgctcatgcacatcggccatacaaacgagaagcccttggtgcccatgagaatgccgtatgaggcgccgagaaacaggaatcccaggcaaatcggtatggtcagcggaaacgccgctttgagcgccggcaaccaagcgttggtgttggcggtgtctgccatgtggatgatgttctccttgtgcaactggtctgccggccgatattcgccgataatgccatatgtggttatacacgcatggtgccgataaacgaggtgaggacggtgtcgggactctgtgcgcgaagtcacagtgtggatgatgtcacatcgtctacggtgggacagtccttgtggcgggcgtgaacacgtgctgagatgaaagcatgagcacatatcaaggtaacgaaccatcgcaaatcgtctacaccgctacggcgcaggttacgggcggccgcaacggccacgctgtgagccatgagccggaactggagttcgacctggacacgccggtcgccatgggcggcaagggtcagggcacgaaccccgagcagctgttcgccatcggctggggcgcctgcttccaaggagcgttggcgcttgccgccaaggagcagcgcgtggcggccaccaagctggccaagagtcaggtgcgcgccagcatctcgctcggtcctgaaggcgagtccttcggcctgaagggcaagattgaggtagttctgcccgatcttgacgatgaggctgccgccaagctcgtcgagcgtacgcaggagctgtgcccctactccaaggccaccgcgggcaacgtgcccaccgaggtcgttgtggtgaagtcgctggactgaagccttccgggttgaaacccgagtccaagcattcggcccgtttccttcagggaagcgggccgaatgctttcaggcctggtcccgcgaatacgaaaagacctcggtcgctatgaccgagatcttcaatgaagtacccccagagagagtcgaactctcgttgtcagattgaaagtctggtgtcctaaccgttagacgatgggggcgaacaactcgaattactttacgggaggttgttcggttatgcaaatcgacggcatttcggcgtgtcgcaatcagttcagggtgacggcctgataggtgaagtcgtggatcgcgcggccggcggccaggcccttcttttcgaagttggtgagcacgcggccctcgaaccgctcggattcggtgaagtcggcgtgcggcatgtcggcggccatgtcggcattgcccttgcccacgtgctccagcgggaggctgacggttatgctgcccaggttcttccagccatcgaggccgtccatcacctcgtgcacgtgcagggcgtagtcctcgatgtcggtggcgatgcgccagacgccgtctgtgaccagcgcgcgatgaatgtcgccggccatggcctcctgcacgatgcggcgcttgtggtgcttcttcttgggccatggatcggggaagaaggtccatacctcggacacggtgccgggcgcggtgaccttgaacagctcgggcgcattgacctgggccacacgaatgttggtcagcccctgcttgccggcgagcagcagcgtgtgggccacaccggggtcatagacctccaaggctaggaagttcgtctccggatgggccgcggctgcggccgccacgttttctccctgcccggtgccgatttccacaatgagcggattgtcgttgccccatgaggactccacgaacgcgcggtcgagcgtgacgccttcgcgcacgtccagcaggttgccggccgcaatgtccaacagatatgtgtcggcatagttgtcccaggcgcgctgcaggcgatcgtccaaacgtccggagcggcgcacgaaggaaagcaccttgtgcagggggtgcgccggtgcctcggtgtggtccgcggccatcgcggtgacggaatcgattgctgtggattcgggatcggtcatatattcctcggattttccttgtgcgccgcaccgctgttcattcgttaggtcgatttggcgttcattaggtgggtggtgtgcgataccaaccaccatatcaagccatttacccggtgttcgtgcgggccggctccgggccgacctacctaatgaacgccagatcgacctaatgaatgcagatattgccggacgacaccaccgttttgtgcgattatgttcgtgtgatatactcaaattgtttcaaaaggtaacaaagcggaccaaaagtgaacagccgctgaactccacacggccgacacttgcaacccgcataaggaaaggtcaactatgacagttctcgtcaccggaggctgcggctacatcggcgcgcatgtcgttcacgcacttcatcaggccggcgaaaaggtcgtcgtcgtcgacgatctgagctacggcaagcccacccgcatcgaaggctcccgtctgtacggcatggatatcgccgctccgggtgccggcgagcgtctggccgaaa

SEQ ID NO: 3705 - DNA, 62452 bp, Unknown
  R150_10m  MAG No. k141_7661
catgacatcgacgtggaccaggtcggcgttggcgatggccttgagatcacgttcgaggttgcagaagtcagcggacaggatgctgggtgcgattgcgatattgctcatggtttcctaccttatctgtgcaatgggacttggggtcccgtgtttcgcgctgtttcggcgctgtttattgtggtgtcacttagtgcgcttggcctgcttcttctggcgaagctgttcctcttcgatgctctggcgttcgagctcgtcggcggtgaccgccgcaagcccgcgcgcctgcgccttggggtccggaccgtactggtaaagcacgacgaacaggatgcagccgagcacgaagacgatgatcgcggtccacacgttggtcctcaggcccaggatcaccgtggagtagttgatgcgcacgttctcgatccaggtgcggcccaggccgtaccacatcaggtacatggcgaactgctggccggccttgagccggtcggcgagcttgtggccgaggtagatgatgagcgcggcgccgatgaggttccagatcatctcgtagaggaacgtcgggtggaacagcgtggtcctgtagtccgggcattgcgcgccggaatagcagatttcggatttgccgatggcgtccgcgtcgttgagcttcaggccccacggcaacgtggtgggccagccgtagagttcctggttgaaccagttgccgagtcggccgatggcctgggccacgggcagcgcgggggcgatggcatcggcgaagatcgcgaacggatagtgcttgtggcggcaccacaggaacgccaccaaggtgccgacggagatgccgccgaagatggccatgccgccttcccacaccttgaggatgttgaccaagttgccggtgggcgggaagtagtcggccggcgtggtgatgcagtggtagaggcgcgcgcccaccagcgcgcagggcacggtgacgagcgtggtgtcgagaatctggtcgaaggtgccgccgtaccgcttccaacgtgtggtgaggatccatacggccacgcagatgccgatcaggatgcagatcgcgtacatgtggatagtgaacgggccgatctcgaacttggagaaggtcggcgagggaatataagccagattcatcgtgcctctacttgctggtgctcatggtgtgtccacgcgcgggttgtgcttgatgctctgtgactaccctaccgtgtcacggcacaatccgcgtgaggcgcaccgggtgttcaccgggcgttgtggatgccttcggccagttcctcgctcttggcggcgagcagcttcaagccttccttcgggtcgcgtgcggtcttgttgtcgtccgcgagcagggtgtgcacgagcgcggagccgacgatgacgccgtccgcgtaggagccgaccttggcgccctgttcggcggtggacacgccgatgcccacgcacacgttctcggcaccggcctgacgggtgcgctccacgagcagttcgggcgaggcgtcgatggtggcgcgttcgccggtgacgcccatgcgggcggccgcatacacgaagccgcgcgcgttgcgggccacggtttcgaggcgctcggtggacgagtccggggagaccaggaagatgcggtcgagtccgtgacggtcggaggcttcgatccactcccccgcctcgtccgggatgaggtccggggtgatgaggccggcgccgccggcgttctcgaagtcgcgggcgaaacgctcgacgccgtagtggtacacgaggttccagtagctcatgatgagcggcacgccgccggtgttggccacggtttcgacggcctcgaacacgcgcttgatggtctcgccgttgttcagggcgatggaggcggcagcctggatgaccgggccgtccatgaccgggtcggagtacggcaggccgatttccacggcgtcgacgccgtgctcgaccatcgtcttgaaggcgtcaagcgagacgtccgggttggggaagccgtagggcaggtagccgatgaaggcaggcttgttctcagccttgaacttggtgaacatagcgaccgacttgctgggcttgtggctgatgcccagcggctggccggacggcgtggttgcttcgttggtcataatcaacaatctcctcttcttgttcaggcgacagtattgccgtgggcgccggtcacatcaagcgcggcggcctgatcgtcggtcaggtagccgaaccacttgccggcggtggccatgtccttgtcgcctcggccggagatgttcacgatcatcacggccttgtcatagcccttggctttcagatcggcggcggccttgtacgcgccggccacggcgtgcgagctttcgatggcggggatgatgccctcggtctggctcaggtcgcggaaggcgttcatggcctcctcgtcggtggcccagctgtagttcacgcggccgatgtccttgagccatgcgtgctcggggcccacggaagcgtagtcgaggcctgcggagatcgagtaggtgtcgagcgtctggccttcgtcggtttccagcaggtagctcttggcgccctggaacatgccgagctggccggtgccgggggcgaagcggatggcgtgcttgccggattcggggccgttgccgccggcttcgtagccgtagaggttcacgcgctcgtcgtccaggaaggcgttcatcacgccgatggcgttggagccgccgcccacgcaagcgcaaatcgcgtccggatggtcgatgccgtaccagtcctggagctgctgcttggcttcctcgccgatgatcttctggaagtcgcgcaccatggccgggaacgggtgcgggcccgcgacggtgccgagcaggtagtgcgtgtccttgacgttggtgacccagtcgcgcagggcttcgttgatggcatccttcaggatcttgtcgccgagggtcacctcgaccacttcggcgccgagcatacgcatgcgggccacgttgagggcctggcggcgggcgtcgatctggcccatgtagatgcggcacttgaggccgagcatggcgcacacggtggcggtggccacgccgtgctggccggcgccggtctccgcgatcacgcgggtcttgcccatgcgcttgacgagcagggcctggccgagcgcgttgttgatcttgtgcgcgccggtgtggttcaagtcctcgcgcttgaggaagatacgggcgtcgagaccggtcttctccttgaccagtgcggcgaagcgcggggcttcggtcagcgggctcggacggcccacgtaacgctgctggagcgccatgaattccttgtggaattcggggtcggccttggcctcattgtagacgcgctcaagctcgtcgagggcggtgatcagggcctcgggcacatagcggccaccgaactggccccaatacggtccctgatgttcgctgagcggggtcgtttcggatgctttcacttgtgctcctgcctttactagtcgttccactgcaagttcatgatcatcggcggtggccacgccctcgccgaccagtaccgcgtccgctcccgcacgggcgtagtcttcgacctcgaccgcgccgaatacgccggattccgccaccttgatgacgttatcgggcagatcggccgcgagttcgttgtatttgttcacgtccaccttgaggttcttcaggttgcgcgcgttgatgccgatcaccttggctccggcctggcgtgcgcgttcgatctcctcgcgggtgtgcgtctccaccagcacggtcatgccgagctcgtgcgccaggtcgagcagatgcttgagctgggcgtcgtccaatgcggcgacgatgagcagcaccaggtcggcgccgtgggcgcgggcttcgaagatctggtagtcggtgacgatgaagtccttgcgcagcaccggaatgtgcacggcggcgcggaccttgtcgaaatcgtcaaggccgccgaggaatctgcggccttcggtgagcacggagatggcgcttgcgccgcccttctcgtactcgcgggccagcgcggccgggtccgggatgtcggagaggtggcccttggacggagacgcgcgcttgatctcggcgatcacggggatgccgtcggcgcgcttaagccatcgtgtcgcgtcaatcggagccggggccgccagcgcggccttcttcacgtcctcaagcgatacggtgagctcacgggcgcgctgatcctccagcgctcccgccaccagttcgtccaaaaccgacatggtcctccctttgttggtgttcggtcatgcgccactctaggtcacgccccgtcccgattgccgaacccgtcctacattctgggctattcctcgttggttcgtatcgctacggaaccagagcggccaacaaaaaggaaaatcgccatgaatatcggtcatacggcctgggattgattccattgatggcatagactgggcgcatgtgcaggagattcgcgcttgatttggattgggatgccgtggcctcacagttcgcggtagacgaggatgacgtgcgcgttgacactctgccacagccttcctacaacatcgcacccatgcagaacattggcgtggtggcacaggacaaggatggccgccgtcatctgaccggtgcctattggtcgctggtgccgcgatggagcgccagcaaagtgctgagctaccccacatataatgcgcgtgtggagtctgcgcatgtcaagccggcgttcgccgaatccacaaaatccatgcgagccatcatccccgcttccggctactacgaatggaaaggtcgcaggccgttctattttcacgcaccacatgatgaactattgtctttggccggcctgtactcatggtggaggccgtctcccgcatcgccatggcagctgaccgcaaccatcatcacctgccctgccgcggacgagttcgtcaaggtgcatgatcgcatgcccctgctggcgcctcggaatatggttgcctcatggctggaccgctccgttgacggagccgcactgttagattccatgcgggaagcgggtaccatgctttcccggcatctgcaatttcacgaagtcgcgccactgaacagcgacggcaaacgtcttattcagccattggattccaccgaacccatgcgtctgttttgagctcttgcagctggaaccggctatgcagctgtatatgaagacgggtcaatcaacgccccgctgatagctaacctcgtatggccatcagtcaaaaacaggtctcttctgctcgacattggtcgactacgactacttttgcaccaatccgcgcaacaactcgatctcgtcgcgatgcgtggcgggcgtctgctccttggtttcgagaatcatcgggagcttggccatgattgggtcgttgaccagtcgcgtgaagaacgggatgccgagctggccctcgccgatattggcgtgacggtccttgtgcgagccgaggccgaactgcgaaccgttcacatgaatcgccttgaccttggccaagccgatcgcctcatccaactggcgcatcacgccgtcgtagtcgtgcaccaaatcgtagccggcatccaacacatggcaggtgtcgaacgtgacgccgacgttcgccttattctccacgccatccatgatcgtggcgagctcatcgaaattgcggccacattccgtgcctttgccggccatggtctccagaagcaccatgacgccggccgcgcgctcgaacacctgattcagtccctcgctgatcagccggcagccggtctcggagccttggcccacatgcgcgccgggatgaatattgatatacacctcctggccggcctcgcggatggcggtcagcagctcgatgtcctcggccaacgcctcgatcgcgaatgtgcgcttggcctcatccttgccggctagattgtagacgtacggcgcatggacgaccaacggcccatagccctcagccttcagacgcgcaccgaacgccgccgcgccggccgggtcgagcgccttcgaacgcttgccgtacggggaacgcgggaagaacgcgaacgcggtaccgccctcctcatgggaacgttccagcagcgcattccatccgccggccgtcgacagatgcgatccgatatacagttccatcattccaaactcctcgtgttccactcgctgttcgtgttaccgctatcatatggtaggcggcatcgagcgccgcccgcacaaccgacacgagacacaactgttcacccgaccaaaggagacccgagcatggcggcagccggcacacccaaggacgataccggccttgaacggaagatggagtcgcgtcacctgacgatgatctccctgggcggcgtgatcggcaccggtctgttcgtcagctccggctacgcgattcatcaggcgggaccgttgggcgcgatcctcgcttacgcggccggctccctgctcgtctactgcgtgatggtgtcgttgggcgagctgtccgtggctatgccgtacgccggcagcttccacatgtatgcgaagcggttcatcggccccggcaccgcgttcaccatcgccatcctgtattggctgaactgggcggtggcgctcgcctccgaattcacggccgcagggctgttgatgcagcgatggttcccgcattcgccgtcctgggtgtggtcggccgtgttcattgtggtggtgttcgcgctcaacatcatgtccgtgcgtctgtacggcgaagcggaattctggttcgcgtcaatcaaggtgttcgccatcatcgcgttcattgtgatcggcctgctggcgatcttcggcgccataccgattgccggtcatgattccgcgccgttgctgggcaacttcgtggccgacggctggttcccaagcggtatcgcgccgattttctcgactctgctgaccgtggtgttcgcgttctccggcaccgaagtggtgggcgtggcggccggcgaaaccaaggatccctcgcgtgcgattcccaaggccgtgcacaccacggtgctgcgcctggcgattttcttcatcggctcgattctggtgatggcggccttgatcccctggcatcaggccggcgtggatacgagcccgttcgtgctggtgttccagtcaatcggtatgccgttcgccggcgacatcatgaacttcgtggtgttgacggccgtgctttccgccgcgaactccggcctgtacgtgtgttcgcgcatggtgtggtcgctggccaaggagcggctgattcccgaacgttttgctaggacgaatttccgtggtgtgccggtgtgggccgtgctgttcagcatggtgggctcactgctggcgttgctgtcttccgtgatcgccgcctcgaccgtgtatctggtgttggtcgccgtgtcaggtttggcgacgctggtggtgtggttctccgtatgcgtgtgccatatccgtttccggcgcgaatgggcgcgggatgggcacagcgccgatgagctcggctatcgtgcgcccggtttcccggtgctgccgtggctggccatcgtgatgtgcatcggcgcgctggtgctcgtggtgctcgatgatacgcagcgttcgaccctgtattgcatgatcccgttcgtcgcctgctgctacgcggcttattacgcactcgaacggcagcgcaaacgcgaaaacaacgcctaactcgatttcgaggggctgatttggcacttgccggagatctatctccgtttcaaggggctgatgcccgagtagacaaggctccacaatggcgtaatggcgttgccgcaaagccgtttatactcgcggtttggcgtttgagcagcccctcgaaagccaagtagatgtccccaccggacgaaatcagcccctcgaagccgagaaaccattgatggccgattatgttgtgcccagtgacgcgcctggttttatgctcgaactggtacaataattggagtttgttttttgcaaaggggcattgttatgtacaaggtgttggtgtcgttcgcagacagctaatgcgcgttgactcgtcgcgctaagccgtggtcaccgtttgggcccacggcacttctgttgtgccatttcccacgcacttggtcgaaggctggcgatgggccctgaccaaaaggaatttcctatccgcaatcatgctcggcgctatggtgacatcgcctgcgtggccagtatcaccggcgcgcagatcatgttggccacccgtggcgccaacgcggtcatgatcggactgctcggcacggcaatgggcgtgagtactttggtcggctcgctgttggccaacaagctagtcgatatggttcccacagggaaactgattgcgggcgcgctggcgttgttcgtggtcagccagatgccactgctattcctgcacagctacgcggccattctgatctgccagattctggccggcctgccgttccccgcgttgaacgctggtctgctgggctttctctacggcaagacacccgacaacatgcaggggcgggcttctgccgtatttgaaaccacggtcggcatactgggcgcagcatgcccggcgatggtcggctggctgttgcaacagccagatctcggtttcacggcggtgatggccgtagccgtggtctgttccgtagcgggattggccgtatcgttggccggcccgctgcgcagcattccgaatcccgaccagtggtcggtcggaggttttcctgtaacgccaagcagcggagcgccggtttatatcaggtcgtacggcatctgacgcttgaccagccagaagatgccgaggccgatgaacaccagcagattgaatccgccactatgccaccacaccacggcgatcagcgtcgccatgcgcgccacatagaacgccacgcgaagccacccttcgcgcggccgggtctctatcgtcatgtgcgtgaagctgccgccgaacgtgcagccgccgcgcaaccatggcaccacgccctcgaagaggatgagcgccgccaggaagaggatcgagccggtccagtcgaacggttccatcgactgccatgagccgttggagcccgagggcaggtttgagcggacgatcatgacgaacagatgcgtcggcatcacggcgaacccgatcagcgtcatgtcgatgatgaacgtgatcagccgcctcatgaagccaggtgtggtggtcggcgtcatatcggcgacccgcgccggaatcaggcgcagcgaaagcatggccagcgcgaatccgatcagcgcgccggtcgtgttccacaggagatcgtccacgtcgaacagacggtaggcgcacgggaacacgcccatgaggccggtcagctgcatcgtctccagaaacagcgacgtggcgaatgacagtactgcggtaaccggcagcggccaacgccagatacggcccatgatgaagcccaacggcaggaagaacacgatattaaacgcgatttgcagtacggcggtgagaccatcggtacggatgtcaccgatgaactgcaatggattgagctgtggcgtcagatggtgcgcggcgcaataggctgccgcatcggccggcatcggatacagtgtgaagcacagcaggccgagcaggtacagcaccgtgccatacgccactatggccgacgacagtcggatgcgattgtcgcgatgatacagcaacgccagcaccggcaccgtcagcagcatggacacaaacggccacaatgccagcgcgaacgcaaacggttcggaaaagttcttgagaaatcccatcttcaatgctccctgcttcggtccgctccgttcggtttcggaccttgactctcgacttctgattccaaggtacggaacatgacggcacgcgggtatcagccatgagagcgaaatcattgggatgaaaggcgattcgtctcattcgcatggatgagggagatacaccagttgtgactgacaattgcggcctgcgaaccggcaggatgaatgggactgacccaactggcccgtctcatcttgtagggtgtttcgtgctcttgtaggcagatgattccaatggcgatgatcggaataccgccattgcaatgacctctcgccaaggccagctacctacaagatgctgaatctgtctacaagatgaattcgccggtgaaccatgccggcatcaccgtcgatgccgtggattgcttcgctgagcaatgcatcctgacaatcgtcgaatggctgcgtgggtaaatacttcttccttatgatgcacatatgatgtacgacttgccgttgcatgaatacgcgtatgcttcgctgccgattatgccgtggccatcgcctcgcataaagccgacaacgcccgtattgcatcgctaaaagcatagtcacgcgcatagccgtaccgctttctataagcgtcccacgggtctgatttcactctcattcatgctggcatcaccgcttcgaggtaagggcgcatcacgttcacgagccgaaattcgcgagcgtagttcatgagtttgaccaagtcagtgtgcgcggatctcatgtaattctggaaggcggattgcaaatcttgcggatccactgtgctgcgggagcggaacaaatcgcaaatggttcgttccaaatcataaacgcgaaccgtatgcccgaacatggtgatagccgacgccaggccaattgcaaagcgattgtcggccacctttctcactgttacgtcttcattcttgagacgagccgtacctgatgattgcggtaaggtaatcgtcggtgtcagggggctcgctccccctctccaagcaagaacaacgcagtttcatgcgaaaaaatggctttcggatatcgatactgcaattcgaacagcggatcggactcagcattcggtgaaacatataagccctttgccgctttctcaagcttggcttcacgcacgaatcgcgaaatctccgtgcgggaaactcctcgacgctccatttccgataccggaagatatcccatatgctccttcaatacgctttccgcttctgtcgctctagtggacatgggcactccttcagatgttgcggagctcggagagttgcctgaagaaaagttttgctatcgcctaacctaatgcgttattcgactccaaccgttgctcgacttcgaaatgctcgaatactatgagcgagttgtcgttcaacggaaagtttgggttggcgaattcatcgcggtattccgccgaattccagaaagattcgtgtgcgctccgccattgggccgccgtgacgtcgccttcaccctcatcgatggcgtaccggtcagtgacttttccgagcggaatcacgtcaaccgcagtggtgacgagtacggctacgggtcgttcatcggaatccaccaacaccgaatgcgcgccaacgcacggcagcggttcgacctcttcctcatattcaatcatcagcgcagcggtggcggtttttacgccgtccagaatgagcttcaccaagcgatcgcgttcaggcccaggaaacataaactccgctttgggcaaatcactggtttcaaatgccgtattgacgctcatgcaatgctccagatcgtctttatgttcaattgtgctgtgcttttcttactcccatcataatagcccgaattccatgagtttccggcgctgatccagtggcctccattacggtcaatacaacctgatgccaagcaatcacatgacaacaagtgacactgtactcacgaaccggcctactatgggcggcatgacgattcgtattgtttcgattgagccgccatggtttgaggaaaagtcccaagttcagtcgtgcacgtggcgcgaactcaatcaggggcatattccgcaggaaatcgtggatgcgatcactcccgaattcgcgctcaaactgacgcgcagccacgccaaagaccccaatcaggtcgtattggtcgctttggagaacaaccacgtgattggttttgctgagcttctgcaaacgccgcgttcgccaatcaaacggtccgaggctgcggaactggcttcgctatatgtgttggaatcttgccatcgtcatggtgttggccgtgctttggttgaggcgggccaacgcgccatcggcaacgatcggctcgccttgtgggtcgccggattcaacaccaacgcccaaggtttctaccgtcacatcggcttccatgagaccggcctgactcaaaccgaagacatgggcccggaactcgaaatgatcaactactctgacggcgtattccagtgagcagcccgacctcccacacgcgtccggcgctaccatgaagccatgtctttgaacagtgagcaacgcgcggcgactatccgcgaatttcaggagaacatgagccggctgggtctgaccgccgaacggcggcagggattttggcgtcagcggcagcagagtggagcaaatcatcaccctcaagtcgggcgtgctggagtatccgtggattatccgagcctatctgctgagcagagctgagacacagggcgtggaactcacgccgttcatggcgttacgcggaaatccgcacgattattggttcctcgacggcgactttatcgaccgaggcgaaatcgattaaaaccgattgataatcggccatttacacgcaagaggcgccgtcaatcgcctcgcgcatagaggccatcgctctccgtgcaggtggcgatgcgtgtgtagtattccgtcttgtcctcatggtcgatacgtgcgccgcaatgctgctgcaccgcaagacttgccggattggttttgtggacactcaggtaagcctccttgatgccgagctcgcgggccttggcaagcgtgagcttgagcccggcggtcgcgtagccgtgaccgcggtattcgcgggcgacaccgtagccgatgtggcccggaccgttgcgcaggaagtcggtgagccggtgacgcaggttgaagatgcccacatagtcgccctcatcgttgacgagaatgtatttggtggctggcacccagccgtccggcaggccgacgccaagcgactcatcacgcaaccctcgcacatatgcggcgaaccgttcacgattcatgccggccgctgggttctcgaatcccgtctcctccgccgggaatttcgcgaacaagtcaaacgcgcgttcctggtccgccagccatgtctcaatcagccgcattggtcacactcctcctgttgacacagcagaccacactactactgtgctcggccaacgaccgcaagccttatctagggtgtgtttacagataggcagcaagtgtctgccaatgcgtttatcgcaggatataccaggttactttccccgatacacggcagcgacgccgaagacaaattgtatgatgaacaatcccagcaggaagatcagagctcctggccggtacgtgcggtagaagtcgaccatatccggctgcgccaaaggcgctgccatgatatacaccagcgcagcgaacacggcgccgagcgcggaaacaaccaagaacgcgcctacggcaaaacgcagcaggccacgatccgaggtcctccggcgcagaccacggcatcccacgaagacgaataccgagatcagcaggtagaacagcagcccgtacgtgggcagcatgtcgataatcagcagatcgttcatggcatatcctttcgtggcgcaatcccattcaacctgcgcatggccaaaagcgcaacatcgtgtcaagtaatcgcatgatagcaggttttgtccggctgcgaccgtggccacgatgagcggcatgggacatgataacatgaccggggctgcggcgcggtcgatccgtatcgcccgtattggacaatgatccgttcgccctggatgcgatgtgcgcgatgatctcggccgtttccaaggacttccatgtcatgcgggggcacgggttcgcccgcggtggcgatcgagcactgccataacccgcataccaggccggacgtgccggtgtcggatcctaaggaatctgttggtgtcgctgcagctcattgccattcccactgaagagatgattggcgaaaacgatactcactacctattcattaggcttcagctcgtgttcgagcacaagtttcatcttgctgttatccatcaaccatgcgtgtaggtctcggtccaggatcatcgccagagcgaagcacgcctgcgtcgcattctccaatgcaatccgtcgattctcacccggcagaggtatgccgttgacaagcggctcatggtgagcgacccgattacgcagggcatgcactgttttacgatatccagcgcgtactttctcgtccagcgttcttccactgcacgggcatactggcgcccattggagaatgtcttatcgagtcctttgcgccataaatcgttctcataatctgcacggcgctggtctggccacttcgtgtggattgttccgccgtcttccaagagattgcgccaaaatccgaatgtcaatgacgctatgagatggccatgcgtatgattttttcgctggtgcggggtgagatggttccacgcttcacgaatctggtactgggttcggtcatcgaattgtagccctgccatataccagtcttcagtgccattctgctccagagcgaggagggagagttgccggtccatgcggttgcgcagagcgacctcgaggatggcgatgtcgcccatacaggcgctggccatgtcgtgatcccacaggtacagctctagcgctgggcatgaacgtctttgagcctcataattgtaggtggcaagccgttcatcggtaatgcacgcgcgcagcgccttctcccgcggacttcctttccttggagtccgtgagaggaaatcagttgttgaatttgactgtcggctcatggctcattatgatatatcaagaattcccccaaagggcctctccggacggtcttcgactcagccgtgatgcactgggggtttctttttatctggataatcggggcttggttggtctgggctcttcttcaggacaatcgcatatgtttcgggagtgctcagctttcagacgaggcattcgaagaaatgccattccgaggaatcggcatcatggatgatgatcagcgtgccgccctcgttggttatctccttatgaggccggtcgtagagcgcatcgagctgtgttcccaggttcaatcgcagggtcgcatccgcttccttgattatgcggatgttctcctggggcagttggccactggagtaatccctgccgtccagaatggtgccgtcgacttgttctgggtcagcggcgaccttcacgtaccggtatccgtccccatgaaagctttcctcgtccttgctgacgattgcccgcgcatcctcggaaaatgagatcgagaacgtctgcgacagattcgaaaccggactatagccctagtatcgagtccatccgaaccatactcccgccactaccaacgccgcgatgcccaaagcgatgatcgttccggcccggccaccggcggaaggttcacctttccatacgcggtttcccatcgtcggcctcctagccttagccgtagggtctgctagatcaaagtgtgtattactgattagcgtgaggtcgccgccactacgtgagcggtcgaaaacctcatgccacccggcaaatccgagaagcggtcggagaactattcgaagccgtcagctaatccggtgttgaacgtacgcgacgacacccagaaacgctcctatacccgctccgaggaagacgaatccccatcccaaccagtcagcaaatcgattgaccggggatttcgcaaagccctccatcaccgaattcgttccagtcgagccctcccctgattcatggttgtcctcctcggcatccctacataaaacccgttagtccaattcaactatatctgtttttcgccagctacaggagagaatcgactataactgatttccatgcgcttcttcagagaagacaagtctgttggacactttgatggactaaaggccagaacacaatggcgctagatgggacaaaaggtacattggtcctatggctaagcgcaaacatatcggcaccgtaattctcacgatactggtcgcggctctgctggcgtcgggcatttccggctggctgttctggcagtcggcacaacgggtgatcggcgaggcgcagcaggcgggcgaatatgcggctgaagcacagcaatccgtcgggcagggcgacttcaagcaggcgcttgagcagatggacagcgctggcagtcacatcgtcgcggcgcgagacgaaacccagggcatgctatggcaggccgccgaatacgtgccgtattacggttcggacgtgaaggcggtgcgcggcatgctggatgcggccgccgacgccgcgaccaacgccctgcccaaaatcgacagtgccgcgcagggcacgttggtggacttcaatatcgaagagctgctgtccggcatgaacttctccgacggcacgctttccattcccaaaatcgcttccatcaagcaggacctgtcctacgccggtgcggtcttgaagcgcgtcaagacgtcgatttatgcgctgccgcaaccccgcacggaacagatcaccgaaatggtcaaccagggcaagcaggtagtggaccaaatcgatgagactttcgacaccttgaacaccatcgtcgaaaagattccgggctgacgtcggttcggtcttgtcaggcgtaccattcgggccggcgcagtttcaggaatggtcgctgtttgcgcgctgctgcggtttgtgtgagatcgatgtcggtgataatcaactgttcatggtcatcagtctcgctgacgacgttgtcgtacgggtccaccaccactgattggccggcgaacgccacatcgccctccttgccgacccggttgcacatggcgatggccacctggttctgcatgacctggacgcgaatctcccacaggaacatctccaatggttcggcgctgatgttcgcagtcgggatgatgaccagatcggcaccgcgcaatgcgcatgtacggatgctttccggcatgtgacggtcgaagcagatgacgatgccgatcttgccgaacggggtctcgaacacgtggaatccgtcttgggagggcgcataatagtcgcattcatagaagcgttctgcttgcaggatgtgcaccatggtcgagatgccgctgatatggccttgttcgttgatccatagcgaagcgtcgtagttgtggccgtcctgggctttgaggtacaggttcggtgaaacgtacatgccgtgttgcagggccttgttctgtaatgcggcgacgtgacggtcggtcaggtccatgagatatcgcgacgcatcgcggttctcatactgggggaagaacggggagaactgtatctcagggaagaacaacagatcggcaccggcctcgccggcctgatcgtagtaggccaaggccctatcggcgttttcgtcgatattgtcggtcatcgccatctgcgccatcgccagtctcatatcgtttccccatctttgagccgcaaatccacccgcacatgccaattgctgcccctgacgacatacgtcaatctcatagatgctcatcacaacccgacggagacactttttccatacgccgctcgccatacggcacctgatacggccatgcatcggctgcttttttcgaattactttccttaaacaagaaacgcgccgcacgctggaatatattttgagccccgagtacattaaccgttcacaagatcaatattgcaacggcgcatacggccgctaccacacgctcaaaaagcccggaaaaccgccaatccgagccggtctacaatcgccatacaacggcacgcaatcaccataggaggctgacagacatgtccaaggacacatcaaaacaaacaacattcgatttactgtcgggtttctggctttcggtcttctatggagcagcggcctgtacgtggtggccaccgtgctgccccccagctgttcaaggacatcggcgtcgctaacccggatgcggcagtcggcacgttgaactcggtcaccgccatcgtgggcctggtttccaacctcgtgttcggcaacctctccgaccacacgcgttccaagatgggacgccgcaccccgtggatcatgccgagtgtcacgggcatgtacctgtacgcgggcatcgccggcttcggctatggcgtgtactcggccatcgaccaggcactcaacgtcgacgtgttgccgaacaaggaagaggccgacaaggacctcggcatcctcagcttggccaccacgctcggccaagcagtcggccccaccatcacctccgtggtcaagaccacgaccggcacctacacgccggcgttcgccatctccatcgtcatggccgtgtacgctgccgtgttcgtgctgcgtatccagaaggtgaagtagccgctgcgagtgcctatctccgtttcaaggggctgattttgactttgcggaacatctacttccgtttcaaggggctgatgccaaagtagccactggttaaaaacggcggaatagtgatagaacaatgccatttctatctgcgttccgccagttgaccagccccttgaaacggaagtagacctccggcaaacgccaaatcagccccttgaagctgattttgactcagcatcatgcagcgcagctatatcctcagtgcgggtatactattccgggccgtcacgacgacgcctatggaacgcacgcatggcaaagagagaaacatgagtcagcccgacaccgacacggcggcacagtcgccgtcctcgcagcaggaaccgcagattcagacggatggccgtcaaaaccagccggaacaggtgaaccaaccagcgcaaatcagccagtccgagtcgccacatgacggcaaaggcgagcacgcgctgcataccaacctgaagcgcggcatggaatcccgccacctgcagatgatctcgttgggcggcgtgatcggcaccggcctgttcctgagctccggatacaccatccagcaggcgggccccatcggcaccattctggcgtatggcatcggcgcgctgatcgtctacctggtcatgctcacgctcggcgaactgtccgtggccatgccggtgaccggctccttccatgtgtatgccgagaagttcatcggccctggcaccggcttcgtgatcgcgatccagtactggctcacatggacggtggcgctcggatccgagttcaccgccgccgggctgctcatgcagcgctggttcccgaacagtcccacatgggcgtggagcgcggcgtgcatcacactcatcttcaccctgaacgccttgtcggtgcgtttcttcgccgaggcggagttctggttcgcctccatcaaggtgttcgccatctgcgcgttcatcgtcatcggatcgctcgccatcttcggcgtcatcccggtcgccggctaccaacatgccccgatgttcggcaatctcatcaaggacggcgtcttccccaacggcttcatgccggtgttcgccacgattctgaccgtcaacttcgcgttctccggcaccgaactcatcggcgtgaccgccggtgagacgagggacccacaaaccgccgtgccgaaagccatccacaccaccctgtggcgtctggcgctgttcttcatcggctcgatcaccgtgatgtgcgcgctgatcccgtggcgccaggccggcgtgggcgaaagcccgttcgtgctcgtcttcaacagcatcggcatcccctatgcgggcgacatcatgaatttcgtggtgctgacggccgtgctttccgcctcgaattccggcctgtacgcctccacgcgcatggtgtggtcgatgggcaacgaaggcatgattccgcgctggttcgccaaaacgaaccgtcgcggcgtgccgatgctcgccttgtgcgccgcgatggccggtggcctgctggcgctcctgtcttccgtgatcgccgcctcgactgtgtacctggtgctggtggcgctttccggcctgtccgccgtggtggtgtggatcgccatcgcctactgccagatcgtgttccgtcgccgttggctggagtccggccattccaccagcgaactcaaataccgcacgcccggctatccgtacgtgtcttgggcggcgttcatcctgtgcaccgcatcgttcgtattggtgattttcgacgtggagcaacggttcgcgctcgtggccgagctcgtgttcatcgtggcctgctatggggcgtatttcctgcaacagtgggtacgcaagcgcaaaaaggcgaccgaggccgacgacctcgatacgctttgggtcgcgcgtgactgaacgactcgcgacctaccggcgcaccgctattcgcgccgtgaacgtgcactgatccaacgcaatgccagacccagcaaatccacaccgccacgattgcccatgatgtgggtttgagcgcggccggggagaacggcagcacctgcaggccaatgatgattaagccggcggccagcagcgaagctgagatgaccataccgaacttcttccagtcaaggccttcgcttgcctcttcggcactctgcggaatcgtgtcgaaaccggtgtagaagagcggcgtcatcaccagcactccgggcagaaacgacccgaccatggtaaccgcgccggacgtcgagccgatcggcagcagaaacacggcgcccagcacgaaggcgaccatcgcctcgaccgggccaccgccgacgatcatccagtcaccgaccagcagcacccatacggtgccgatgattgcgccgaatcccatggtgaagtagttccacaggctcagcgatctgaccatgccgccgtcgtcgccgctgccatcggcactactgtcgccgttgccgttgttaccatcctcgtgcacaggaatagcggcactgggcaggccagtcgattccaccaaactggccgtcatcgtgcttgacgggctgaatgccgtggatgcggcgaccatgaccgagcctcctttaattcggcctgactgtgatgataacgccgttcacgatatgccgtattatgaacgcagtgagagcccgcttcaccggccctattcggctcatgaataaacttcgcctatctgcggcactgaacacatgaccataatgtgatacacgtcacttcctgaagtacgtagtcgttatggaatcacccgcacgtttcccgtatcggagctgtgcgatagctgtgagacaggggggggtcgtcagatttcggggggagggttccggaaacggtccgactgcaggatgcaccgggccgtgcgacacatgtcaacttgcgtattcacgccaaactcaattgagcaagccgattctcgtaaatggccagaagcggaacaacgccacaccttggatatcgtcgtatggcactagcccattgttgccgtcgtcaagatggtatcgagaatctctggaattggagcgattatcaccaagcacgaacacgttgccgtcagtaacggttacggaaaaaggactgtcgcttggattcacgccggacttaagataagcgctttcatcaatgggtttgccgttgaccgtgatgggctccccggatcccttgcaggcgacggtatcgccgggcagaccgatgacacgtttgattaggtaacgattgctgtcgattatcgacatcagattggtgggaagctgctccccctccatccagtctgcgggatctttgaacacgatgatgtcgccacggtgcagtgcaaagagtctcggagtcaatcgcgaggcaaatacgcggtcgccgatttgcaacgtgtcttccatgctacgggatggaatcacatagacgttgaacacgaaggtgcgtcccagcaacacgaccagcatcaccgcgatcaccgtcagcagatagccgcgaatttcactccaaacggagggctttcgcgcatgtctcctcgactgtccacgcgcttttttgctatgacgccccaccatcatatcctttccgaccggtaacgcaacaccatagtcctcaaaccatgccgttacctacgcccatgtttgagctcagctgtcacaccagcggttcgcgcacgtctagttcacaggcgatgccggtttccttgcgggcccattcggccgcctgcagtgcggcgatgttccataatgcgcacggcactccgccaaggtccggatgcgatgcccagaatgtgaggtcatcagcgtatgcggtgatgaccgattcttccgtgactggcatgatcgtgtggtacagacggtccgcaagcgtggccacgaattcgttggccgcggcgaacgtgtcgataagatgctgttcggcggtcaccggcgggccgaccagctcccaggattcgacgtccgtggcgctccaatgcgcggcttcgccgtccacatcgcgttgcaaagagacgaacagcctggcgaactcatccgaagtcagtcccgtaacccggcgtcgggttgacaattcaatcggagtcatcagataccgttcctttcgcttcgttcattccgttgtctcgctggtttgatttgctgccaaccggtacaaagcctatctcgcacacctcacgatagcccaaaccaccggcatggccatgattgccagccctacgaccagtgaccatgaggagccggcgattccggtcagattggtcatggcggcggagacgtcatacatgccatgagccacgatcagcggtgtaatcatgcccatacggcggtacagcagcacggcgagcactgcaatcagcacacgcggtggcgtgccgccggcacaatgtcctatcgagcatcgccgcatgattcgtgcggtccacaatcgaggcagcatcggtttccattcggttcatgcggccagactatcgcccgttcttgccgattgcctgtaagcaggttcggatagactggcgcgagaacaatgcgagaaagaggcaagaatgacccggaaacggtcacaacagcacgacgcacaacgcaaaccgtcctggcgcgtacgctggaagaccatgagccgagccgtagacatggaaatccgcgaacacaaaagctcattcgcggtctatgtggtgctgcgcatgctggtgctcgccatggcaatactccagttctttaacggcgactacgaaaatgtgttcctgtgcatcctgacgttgctgttgctgttggcgccggcgttcatccaggtgcagttccgcatcgagctgccttcggtgctggaagtcatcgtgctggtgttcgtgttctcgtccgagattcttggcgagatcagttcgttctatgagatcttcccgttctgggacacggtgttgcacacgatgaacggcttcctcgccgcggcgatcggcttctcgctggtcgacctgctcaaccggtccgaccgggtgaagttcgagctttcgcccctgtatctggcgatcgtctccttctgcttctccatgaccatcggcgtgatctgggagttcttcgaattcggcatggaccagttgttcggattcgacatgcagaaagacgccatcgtgcattccatcagctcggtgatgctcgaccccacgcacaccaaccatgcgattcgcatcaacgacatcacccaggtcacggtcaatggccaagacttgggcctcggtggctacctcgacatcggtctgatcgacacgatggaggatcttatcgtcaacttcatcggcgcggtcgtgttctccgtgttcggcttcctgtacgtgaagaaccgcggcaagaaaaactccatcatcagtcggttcgtgccgcgccgcaagtccgccgaccgcgattatctgcgactggtgatcgatggcgggagcgcggctgatgccaaggccaaagccggcggtgccaacgctgacgatagtgctaacgccagtgcggccggcaccgattcagctgatgcagccggagccaaagccggcaatgccgacgccgctccgaccgtcaccgccaagccctgagtacgctctacagcactttcgaagcgtcgaaacggtagtgcccggtgaccgtcatgtgcttcttgaagacgaagtagtcgttttcgcgctgccgctgcgccatgttgtgaatcacgtacggtgcacgccccgcgatcggccggcggatagccgccctgatagtagccggaatcgtaagccggatggttttcggcgtccttgcgcgcacccgccacgatatccgcgtaatcgtccacaccattgtcattgaaatcgaccgaactggcgactctcgaatacttgcgggccgccccgccttgtgattcgatgattcatgaacgtattcgggtcacactgtgatcgtccgacccgccgcccgcacctcccaatccgcccggtgcttgaacttgtggggctttggcggtatcgcgaccgcagcatcgccatgctcatctccagccatcagctcaacgaattgcaggagttgtgcgggcgattcctgttcatcaaaggcggccggcttgcggacgaattcgccggagaacagaagcggatcacggttatcgagcttggccggccgctcggtgtcgcgaaacgtgcggcggtcgcggctttggatccggccgccgtcattcatactgattctgccggccgtgaacctgttcaactccgatttcatgaaagtcagcggaaagaccggttcggtgagtgtgctggatttcctcgctggcgagttcgtcgtacagaacatgctgatgctgccgatggtggtcatggcctatctggtggctggtgccatctatacgcccgtggcctccggccgcatgttcctgtacaaggatctggaccgcgccacgatcatcaatgcgaaaatccttgccctgtttggtatctacgccgtgtacgtggcattgcagacggtggtgacggtcgctctctacatcctgtacatcgcgcgcttcgactacgcttccggcacactgctgccggccgcaggtgcggacatcgcttcggatgtggcctccatcgccggcatcctgtgcgccggtgtggtgactatactggtggtggccgcccttgccacccggttctcgaccggcagtacgagagcgcggaccacaccgtgcacctcgatgtgaaggtggacgaggatacggtgtggcttaacagaaagcaattggccttgctgtttggccgcgatatcaaaacaatcggcaagcatgtcggcaatgcattgagggaagagctcaatggattttcagttgtcgcagaatttgcgacaactgcatctgacggtaagacataccaagtcgagcattacaacttggatatgatcctgtcggtcggataccgcgtcaaatccaaggaaggcatctaatttccggcgatgggccaactcagttctgaagcagcatctcgttgatggttacaccatcaatcacaagcggcttgacgcacttcacgccgtcgtcaaggtgctatcgaggtccaccgaaccggaaattgctggcaccgcagagatcttggaacgatatttgccgagtcttgtgctgcttaacgactatgacacaggcaatgtccctatcccaagggcgacgagtcccagtgggtcttgacctatgaggacgcgatgctgttcatccggtcgatgccgttctacacgcaatccgatctgttcgggagggaacgcaacggttcgttccaaggaatcgtcgcaggactctaccagacgttcggaggcgaagaactgtaccgttccacccaggagaaagccgcgaacctgccgtatcaagttgtcaaggatcacccgttctccgacggcaataaacgttgtgccgccgcactgttcgtgtatttcctgaacggcaacagtatactgggcgacgatgactcccctgcttgtggagggtaacgccttggcggcgatgacgctgatgattgcgctgtccgcacctgcggggaaggacacgatgatcgccttggtcgagaacttccttatacggcatgaatcgcaggagatcaattgagagaccgtcaatgaagggtgcacatcaatcacgttctagcattgcgcgactatctgtacgagtcgtctgaacgatctgctgggagtgctcttcgcggaaaaccaacagcagaccggaggccgcatccactatgtgttgttcaacccttgggccgtgcgcagcaatgaggcattgaacagtttcgattcgccactgatgaagctgctggcgcgtgccatttacgccattgtgggcgtcagcgtcgaggaggcgattgcccccatcacccacttgatcgacaacccgccacacaccgcgctgtcagcgttcatcaagaccaaacccgtcgatctcactatgaacaccttcgacaggggcaaggcggtccggttggacgatatcaccaaaagctgctgaatcgctagctgtcatagcacaaggccttagacagaacacccagaaatcgaacgggtagatggatcgcgtctccccttgacttccggcaagcgcacgccaatcatggggcgtatgggtattgcaatcaaacgtatatatgaagagccgactgcgtcggacgggtatcgggtgctggtggatcgcctgtggcctcgcggcatgacgaaagagcgtgcggcgttggacctgtggctgaaggacgtcgctccctctcccctcctgcgcaaatggttcggccatgaccccgccaaattcgcggaattccgcatgcgttacatcgccgagctcgacgccaatgccgccgtggacaatctgcgccacatctgcacggagcatcccaacgtgaccctgctctatgccgccaaggacccgcacatcaatcacgccctcgtactgcgcgattatcttaactgaatattgactcaggacgaccgtcgtttcagtccatctgctagattctcgccgattttcatatctttgaatcgaagtgcacagtcgtcactccttggattgccaagtaaagggatgcctccaaaccaaatcaatccgtcatcgattatggcaaaatcggaacacgattcgacggtccggacaatgcacccaatagcacgcagccgattaatattccgttctattcgtgttctggttgccaccgcagcagtcgccggcaaacggacatagacttcgatgagcgctttcctgtcggccagtcggagcaattcatcgtcaattgcgctgagtccctgttgtgatacatattcagccgagataatcagggaacgtgcgcaaccggcaatatccttgcggagtatctctgcataattcgtggctgtaacgatgctgccttcgaataatccgtcagaccgggtgtcgagcaacgcatccgcagcatcttcgccctgcgtcgcggccgtcatgcaagcgcgcaacgcttccgcctttgcactgagcatgtccattttgtcagtatggtcaggatttaccgaatatccttgatttgcgtatgccttcagccgttttcgatacatgacagcggataaaggcacggtcacgtcgatgtaatcatagacacgaacctcggtcttgccatcattctcgcgatgaagtcgccctacatattgcgagagagtaccctcaaacgagaccggagcggcaagcagaagcgtgtcgaaacgcttctggtcgaatccttctccgatatagctgcccgtagccactacagtcaggctctcattattcggcaccaaggatagatcatgcatttttttggttattcgctgtttgcggtggggcgggcatgggttagtgtttcgggttcgatttcctgtcagaaaaaataatcgagtgcgggattacggccggtaaggctcctgctgtggatgcggatgcgcgccggtcttacggtggtgctttcccaaaacgcggattgtacgaggtgtgggacggcacgcggattcggccgttttccgcccgccgtcccacagcgctcgctatgaacggttgtggataatcatggagctgcagcgagaatcggcgttattccgcggtttctacagtcgtcggtgtgggacgctacggacgttaaacggttgacttgtctgccatcccgcgttcttgagggacggcgcggacgacaaacgattgacttgcctgccgtcccacagatattgggaggcgcgcggctgcctgctgcccataacgggtgtcggtcaccccaccgatcgcccccccctgcttgaaatacgcgactcgactttctgcaggcatcatggcggcatggcgacggcggacagtcgaaaagatccccatgatgcctcaacagccatcacccacgcacatcacagctatcaaccgcaaatatcaagaggctgaaaatctatgagacaagcaaccccggaaagcctcagaccctacagatggctttattgcaagggtatatgccggttcaaactccactaatagaacaaatagaacagccggcttaggtacggcgcggcaaatggcgcaaaccggccgcgatagtagtagcgtggtgcataccagtacaaccatgcgaggagaacagccatgatcaatgaggaatacaaggccatgcttggcggcaagtccgtgattcgcgaactgagcgagtatgccacgagccgcggtgctgaaatcggctaccagaacgtgttcgattacagccttggcaatccctcggtgccggctccgaaatccttcaccgacgccatggtcgacctctacgaaaacggcgattcggtgtccatccacggctactccccctcgctcggcatcccgtccgtcaaggatgcgatcgccgaaaatctcaacgaacgtttcggcatggcatacaccggcaaccatatcttcccgaccacgggcgcggcgggcgcgctgtcccacgcgatgcgcgcggtgaccaagccgggcgacgagatcatcaccttcgccccctacttccccgaataccagccgtacgtcaagggcatcggcgccaagctgaccatcgtgccggccgacaccgagaacttccagatcaacttcgaggcgttcgaggctgcgcttaacccgaacgtgcaggtcgtgctcatcaacaccccgaacaacccgtccggcgcggtgtattcggcggacacgctcaagcgtctggccgcgatcctgaccgccaagcaggccgagtacggccacgatatcttcctgatcagcgacgaaccgtaccgcgaaatcgtgttcgacggcgccacccagccctacccggccagcttctatgcgaactcgctgacctgctactcgtggtcgaagtcgctgagcctgccgggcgaacgcatcggctacgtcgcggtgaaccccgcagccaccgacgccgacctgctcgtgccgatgatgggccaaatctcgcgcggcaccggccacaactgcccgccgagctcgatccagctgggcgtagccaaggtcatcgaccagaccgccgacctcaacgtctacgagacgaacatgaacctgctctacgatgcgctcaccggcatcggcttcgacgtggtgcgccccggcggcacgttctacatcttccccaaggcgttggaggacgacgccgtggcgttctgcatgaaggccaaggaatacgacctgatcctcgtgccgtccgacagcttcggcgtgcccggatacttccgcatggcctactgcatcgacaccgagaaagtcaagcgttcgatccccgtgctcgaaaagttcgcccacgaggtgtacggcctgtaaacacgggccgcaagtaacaaacacaagaaaggggttgccatggaatacaccgaaaacgccgatcatcgcgaactgctgctgcacagcgcctatgactccgatacggtccgggccatggagcgacccctgctggacaaaggcgtgccgctgatgcgcatggccgcccaggccgcggcccacatggcggccggtatgctggacgacgaggatctggcgctggaggacacgtcgatcgtgctgctggccggggccggagacaatggtggcgatggtctgttcgcggccgccgcgctggcccaggagggcgcgaacgtcactgccatcgccgtgggccggtcgctgcatgaggccggattcgccgcgctcgtgcgcgccggcggcaaggtgctggtgcttgacccggcagccgatattcccggttgcgcgtccaggttttccgccggtgaggccggcgagcgattgcagaccgccatcgccgtggccaggaaatcgcatctgatcatcgacgcgatgaccggcatcggcattcaaggctcgctacgcggcattcccgccgcgctcgcctccgcccttggtctcgacggcgagtctcccgatgagcccgccctgccgaaccatgagtcgtcaggcgattttccgctggtacttgctgtggatacgccatccggcgtcggtgtgaacgatggttctctgcccggcccgtacattccggccacggtcacggtcacgttcggcgcgatgaagccgtgcgcggtgctgccgcccgccacgttcgcctgcggccgtatcgagttgttcgatttcggattcgatatcgacgacaaggatccggacgtcgaggtggtggataattcgttcgcgtccgacgcggtccgtctcccccggttcgaggattccaaatattcccggggcgtggttggtctggtgaccggctcgcagcgctaccccggtgccgccgtgctcaccaccagcgccgccgcccgcgcgaacaccggcatggtccggtatctgggcccggagcgcgcgcagaacatggtgctcaccgcactgccggaagccgtgatcggcaagggacatgtgcagtcctgggtcgtggggtccggcgtgcccgaggctagcgtcgagggcgccgacggcgatatgcagcgggacaccatcgccgcattgctcaagcattacgcgctcggcagcgaggatgagaacaaggacgcctacgacatgccgccaatcgtggtggatgccggcgcactcgacctgctgccggagcgtgtgcccggccaggtggtgatcacgccacatgccggcgagatggcgaaactgctcaaccggttcgaaaccaccgccagcaccgcggagcatgccgattcgcacgagccgtacaccgccgacgacgtgcggctgaacccgttggccagcgcgaagcgcgcccacgagctcaccggtgccaccgtattgctgaagggcgcggtgaccatcgtggtggatgaggaccatgtctatgcgtcgggcagtgcgccggcctggctgggcaccgccggcgcgggcgacgtactggccggtctgaccggcgccctactcgcccagcaggatgacgtggccaccacgggcgagaccgtggcctcggccgcctacctgcatggcctggcggcggcgatcgcctccgaatccgagcagcagggctggcaggagccggaactgatcggccgcgagcatcgccagcgcttcatgacgctcggccacccaatcgtggccggcgacgtgatccacgccatccccgaagccatcgccgacgtcatcgcataaccttgttgacctccctctgacgagggaggtgtctcgcaaagccgagacggagggagagaaacataagcctcaaactccacataccccgacctatacacaaaccccgtacactaaatcgcagaccccacccaacgacccaaacacacaaggaaccatcatggccaactcccccatcaccgacgtgattttcgacttctgcggcgtgctgctggactggaacacccgcgcatgccttgaaggccgattccccgatgaaatcgtggaacgcatctgcgccgacgacgacccctgcggcttcttccactacgaggaccgcatggacgccggcgaggatttcgcggacatctacccggatgtggtacgcgaacaaggccaggaactcgccgacatcttcaagttctacatcggccactacgcggacgcgctgccccgcacgctgccgggcatggtcgaactgctggcggatttgaaggcccacggctacggcgtatggggtctgaccaactggtcgcatgagaccttccacctggccttcgagaagtacccgcgcctcgaacagctgctgcagggcaccgtggtctccggcgtggagaagatgcacaagccgaacgccgacatctacgagctggtcctgacccgcttcggtctcacggccgagcgctgcgtgttcttcgacgacaccgccaagaacatcgtcggcgccaacgaggtcggcatccacagcatcctcttcgagaacgcgtcgcaggcgcgcgaatcgctcgccgaactcggcgtacgcctgtaagtcgccaaatattgcgtcgcggcagttgaagtctatggacccgtccttgacgacggtgaccggccgtttggcgaccggcatgtcgcactgttcggtgagcacttcaacgacgcggcacgcggcaccatgcgcagaatcatcatgaaggcgttctggatgttcatcacgtcggcgccgagcctggtcatcaggctcggcgtggagaagcggtcgatgctggagaaggagaaggtctggatggcatcgtactggtcctgcctcaggttccgagcgaagccggccgctgccttggagccgaacacggatcccaggcagccgacggtcagaccgcacagcatcagcactttgacaaccctcacgcttggcccttcccgctcgtgtcgatgccattaggttaccaatgtggcgcatatcccgttacacagcgtccgcgatatgcgaggcgtctcatattgtgtcgccatagtggattgatgaggttataaacccgtgtggcgaccatccctagcgatataaatagactttatgacactgctgcagctgaaatacatcgtcaagatcgtcgagtgcggctcgatgaacgaggcctcccatgccctgtacgtctcccagccggccctaagctcgtcggtcaaggaactggagaacgagctgggcatcgagatcttcacccgctcctcgcagggcatcgccctgaccgtggatggcgcggaattcctgacctacgcccgccaggtgctcgatcaggccgacctgctcgaagagcgttacaagcatgccaagccgcgcaagcagctgtgccaggtctccacccagcactacatgttcgccgtcgaggcgttcgtggagatgatcaactccatcaagtccgacgaatacgagttcaccatccgcgagacccgtacgcgcgacatcatcaaccaggtcgccaacatgcagtccgagatcggcatcatctacctgtccgacttcaataaggacgtgatcggcaaactcctgcgcgagaaacaccttgaattccatccgctcttccgcgcccccctgcacgtgttcatctcacgggacaacccattggccgccaaaaaggtcatcaccatggaggacctgaagccctatccgttcatccagtacgagcagggcgaggaaggctcgttctacttctacgaggaagcggtctggccggagtactcccccaagcagatcaacgtgaccgaccgcgccacgatcctgaacttcatcatcggcctcaacggctacacggtgtgcaccggcatcgacaacggcgacctcaacaatgagaagattgtcaccgtaccgctcgacaccgacgaaacgatgctggtcggctggatcacgaacgagcgttccaagctctccaaggccgccgaaacctacctcaccaagctcaagtccgtagtcgccgatcacggctacaagctcattgattaggagtaagtaaaacagtcatggtcagcagtgagatatactgcgattaagccaaccccgctggggaaatggaagtaagagccggcccctgagtatctcaggggccggctcttgcgctattgagactgactggcaaaaccagtttgatggcctccgactacttggccgagattaccgacgtagcggctgtcgtggcgaagcctttgagcacttcaatcatcacgtcgcgatcttcgacatcaatgttgcgggccgcggcgagcataatcggcagtgactgtgtcaaatgcgaagtgaggtcgccgaatgtgtcgtatccgccagcctcgaagatggcaaacaggttttcgatgaacttgcggcgatgctcgtcgtcgtattttgccatccatccgttgatcgtgcgtgccaggtatcgcgcgctacttgtcagtccatcagcctgtacgaattggccatgatcgacttgccagtgcaatgcgaaatgctgcatgatgctggcaccgtcgctgctgaccaccgtatagccgtcttccacatgctcacgagtctcaaacagcatgccgatgatcgacgatcccggtaccgatttatggattttcggcgcaatgcgcgcgtacccatcctcatcgaagaacgcctcatcgaagcctggaccatcgtgcgaatacacggccgtgatacgtccctgaatttcgccgggcacattggccgccgcgtataccgccagattgccgcctttggaatggccgccgaccataatcggcccggcccagcggccggcaatatcagtcacataccgcacagcggcctcctgcgaggcgaccggacggcggaaggccatcgtgaaatcctccttccacccgacgatcgaactgtcggtgccacggaaagccacgtacagcgtgccgtcgcccagttcgaagacgcaggccgagaactgtttggtggtttcggcgtcgaattcatccacgtattcgccgacgcgcaggtcgcgccagcgcgggctctcccccatcgcacgcagcagatcgacgttcatctgcggcgaccacaccttgccgaacatggcgtcatagcattcggcgcgtagcaggtcgcggatggagaccgtgggaatcatgccgctgacgtccgccgaatcctcgtgatagcgcggcacgttatccggcatgcgcgcgtaggccagctgggacagggcgagactgtccgcctcggtgaacggcagtgcggcgaaggtgtcgaaatgttgccggatatcgtcggtgatgttccccatggcggccttccttgttcgaatgtaacgaacctacggtaattctacgccgagcgggttttcatcacaggcgagtcggtcccagagtttaaaaccctatctcgccttcaaggggctgatttggccttctggagacatctatctccgtttcaaggggctgttcatccgtcatatcccgagtatgagcggcatcaccccaacgtcattccgccattttcatgctgcttctacttgggcatcagcccctcgaaacggaagtagatctctggaaaccacgacatcagccccttgaagcggagatagcatccatttaggcccagattgcccgttacagcatcgggtaatacttaccgtgatcgattttggcggcgatatcacgtaattcggcagcatctcggcggtcttcttcattaccttgcgacaacttgttcgctttgctgtccagatgatgctcgatgccgaagtaactgcatatccccacgagcgcaaacagccctataccaactaaccagttcatagcacgctccttgccaaagcttctgccttaatatggtactgctgttcatggatcgtaataaaaaaagcgggctcgcaagcccgcttttggttttaggttaaagacgatcaggcgccgtattcctcaaggtaggcggcggcgcgctgctggatatcgtggctgagcaacggggtgccgtcggagttcttcatcttggcggcggcgtcgaagatctcgcgcacgttggcgatggagagcaccgggaagccgaattcggcttccacggccttcacggcggacaggtcggagtccttggtcttctccatgcggtccacggagagcacgagacccacgacctcgacgttcgcctcggccttgagcttggggatgacttcgcgcacggcggtgccggcggtcatcacgtcgtccacgagcagcaccttcatgccgtcggtcagcggggtgccgaccatccagccgccgtcgccgtggtccttcttctccttgcggtcgaaggtgtatccaacggtcatgttgtggccggcgttcagcgcgatcgcggtggacacggccagcggaatgcccttgtaggcggggccgaacacggtgtcgatgttgcggggaatcgtgttgtgcacgatggcctggctaatcttttcggcgtagaacgtgccgagcgcggcgagcttcttgccgtcggcgaaggcgccggcgttgatgaagtacgggctcttgcggccggacttcagcgtgaagtcgccgaacttcagcgcgttggattccaacaggaattcagtgaagcgatgtgcgagtgtttctgccatgatgttccttacctccaagtctgtcctgcggccagtttagcagcgagttcgggacggctgtccagcaggtcgtcaagttcgcgggcgacgcgcagcggggccaccgggtcgaagagcgcggccgcacccacttcgacggcgttcgcgccggcgtacaggtattcgagcgccttctcaccactgtcgatgccgccgagtccgatgatcggaatctccggcagtgcggtgcgcacccgatagacggctgccaggccgaccggcagcacggccgggccggatacgccgccggtgacgttggcgatgatcggctggccggtgcgaatgttgatgcgcatgcctttgagcgtgttgatcatgctcaacgcgtcggcgccgtgttccacggccgcgcgcgccggcacggtgatgtcggtgacgttcggcgtgagtttgacgatcatcggcttgtcggtcatcgggcgcagccggtccataagattggcgagggccaccgggtcggtgcccacgctcatgccgccggcggaaacgttcgggcagctgacgttgatttccagcatgtccgcgtcggagtcggcgagcttttccacgaccgccgcgtaatcgtcatcgcaatgtccggcgacattggagatgacgaacgcgcccgcggccttgagcttgggcaggtcttcggccaagtaatggtcgatgccggggttctgcaggcccacagcgttgatgttcgcggccggcgattcggcggtgcgcggcgaggggttgccctcccacggcacgggcgaggcgcccttggtgcatacggcgccgagctggctgacgtcgtagaaccagcggacggcggcgtactggaaggtgccggaggcggtgccgaccgggttcttccattccagaccggccaccttggtgtggtgcttccacacgtggggctcgtacaggttgatgtggttgtcgctgccctgcgcggactggttgtttgcgctcatcgtcactccccccatccgagctgttcgcgagtgaacacgggtccgtcggagcagaccttgagccggccgtccacggtgtcgatggtgcacagcacgcaggtgccgtagccgcagcccatgcgctgttccatgctcagctgcgcggggatgccgcgttcggcggcccaagcggccacggccttcatcataggcagcggtccgcaggacaagatgatcggcttgcgatcgtaggccttcaggtcgtcgccttgttcgagtttgttgagcaggtcgaccacgttgccttcggcgtcgtcgatgctccacgaccagtccgcgtaccgggagacgtattcctcagcgaagtggtcgttgcggtagccgaatacggcggtggcaaaggaggcgtcgtgttcggcgagcttttgcgcggcgtagattagcgggggcacgccgagtccgccgccgacgagaatgtagttggcgtcttccttgaggttgaagccgcggccgagcgggccgagtacgtcgacggtgtcgccggcctgcagccctgccaactgttcggtgccgtggcccacgacggcgaagatcacgctgacttcgtcgccgtcgacttcgctgacgccgaacggacgcggcatgagcatgaagtcgtcgtgcgtgaacaggttgacgaactgggcgggcttggcgtgggaggcgatgaacgggtcgcggaatgtcagtcgcatcacgcggtcggtcagttccgtaacctgcgtgatttcgacgttgtggcgcggcgggaagaatccggccgcagtcgcctccgcaaccacatcatgggtgggggtgaaagttgtcatttcattcctattcagcacatcaagctccccctatcaggggagctgtcaaccgcaggttgactgaggggtagttaaatacactcggctccggtttccagcccacactcacgtatagcccacagccggacaatctacctacctatatacggcaacccgcagattatcgcgcatgtcaagcgccgcctggcgcgcgctgctcgccacaaggtccagcgcctcgtcggcggtcatggattcggagtacttgccgctcttcttccatgcgccgatgatgccgcgcgacgagttgacgatggcgccgctgccctgcttgtcgaacatgcctgccacgtccgcggccgtgccgccctgcgcaccgtagcccggcacgaggaagaacgtgtgcggcatacgttcacgcaacgccttgccttcctcggggtgggtggcaccgaccaccgcgcccacgcgggagtagccgtggctgccgatggtctcggcgccccagccttccacgagatcggccacatgctcgtagaccttcgtgccgtcggccaggtcgagcatctgcagttcgctggaggacgggttggaggtgcgcacgagcacgaagatgtccttgtcggcttcggcggcggcctcgacgaacggggtgatgccgtcggtgccgagatacgggttgacggtcaccgcatcctcatgccacgggtcgaagtcgcccacgccgttcaggtggtgggcgtaggcggctgcagtggagccgatgtcgccgcgtttgatgtcgccgagcacgtagaggccctgctgggccgcgtattcacaggtcatcgtgtagatgtccacgccggcggggccgagcgcctcgtacatggcgatctgcggtttgacggcgggcacgatgtcggcgatggcgtcgatgatcgtgcggttgtattcgaagtaggcgacggccagctgcgcggattcgatttcctccggggattcgaccgagtcacgcacctcgtcggcaaagctcgccacgacctgcggcggtaccaacgcctcggtggggtcgaggcccacgacgctggggttctgagtgttgtcaatcgcttcgatcaggcgatccatgctgctccttatgttatctacagacggctgaacatcagctgggagccgatgatcgtggcgagggggcgtccggtgacctgccagccgccgaacggggtgttacgagccctggagtggaactgttcagggtccacggtccattcctcagcggtgttgagcaccacgaggtcgacattgtcggcgtcatccacgcggctcaggtcgagcagtcggttgacgccttcacgctgcggctgagcgtcgctctcccccgcaatcacgccatccggatcatccccagtgggcgcgggttcggcgtagtcctcgaccagcgcggccacgtcggttggcacatgccccatgagttcggcgggtcccacggacatgagctcgatcagacgctcatcggaaatgaagccgccgtcgacgagcaccttgtggcacacgccgtacgcgcattccagtccgatgatgccgttgggcgcctcaaggaagccgagttccttctctgccaacgtgtgcggcgcatggtcggtggccagcagatccacggtgccgtcggcgatggccgcgatggtggctttgcggtccgcttcggagcgcagcggcggattcatcttggcgagcgtgccgtacttgagcagcgcctcgtcgctcaacgccagatagtgcggcgcggtctcgcaggtgattggcaatccttcggccttggccttgcgaatcgcctcgaacgagatggcagtgctcacatgctggaagtgtacgtggacaccagtgcggcgggccgcttctatatcgcgggccacgatcttgagctcggtgtcttccggaatgccgggcacgccaagttcgcgcgagaccgggccttcgttcacggcacctgtatcgtgatgctcgcaatgctcgattaggtacaggtcggaggccttgacgttctccagcacctggtccaggatctccggcgtcacagcggaaccgtcgtcgctaattgcggtgatggggtgcgtgagcatggccggcgtcttggcgtcgtcctcgaatccgggcacgtacctgagccagtcggcaacgtcgcttgcctcatgaccggcgcgatccttggacgcgcacacgcacaaatcgtaacgaaccggcaattgaacatcgtgcgcagtatcgtactgttgcaggaagtcgatgacgttgtcgaagccggcatccagaacctctttcgcaccggccgcttccaggtcagacacggtctgcccatccagtgccggcaacgtgttcggcatgatgagcacgttcgtgtatccgccggatgcggacgcgcggcagccggagaccatagattccttgtaggtctggccgggatcgcggaagtggacgtgcgggtcttcgaaaccgggggccacggtcagtccggtggcgtcgatatcggcaccgtcagccacggcggaggtgtcggcgaagtaggcggcagcggtcccgggcaccacgaggtcgatgacttcgccggtgttccagaccttgatgttgcgtagggtgatgctcacagtttggcttcctcgtcgcagtagtcgcagcggtattcgagccgttcggagtgcacgaggtggaacatctgcttgatgccgggctcggtggtggtcacgcagcgcgggttcacgcaggagatcacgccgacgatgtgctcgggcaggttcggctgcttcttttcgacgatcttgccgccgcgcaccacgtctacggtggcctggcaggccacgaagccgagcacgtcgaggtcgatgtccttgtcatcctcgattttgatgatgtccttggagccgtaacgcttggagttggcgttcatgatgagcgcaagcttggttttggccgggtcgattttcaggtattcgagaaccttcagcgaggttccggccggcacatggtcgatgatgatgccgttctgaatgctggtgacttccatcaggcctgaacctccttggggttgagcggttcgtatccgggtagttcgtcgcccaccacggtgctttcgagggccatgcgcacgagcatgccgttcttgacctgttcgaagtaggcggcacgcgggtcgtcgtccacgtccacggagatttcgttgacgcgcggcagcgggtgaagtacggccatggacggcttggcgagctgcagcttttcttcgtcgagaatgtaggtgtcgcgcaggcgcaggtagtcgtcttcgttgaagaagcgttccttctgcacgcgggtcatgtacagcacgtcgaggtcgccgatcacggaggccaggtcgcgcacttccacgtaggagcagttgtcggtggcgttgatgcggtcgatcacgtactgcggggtcttgagctcgtccgggctgataagcacgaagcgcacgttgccgaagcggcacagggtctcgatcagggagtgcacggtgcggccgaaggtcaaatcgccgcacagtcccacggtcaggtcggtgatgcggccgaagcgcgactgcagcgtggccaggtcggccagcgtctgcgtgggatgcatgtggccgccgtcgccggcgttgatcaccggcacggatgcggcgcgggaggccaccagcgcggcaccctccttcgggtgacggatggcgaccacgtccacgtagttggacacggtcttcaacgtgtcggcgatggattcgcccttggtcacggaggccagctgcgcgccggcgaatccgatgaccttgccgccgagacgcagcattgccgtctcaaagctcaggcgcgtacgggtggagggctcgtagaacagcgtggccagcactcgcccatcgcaggtatgggcaacctctttgcggtgggaatcgatgtattcggccttatgcagcaggtcgagaatctggtttgtagacaggccgtccagcgttacgacgcttttgccgaccattggcgtttcttcagacaaggctcaccttttcgctcgtggttttcaggtggccacccttgtgtgacctaatataacttacgccatttttcggacagccgcattcaccgagtgttcacctgaaaatccaacgaatatgctgtgtctgtatagctgatatctgctttggaacgccagagctcattcattaggtcgatttgacgttcattaggtcactgcaccctcgtatctgttgttggaatgccgccattccaacaaggtatgcggcggcggaccgacctaatgaacgatgaatcgacctaatgaacgtagtgaacgcaatacaagaaaggtctatcgctgcgcgcggcgtcggttccgctccagtcgcggtgcgatcacgtgcatacgcgggcgaggcgcggtttgcggctgctgcgttgcggcggaggccgtggcggtggttgccgcagtcgcctcgtcttcggcctgcccgtagaacaggcgctggcatacgtcacggcatttgcgcatcacggccagcaggtcgttctcgaaatgctggccgcggtgggcgccgtagccgaggtagacggcgatgccgcccagcgaatagatgtcatcaggcagaatatcggcctggttggcgcgcccgctccacagatagttgccgttgcgggccgcggtgcacaacgtccatgccttgcgcagctgaatcgcatcgatagcgctgatgagcttcttggcctccagcacgtccaatgcctccaatgtgccgttgacgcgcagatctttgatatcgccggcgtgctggagctgcatgagttgcacggtccattccacgtcagacagaccgcccttgccgagcttcagatgacgttctcgacgcacgccgcgcggcagacgctcggcctccatacgggccttgagcttgcggatgttctgcaattcggcctcggtcagctccgtggtcgggtagcgcaacgggtcggcgatgttgatcaggaagtcccgcgccagttcggcgtcgccggccgcgtaccgggcgcgcagcagcgcctggcgctcccaggtcgaggcccaggattcgtagtattcctcacaggaggcataggagcgcacgagcgggccgttcttgccttccgggcgcaggtccaggtcgagttcgatcttcggttccagcgtcgtcgggccttgcaggatgttgcgcaggtcttccacgaccttcttggcgaaggcgttggcttggccgtcgtcggcatcgtcggccggacggtagatgagaatggcatccgcatcggagctgaagttcacttcgcgcccgccgtaacggcccatggcgatgacggtgatgccggccggcgcggtttcgacgccgaacgcggcgatctggtggcgcacggcccaggtcagtgaggcatcgatgatcgcgtcatacacgtcggtcatggccttgagactgtcggagtcgctgatcacaccgctcatccaagacaggccgatgcgttcgatttcgtggcggcgcatggcgcgcatggaggtggcgaactcgttgatgttcgagccgaaacgttccagcgccgagccggtctgcacatccaatgcctcgcgcgtgcgggcctgcagattgccgtcatcaccgagccaactgatcgattcgaccgacttgttgagcgcgtcgcccaggaatcgcgagttggacaggatgtggcacagacgctgggcagcggaggtggagtcgcgcaggaagccgaggtagccggattcggtgccgaagttctcctccagcttgcgccagttgagcaggcccatgtccgggttctggccctcgcccagccactgcaagacggcgggcaggatgatgcggttgattttggccgcgcgtcccacgccggcagtgagcgcctgcacgtggcggatggcggcgtccgggtcgccgaagccgatggattcgaatcgttcctgtgcggcctcgacgctcagcacgatctggtcgttctccatctgggcgttgaccggcagcatcgggcgatagtagatgtcgaggtgcaggtggcgtacttcgcgacgggtgtcgtcgtatttgtcgacgagttcttccgggtgcaggccgaatgcgcgggcgaggcgacgcagctcctggttctggttgagctcatccacgtcgatgtcgcgcttcttttcgaggcctccgaccgaggcccggccgaggtccgggaacaggtgcgtgcgcttcagggaccagatctgctggcgatgctccatcacgcgctcgaagcggtagtcctgggacatgcgcacggcctgtttgcgcgagacgtagccgccttcggacaggcgctgcagcgagtcgagcgtgttgctggtgcgcagcgattcatcggtacggccgtgcacaagctgaagcatctgcacggtgaattccacatcgcgcagaccaccgcggccgagcttgatttcgcgatccttcagaggtgcgggaatcagatcttccacgcgcttgcgcattttctggcagtcgtagacgaagttcttacgcttggacgcgctccacacgaacggccgagtcatatccatgtaggcccggccgaggtcagggtcgccagccaccgggcgggccttgagcaacgcctggaactcccagttctcggcccactgctcgtagtagttcttgtgcgaggagagcacgcgcaccagcgcgccgtccttgccttccgggcgcaggccgccgtcgatctgccacagcggctgctcggccacgcccatgatggcggactggcagacacgctgcagcatggtgcccatcttggtgcccacgcggatcagcgtctgatggtccacgtccttgtcggccggttcgaccacgtagatgaggtccacgtcggagacgtagttcagttcctgtgcgccgagtttgcccatgccgatgatggtgaagcgcacgtgctcgctgccctcggtttcgtggcgggcgatggccagcgcgccttcgagcgccgcgtccgcgaggtcggacagttcgcggctgatggtcggttggatggaggccgggtcgtccgccacggcatcctgggcgatgatggcggccagttggttccggtagctggaacgcaaggccgtggccgcttcggccaaatccttggaggcgacgggcatggccggttcgtccgggtccgcgccgaccgccttgagcagacgtgcacggcgttgcgcgtgattgaacagatggctgttgcagttgtcgactgctgcggcctccacaagctgcggcttgaagcgcatgaacttgcccatcgcgtcggagacgccgagcaccgtgaccagacgcttcagggcgtcgttgtcggggatgacgtgtttcagatcgcgctggctggattgcatcgcgttgacgatatccacgaaattgctcaatgccatatcggggtcgcaggcgtgggccagcatgctcagcagttcggcgcatcgctcatcgggaatgtcgtccgtcttgagctggtcgaacaaggtgcgggccttgtcgaggtcttgcagacctgccctgatgagatccatggagctgggtttgaacatcgacgattccataagattccactatatacgctcatgccctccgaatggggcatgagccgggaaggagtcatcgggcgacgctgatgagctccgaggaatccatatcgtaatcggccatggcgtaggaacggatggcggggtcatcataggtgttcatgtaataggtgttggtcttggacgaatatccgctggtgaacagcgtgcgttcgaactggccgtcgcccatcttcgccatgccgtccaccatctgcacggagccgagggtgtggaacaggcgagacacattggcggcttcatcgttctgctgcgggtaatgcgcgttggtgtaggccacacgaacgaagcgcgacggggaactcacgtcgcccgggatgccatgcatgcccacacccgcaccccaggcggtcaaggaggccttgccccatgaagtcggttcggccatctcgttgctgacgcacatgtagttgcgcagattttccatatggaagtcgaacgtcggctgattggtcagcacatcaacgtcatcatgatgcacgtgcatgccatcggccatctgctcgacgacgatgctgcgcttgccgtcgccgatgaaccagtgcagcagagactcctgctgtcccggcacgatctgggagacgagcgtcacgttcctgagcgccttctcgacctcgtcgacggagtcgaaattacgcgccacccacagcggaaattcgaacgtggcgacgttttccgtgccttcgaccggttcgtggacgaacgaggcgtagccggggaaattcaagccggcgatggccagaccatgttcattggcgcagtcgaaatacatcggcctatcggccatgaccacgcccacgccgatcaccgcgttcggcttcgctttgccgcccgcaccgaacaccgtgtcatagcggtagccgcgcggagtgaccaggatggtctccccatatgagaaactccagtcgagattacggccgaaataggtgttgccctcatcatcggagaaacggacaccagtgcacataacggacttccttccatcgctttggttggcttgtacgttcatgatatccatcggccgctgggggaactctgggtttcgccagcagattaacgtgcggcgcgacgcattgagatgcgccgcgccgcgatatgcgtcaaccttgcgtaccgaggaacaacggttccgcattgcgccagatacggcgcgtggtggcggggtggttcatcgaatacaggtggacgccgtccacgccgtgggccacgaggtcggcgatctgctcggaagcgtagaggatgccggcggcacgcagggactggatgtcgtcctcccacttgttcagcagggtgttgagcttgtccgggatacgcgaggcgttgcgttcggccatgcgacgcacggacttggcaccacgcaccggcatgatgcccgcctcgatcggcacggtgatgccggcggcgcgcgccttgtcgaggaagcgatagaagtcctcgttgtcgtagaacagttgggagatcaggtgagtgacgccggcatcgaccttgatcttaaggttttcgatgtcctggtccagcgagtcagcctggtagtggccttccgggtagcaggcgccgaacactttgaggcccggcttcacggagcggatgtatgacacgaggtcgctggcgtggttgaactcgcctaccagctgctcgccgtcgatgtagtcgccgcgcaatgcgagtacggcgctcacgccggcctgctcgaacatgtcgagggcctcgtcgattttcgccttgtcggaatacaacgcggtcagatgcgcgactgcgggaatgccgtactccttgctgatcgtatgagcaatgcgcgcggtggcggtgcgatccgaatgggtgccgtggccgtaggtcacggaaatgaagtcggggttcagcccctccaggccgtcgagggtgtcatagatggtgtccacgggagcgttgcgcttcgggggaaagacctcaagggtgaacatcggggaatgcatgctgatttccttacataaacccgagctccctcatacagagggagctcggtgatttccgctacttgtcgagcttggcgcgcacggccttggcggcggcgaccaggttctccaggctcggccaggtctcggcgttaccacgggtcttcagaccgcagtcggggttgatccacaccttcttgacgtccatcttgtcaaggatctcgtagatacgatcctcgatctccttctcggaaggaatacgcggggagtggatgtcgtagacgcccgggccggcctcggtctcgaagtgcgcgtcatgaatggcgtcgagcaccaccagatcgccacgggaggcttcgaaggagatcacgtcagcatccatcgcgtcgatgtcgcggatgatgtcgttgaactcggagtagcacatgtgggtgtggatctgggtggtcggcttgacggcggagtgcaccagacggaaggccggaacggcccagtcgaggtacttgacgtgccagtcggacttgcgcagcggcagcttctcacgcagggcggcctcatcgatctggatgaccttgatgccgacggcctcgagatcgagcacttcgtcgcggatggcgagggcgagctgcttggtctgctcctcgtgggtgatgtcctcgcgcggccaggaccagttgaggatggtcaccgggccggtgagcatgcccttcatcacgtggtcggtcttggactgggcgtacgcagaccattccacggtgatcgggttggcgcgggacacgtcaccccagacgatcggaggcttgacgcaacgggtgccgtaggactgaacccaagcgttcttggtgaacaggaagccgttgaggttctggccgaagtattcgaccatgtcgttacgctcgaactcgccgtggaccagcacgtcgaggccgatctcctcctgcttcttgatgacggcgtcgatctgggccttgatgaactcgtcgtaggcttccttggtgacctcgcccttgcgcagcttggcgcgctcggcgcgaatctccttggtctgggggaaggagccgatggtggtggtcggcagcagcggcaggccgagggcctcgcgctgcagggcctgacgctcctcgcgggcaggctggcgcacgtagtcggcgtcggacagcttgccgatgcgctcggcgacggccgggtcggcggccacgcgggtgccgtcgaacagggcctggttggcggcgagggcggcggatgccttcttctcgtcctcggtggcgtcggccagagcggcgacttccttgagctcggtcagcttttccacggcgaacgcgaagtgcttgaggtcttcggacgagatgccggtctcgccttcagtgctgaacggcacgtgcagcagggaggatgcggtggagacggccacgttggcggtgacctgcttcagggcgtcgaccaggccgagggaggtggcgtagttgttgcgccagatgttgcggccgttgatcacgccggcgaagatggcggtgttggaggccacgccatacttggcgacggcttcgaggttctcttcacggccttcgttgaggtccagtccgatgccgtcgaagccgagcaggttgacggtctcgtacacgtcggcgatgtggccgaagtaggtgttgagcagcaccttgacgttgcccttggcggacaggatcttggtgtacagggtcttgaagagctccacatcgcccggctccttgtcgagcacgaggtacggctcatcgagctggacccatgcggcgccgagttcgttgaacttgtcgagcacttcggcgtagacggcggccacggcgttgaccaggcccttgtcgagctcgagttcggtggcttccggggtgcgggcgagcttcaggaacgtgtacgggccgatgaacacgggcttggtgtcgatgcccagcgccttggcctcgttgaactcgtcgaacggcttggtggagttgagcttgatctccgcggccgactcgacttcgggcaccagatagtggtagttggtggtgaaccacttcttcatcggcagggcggtcacgtcgcccttgtcgccctggtagccgcgggccatggcgaagagcgtgtcctcctggttatcgaaggcgagacgctcgtaacgcttcggaatcacgttgaggaggatggcggtgtccagcatctgatcgtagtagctgaagtcgttgctggggatgaggccgatgccggcggcctgctgcagcttccagtgcttggcgcgcagttcggcggcggtggccttaacggcggcgaggtcgttggcacccttccagtagccttcgatgatcttcttcagttcgcggttctgcccgatgcgggggaagccggagacggaagtcagagtggacatgaatcctccaatgtatgcgttcgtaacccgacttagggtagcaaaacatccggattccaccccttataaatggccgcagagtgtcgttatagatggaatttatatccgctttagtcgaagtctttcacattgatgaccgcgagcagttcgccgctgtgcacctgccattcgtcgaacggtttgttcgatcccatgatcacgatggatgcgggcgaaagtcccaagttgagcaggtcgagtcgttcgccgtcggagtcggcggaggcgagccattgggcgctgatcgacacagtcggctcgtggcccactatcatgaacacgcggttcttggccttgacgtgggcgagctcgtcgaacaccgcctgcactcccccgtcatacaggctgatgcggtagtcgacgatcggcttgtcgccaaaggtcttgagcatgcggtccagtgtctggcgcgtgcgggtggcggacgagcaggagatctggtcgggcaccagtcccagcgactcgatgcccttgcccacggccttcgcctgtttcagacctttgtcggtgagctcgcgctccgagtcacccttgtcgccgaacggctcggccttggcatgcctcatgatgatgaggatatggtcgtattttttcgctgctttggcgactttgctcagcttgatgcccatccgtggctcccttcacgaaccgcctgcccggtgtggtggtgtggtgttgcttccagtatagaggtgtgtgagcgttcacaaactcatcgtcgggcggttattcatgcgtgttgccgagttctcccacctgacggtcgaggtcgcgcaacaccttacgtagtttgtggtcggagatgtcgcgcagttccagttcctcgatctgcgcctcacgctgttcgtcggtgagcgagtcgatgtcggtctgcgtgtccttggtcacgcgatcgcgctttctgagcgcctcgaatccggaggccatggcgcgcgagataacaaggaaaccggtatggccgatcatctggtggtcggggcgtacggcgaggccttgggccttccatgtgcgttcgaacgattcctggatctgcggctcggtccagcaaccggccgcgcgcagggcttcggccagtcgactcatctgcgtggtggtagttacgtaactgaccaacacgccgccgggggtaatcacgcggtatgcctgctcgagtctgttccacgggtcgagcatgtcgagcatgatacggtcgaaccagtgttcgggcagttcggcggccacggagtcgaagtcgccggttttgagatcccaccaactgggggcttcaccgtaatacagcgtggcgttggcctgagccactttggcgaattcggggcgcagctcgatcgtggtcagatggccgcgctcgcccacggcgtccagcagattcacgctcatcgcgcccgagccggcaccggactcaagcacgcgcatgccggagcggatgtcgccgagctgaatgacctgggcgatgtccttcggatacatgatctgcgcgccgcgcggcatcgaaagcacataatcggccagtcgcgggcgcatcaccgcatactcccagccgccgatggcgcgcgacgatttccacggcttgttcttgtctttctcggggtagacctgattgacctgtgcctcgcgcttggcatgcacggtgaggatcacggtgccttcggtcttgccgatcacatcgtcatgcagaatcaggccatgctcggtctgcgtggagccgccggccacaagctgatcggtgatcttcttgcccttgcggtcggtgaactgcaccttctcgcctgcggtgagaggcccgcgcctcggctccataacttgctccttgcatgctcggtgggtcaatcgctacaagtctaatgcatgtaagctcgttggtgaggtgatgacgatgcgaatgcagatgacaagccagatcgatgccggcggcaatgaccccattttcctgatgttccacggttacggcaacgacgaaagcgagatggtgcggattctcgacgccgtatatgcgccgacgcgagccgatgcggccccggccgcaattgccgccgtacccagctatatctcgttccgtgccacctacgcgaggccctatatgggcggcaattactggtatcccgacggctgcggcgtggacgagcgccaacgcgaatgcgcggcggtcggggatgcggtggcttcactgctggatgcctcggcattcgcccatcgcaggaagatattgatcggtttctcccaaggcggttatctgtcgtatcgtctggtcaaggcgcatccgacgttgttcgatgccgcgatcctgctcagtccttcgttcatgggcgaggaacaggcggcgcttgactcccctacccgattcttcctggcgtatggcgcgcaggaccgcacgattccgctgcccgaccagcaaacggcccatcaggtccttgaacgggccgggcatctgacctatcgcgagtattccggcatggcccatgccatctgtgatgaggaaatcgccgatatccgggatttcctacgtgccatatgatgccggaatagcttcaatatggaatatctccgttcaaagaggtaccggtccaagtagaagcggctcaacaatggcggaatggcgtggcgcgtgccgtatggacatacacatcagctttcgccagatggtgcacgcccggaggcactgaatgttggcttggatgcttgggatttgatgccggtgagtgaaacacaggttgtcgagtggttccgcaatcacgaagttagctcgattgcggatggggctactaagaccgacgcttccgttcccttgctcgatatgccgtcgttctgatgtgattcccagagtattcatgttttcatgccattgctctcgcctcgggcatattgacacagcattaactgccgttgagatgtatgcacgctgaacacgcgcctcaacggcagtggtctcgtcatctctcgctcacaccaacggattgccggctacctgatacagcgaccaccagtcacggcgttcgagttcgatatcggcaccggccgccatctggcggatgcgctccggtgtcattgagccgagcaacggctggataccgacgggatgacgcagaatccaagcgacggcaatgccgttgggcgtggaaccgtatttgccggcaagacgggtcaattcggcgttcagctcggggaaatgctcgttgccgacgaacggaccgtattccgtgccggattggaatgggcaccatgcctgaatggtcatatgcttcagccgtgaataaggcaggatgccaccggtgcgatcggctgcgggatcgctcgccatattgaattggatttcagcgtcgagcatctgtgtatgcattccgccgtgtcgaaatagtcgatgccagaatcatgggccacggccacggtacgtgccgcatcggcggcatccaacgcgtccatgcgcatcacgcccagcgccactcgtgacgcaatcatgccggattgtccgatttcctgagtcttcatagtgtctcatttctgttatcgcgaatcggcgaacgggcactgtccgcctcgttgccgggcagcaatctccattgccgcggcttatgtcaccttatcgcttgaagtgcacttgaaggcaactcgcaggcaggcagcgcgcgctgccgggcgcgtcttcgcgccttcatgtcttcgctgtgaccgagacatcgttgtgccgtaatcatgcctatttcttgtatgatgacctctatagcaacagagctagggggattccatgaacactaccgattcagccaaagtcaccgatgccaatgccggcgcaaacaatgccatccatatcccgcacaatcccacgcttgccggattggccacgctgacccgcaacgtggcgtacaagaccggggccgataacctggtgatggatatcatctcaccacaatccaccggcgatgacgatgaccgccgctaccccaccgtgatattcgtgcaaggcagcgcctggaccacgccgcatcgcgactacgagatcccgcagctctcggctttggcccgcgaaggctttgtggtggctacggtgaatcatcgcgacgcctcgagcgatccccacgacgtgttccccgcatatctcgaggacgtcaaagcagccatccgctatctcagggcaaacgcacgtcaatggcacgtggaccccgaccgtctcggtatctggggcacgtcgtccggcggcaacacgtcgttgctggtggggttgaccgccgacgatccgcggtatgaggacggcaccaatgccgatgagagcgatgcggtgaagtacgtggtcagctgcttcccgcccaccgacatgcttgaagctgtcgacgcattcgacgatgagaccaatccattccggctgtactatttcggcccgttcgcggccgtggtgggtgcgacccatgagaccggcatcaatgccgaggtccgtcagcgcgcggctgacatgagcccctacctgcaggtgcgggatgaccagcagtatccaccgatgctcctgttgcacggcaccgccgacaccgtggtcccctaccatcaatccgtcaagatgcgcgaccggctggccgagcacggcgtggacgcgcagctggtgctagtcgacggcgccgaacatgagtacgatttctggagccagcaggtcttcgacgtgattttcgatttcattcgtgagcggagctgaacggtaagggtacacgggcgcgtccttgttataggttgccgagttctcttttagccaattttgttggagcccctatctgcgcgaacataccatgacagttctagactgtgttctaggactgtcaatcggcaatgtgtatgaagcgtgatgtgatgggtcagacggcgattgatggagttgagggacttaatagggccggcgaactcggtgaactcggcagatttagccgttcgcggcagctgatgtggggtcatgcgctgtatctgatttggtggtgtattttcttccgcccgaatgcgcaggtcaaaggcggcgcgctgcgcgtattcggtattgcgtgcattcttgtggccgcggtggcgggcatcgtcggagtagtgctagaatgttttggcatcagtaagttactttagcacgcggccgatttcctctttgagtgcataccgtctcgggtactttgccatgatctccttggcgagagccttggcttggtcaagtccgaaaacgttgcgatattgctcgatccacatggcaacgaatcggtattcgtcgcgatttccctgttgcagatcgcgatccagcggcagctgctttctgatcagtcgttctgcttccgcgctgtgattgaggctgatgggcttgagcaaatcacgcaggagttccggccgctgttcggctaaggtcaaggcctcatcggataggcgctcttcagtcatgagtcgtgcaaggactttcccaccgaaatcatgctcatgatagttgcgcaggatgttctgaatgctttgaggccagcccgatttgccgaccatcgatttgaggatgggaatgcaacgttcgtccgccactgaatcactgtgagcgacgtagtactcatataattgtttgatgccgttctcatcgttcagtcgttcatagcaggcctccagcatggtaagctcgccatgcggcagttgagcggtgagctcccaataccccgcatgcttttgcgcggcatcccaatcgtaagtctgttccaagaaagcggcggcccaggcataatccccgtccaggaatttacgtgcgatgacggcaaatctgcattcggccacgtccgtgtttttggacagtagctcatcggcactaattgcgtcgccgccgtacagcagaaagtcatgatggagtttcagcagatagtcctgtgcagctcgccaatcgtaatcggtcaggttcgttcgatggccgtcaatggaatcccccttcttgtcatgaaggaattgttgggcaacattcaatgtggactgcgcataggtgcggcacatgaacgaggtcgtgccaatctcgcggggctgatgctccatctgttctatgtccgccgtacctcgtgcgtgaatatccgcgaatgggatgacgcattccagcggcgtgtgcggccaaaacagcatctcgatcataggggtatcacgtatgaatcccaacgctgcaatcagcatctgctgcgcttgctcgcctgtaacgattggtgccgcggcatacgtataagcgaggatccgctcattgaggtgttcgatatatgtctgtaacgtaccctcttcatcatcgacttgtctcgcgaaccacactgtttttcgcaaagccgcgcacatgcgtcttatggccagcggatagtcgttcgattgttctgcttcctcgaatacggccatcacgccgtttatggcggcatctccccatttgaatttccagccgtagtccttgccgagatgtcgccgcatgggagattccatgacgcgatccacggtgctttcgggcatcaatggttccatgccgctcgcgattgccggattcgcagtcacgatggcattgatttcgtcctgattccaaaccagatagaaatgctgagcgggcgtccaccgttctgatttgcgcagtcccactcgttctcgaatatgttgcagcactcgattgaacacttcaggtttcgatgcgagaggatttgctgctacgggtatgtctggccgagagtcgtcctgctttgcaatcatcgcatcgtatgtcacgttctgctgatgattaccgccgtgtttgtaatcacgcaacgtcaagagcaccgcaccaatatgcttgcagtatccgtcatagtcgtaggggcaggtgcaggatgcgaacacgatatcgttgccacgaagtcgaatatcgacatcgtagagttcagaaccgtgcacttcggcgtggaatagtccggccgacacttcctctaatccaccgatcctatgctcgtccacgtaatcatatgctcgctccaggctgcgggaggtcatctcctcttcgaactcgtcgaaatgggcagtcatgacgggcctcctaatgattggtcatacattacggtgtgggacgtagtagcctaatgcagttcggctatcatctgttcagcatcacccatgcaacatcatgtcacggtgcttgtgccaacggaacagacgctcacgatggcggttcagcgtgaaacgatcccacatctggtcctcggcccactcaaccatgccatcatgttcttcatcttcgggattgcccaaggtatcaaggaaccgctcgaacccatacaccccgccgacatcctccggaggcgcatcccccgccccatcccaaagctgaggatccgcaacgtgcacgctgcggtaggtacgcagcagcttgatgtcatggatccaatcgtcaccataatcgtagtaatagcgagcggcacgcgccttgggaaacacgtcgcccagctcggtttccgaagcaatgcgaacttccggcaacggctccaccggcatatattgttcgtatctcgcctcatggtatgagggctcttctccccacaattcttccacttgcacctgcttcccatccgggaatgtggcgcagaagcagaacagatgctcgccgtaccacataaagcattcctgcaataccgcatgcaaatcgaagaacgtcaatgatgccggcaccagaatctcccgccagcattcacgcccgtcaaggcgcaaagtgactcggaaacgaaatgccgtgttgccattgcctgccatgaagactcccttatcaacgatgaagttattatcaccgtaacagagtccagggcaaaccactgcgttacgaatctgattcgcgccctcagaaaaggccgaatcatctgttcaatctccgtgtcctgtggaaaagactctaacaataaccggtactgttcatcatcagcaagtccaatatgccatgtgaccaggtgcgggacactcatgtgatcagtcgctatggtggtgagacgtgacttcggttcgtaccgtcgagcagacgcgaatggggatagccgcgccgctcgtgtccaatatcggctggggcgtgctgccgctgtactggcgcgcactgtccagtatgaatgccatcagcgtgctcgcgtatcgtttggtcgccacgttggcggccatggtcgcgctgttggtggctttctccggcctgcccaccgcgattccgctggccatgttctcctacggcgtgcagcacagccattacctgaccgtgagtttcatccaatatctcaacccgctgatccagttctgtgtggccgtgctcctgctgcacgagccgatgcgcgcgcagggctatgcggcgttgatggtgatttgggtcgcgatcgcggtgtattcgttcggcgcgattcgggcgtattgggagcggctgaagccctatgctcgttaagcgcttcctcaactcccctccccgaggggagctgtcgccgtaggcgactgaggggaggtcgacacggcaaacagcagaaacctcgctcccgaccaaagccacaagcaccactcacgaagcaagcttgtacaagttctccttaaattcccgctcactccacttaatgggatacgcattgtacttttccaaagcggttattagctgattgtcaatgcgccgatccgaatcattgaggaaaacaaccagttcacttggtgtctttcgtgccgcctgcgtatcctcccatgaaaacaaggtaccggaaatgagtcgctgggaaggccgcgtaatagatgtgcagaatcgttccggctgtttactcgtgaacggcaacacaaagtcatacgggcacagcaaaccagacttgccacggaattgaacgtcttccacataccgtatgttgttcgcattaaggaacatacgaatgtcatctgcaaaatacgtctgcacatgggattggccagcatagacatatcaccaactttgatgatagcttgcaggaaccgattcttggcatcagcaaaatcagcagtatcgctcgtcagagtaagctcgtcgccgttacgttcaataccaaactgattcagaatatctttgagcactgccaaacgcgattccgtcacagtcatcccatgcgactccaaacggcgtaatgtggcacagtcatcagagaacgttacgctgttcttcccgggcttcacgtagaactgcgtataatcgttgtcttcatccagaagcggaacattaacttcataccactcatccagttgcgtataagtcgtgttatcagacagccattttccgtaactacgaattaatgagtcaaaatcagaactcgtcatactttcttctcgtcgtaaatactacgattcatttgactacaaacttatctgatgcaattggaattgcttctcgcctttattcagggtgatggacttcggagacaaagcttccttcagcagttccagcatacgacgagcttcagcatctgtcagtacagccattgacgcctcttccccgaatgcgattacccagtgggaacagcctacatcaggtcagcgggtgccgccaattcccgggatcgttcgatgcgtcttgctgtagaatcgtcgcaacggttccaacagtcggatgccgaggaggcggggaagatcaatgagttgggcgggtagacgacggctggcggcatgcgccgcggcattggcggcgctcgtcgccatcgccgcgggactcaccggatgcgctcctcccgtatggctcacgcatcacgccgatgcggatgcgaacggggcgggcgccggcggtaccggaaatgggacgttttcggactggccgccatacgcgaagaaaggatacgacatggatgccacacccacagcgaggcagatctcgatagcggaggcgctgctgaacgatcgacaggagcgggacgcgaacgtcgccggcatgaaggacggttggcccgactcgcaactgttccgtctggtcacgctggcggagacgctgcttgaccggatgtcggaacggtatggcgtggaattccgtgcatcagaaggatttcaccgtccggaactgcttgacccgacatggtggatcaacgtgacgcccgcatcggggccgttgcaaggcgacgtgttcgaagtggattatgtggaaggcaatggtgccgacgggaacgatctcggtccgtatgtcgcggacacgtatttcacggcgctgcgccgggacgactacaacggtcatcttacggaacggatcgaccggttcctcgcggcgcatcccgatctcgactgcgtctaccggatcagcgaccccaccggtccgaagaacgagacccaatggcggttgtcgccgtccgccgccgtcgacgatctcgcctcgtatttcgttggcagcatggagatctacatctccccggaaaccgtgacggaccgtgagcggttcgccacattcgcatcggcgttcatcaccgccatgcggaaagacgggctggacgtccactacgagatcgcgcagatcacacgcatcgacggcgacggattcaccatcggggccgcacgggacgctatgcgccattcgacggagacgcccgcgtgggactcctggtatacgggaggattcaccgccagcgcggacgcctccgcccccgagatcatcaaggatggtgaatgatcatggccgtggacgcgccgtcatcgcaaccgcatatgtgctcccccaacagagcgaaaacgacgattacgggcgtgtctcatcatcgacgatgttggccttcgcctgtgcgatgaggcggaaccaggcgacgggccgtcccaccatcatcgtgaccatgcatatcatcgtcatcagaatgaggcagaacagaaaggcgaaatccttgaaatacaggtacgccgcaaggagtaccacatccgacagccagaatcctatgatgaacctcatcgccagccaggcgttcctgaccgtcgaacgatagacggctcgtagcgggcgccgaccacccccgctatgcgcttcaccgtcttcgccggccattcgtaggtgacgccgacgctcaccttgccggcggcgcggccctgcgccttcgcgcgtcccatgcgccgtaccagcaggatgatgacgtcgacgaacaggatgatgacggcgaacacgccgcccacgatcgcgaacggaatccacagatcccgctcggccatcggcctgcactcaccgttcacgcacacctcgccgtcgatcgccatatcgagcgcctgcgcgaataccggagtcaccgcggcaccaatcattgcaatcatcgtctattcccttccctgttcaatgcaccgtgacgctctcgatgatcgcatggatccgcttgagaccatccatcgcggtcggcccggtcgccgtccaacgatgagccgatgtcgtgggtctggcggcgagtcgacggcccgcacatgctcccggtgttgctgttcattcggaggaagacgcgaagcagaaaatcatcatgccgtatttgcggtcattgggatactccgaaaacgaaatgcgattcgagaatcccattaccgctcaagctggtagtcgaaaagtcactttattcagtgacatcgaaattcttgtggatgaccgacccgaagtcattatcgatgcaaagaagcccagtcatacgctgaacgacaccgacgtgcttcaagtcacatcctatgccaagctggtcgatacgcaacccggattcaatttgtaagtgcaacgctcgtgcagagcaaggcaacggtcatctgctgttcctgtagtccacccaactgcgcgaagccgcagatactttccgcgcccaaccaagcgaagaacgaccgctgatttcgcgcaccgacgcgcaagccatgctctccgacgcaatccaccgatgccatgaacgcttcattattcatgtcaataagccaggaaatgcatatagcaaatccttcgattacactgaattcatcaaaaccgtgcaggctatcgcgggcaatgccctgcaatccagtgattacgcaagcgcatgcgaaaacttacgattgtgcatacacgaagtccacgcgcttctgctctcgtccgaaaacgatgatgattccgagcctttgctcacgcttatggacggtctggcgatgcgcgtgcgatgctatatggagaatgtggcggaattcgccgactcccctaccgccggcaaagcattgaacaccattgcacaggcagcgaatgacaagaacatgcggcaatgcgaaccattgaacaacatgttgctgatttccagcgcgctcgccttcgcccaatatgacgacaaacgcatgtgggcctatgacgtaatcgagaacgcgataacgcgtaatctggaatactcgttcaacgaagagagcgaagaaagcgacgaggacgacgaggatacgaacgaggtcgatggcgagaccgacttcttttctgcaacgacaaatccgatacccattacgtgggtaagctgcgcaatctgttacgcatctacggcggtcttagcgcagaagaatggcatgacgtggctgatgggctggccagagattgcgcccggaacatcatcgaccgcatcaagtaccagccggaaataaccaccaaaggcggcacacag

SEQ ID NO: 3706 - DNA, 7177 bp, Unknown
  R150_10m  MAG No. k141_7706
aagacaggaaaccaaccagaagaaggaacccgccgcgctgagcggcaacaggtgaataacttacacgcaaccacgccacaacgcaaatcgggcatgaaaaggtacgccagaatcgttgcaacgacggcgttctatcggcgtgtcgaaatcagcttgaatcacgccgttatcatcaggatacgccggctttttatgggctcacgtaacgaaatcagatgttcaccggcgtgtcgcaacaattcattccacgttcaactcccctcagtccgatcacgcggacagctcacccgcaattacggacgagcaaagctcgcgcccttatggctcgactatcgtctcgccttcgtctaaaaaaacagtccaccggactgttttttaaacgacccagcatcaaagagggaagccaaagggggattagaaggtcaggcgcatttggtgccagaccacgtcaccgtgagtggaatcggaaatgccctcgtcctcatatccgaatcgcgcatagaatccgaccaaccgatctttgcaggtgagcaccaggcctttacggccggctgcacgagtgtcttcaatgactttcctcatgagtgtactggcgcaaccgcgatgctgatacttcggcgcagtatccacgccgaaaatcatttgccagtcaccttgagggttgtgctgcgcggcatcctcgtacatgtcatcggtcaagtcgcgccgatcggtcacaaaaccgttgatgaacgccatgacgatctcgccatcaatcaatagccagaaacattccggataggtctcgattcgggcgcgcagggacgagcggtcggcggcctcggcggccgggaagcattcgaattccatggcggccagcgcgtccagatcgtcgatggtggcgtggcggattaactggggatcagaatcagtcatgttttgtctttctcttaacactccgttgtgagcaactcccccagtcacgcttcgcgtgctggctcccctcaccttgaggggagccggatggatgtcagattacgtggtattcgcgtagcagggtggcaatatcggtgccgtcgagtttcttgagcaccttcttgaccacggccttttcaatgaagttgagcttcatatcggtgaccggtgcaccgtcacgcaatttgacggtggcgttgagcaggttgcgcacgtcatagacactgccccacacttcaggcacgccgcggtccacgccgagcaacgtgtagacagcttccataccggtgcgcatcgagtactcggtggtgaagatcgtgtcacgcggggtctcggcgaactggccaaggaatgcgaagttcacggcaccatcgggcaccacgtccgggcggtcgccggccgcgcgcggcatgaagaacgcggtgatgtacggcatcatgaccggcacggtgttggcgtgatgcttggcgagcgcctcgatcttgtcggtcggcacgcccatgtggtaaagccactcctcgcaaatctcttcaccggtgcattcggtcatcggcttcttcacatagttgccgggcttgtccgggaacaggccgtagacccatacgcacagctggtccttgggctggtcgcggaactgctgctggcggttcagggtccaactcatgagccagttggagtcctgcacagtgacgatgccgccggtgacgaccttgccggagaacgggtcgcgcttgcaaatcttctggatgtacggcggaatctcgccgtccagggtggtgatggtggcgctcatccacttggtggcattcggatcggagcagaacttctccggatggccaaagctcgggtcctggtcggcgatacgcttccacatatcccagccgccgccgggcttcaggtctgggttccatgcggcgggcgagttctgggaacccatggtggagttctccacgcaaccgccgttggtgatgaacaccagatcgttctcggtcaggtcgatggaggatttatcaccctcgtgatccacgtcgatgcgcacggcaagcttcttggtgggcgtgctggcagggttgcgcttgaagaaaccggaggtggcctgaatcttttggatggtgtcctggcctacgccggtgtgctcgcgcttggggccggctcccccgccaatcgcgaattccacgttctcaaccttggtgttgtagcggaattcgacgccatgcgattccagatacttgaccatcggcagaatcatcgactcgtactggttgtagcgggtgaaacgcagcgcggaaaagtccggcagtccgccgatgtgatgaatgtagcgtttgatgtacagcttcatttccagcgcggagtgccagttctcgaaggcgaacatggtgcgccagtacagccagaagttggagttcagcacctcatcatcgaagaaatcggtgatcggcttgtcatacaggtcttcgtccggggtgaagaacagcttcatgatttccatcgaagccttgtcggacaggccgaacttgcccttgagccccgcgtccttgccgaggtccttggtggcgcggcacagcgagtagttcgggtcctccttgttgagccagtagtactcgtcgagtacgctgacgccctcggtttcgatggaggggatcgagcggaacagatcccacatgacctcgaaatgattgtccatctcgcggccgccacgcatcacatagccgaggccgggaatatcaagaccgtcacaggcgccgccgggtaccgggtccttctcaaggatgtggatgttctcgccaggcatctgaccatcacgcaccagataacaggctgcagacaatgccgccagtccggtaccgatgatgtatgcatgcttgttgtccacgtcggccggcttcttcgggcgtgcgaaagcctcataattgccgctgctgtagtacatattccgcctccttggggtagagttgacgcttcgtcaactcttcttgaatagacatcatgtcacattattgccgaacacgccataggcaacgttcggcgttctgccgtattcgccaataccttgcgtctacggttttcgaggcctgtgttggctgttggctcataactattgaaggcatacaggcatactgaggatgctgggtgcttcaccgaaccggatgattgataaggtcccgctcaatccatgccatgaccaaatcggcaagtcggtttacctccgcttcggtgagttcacggcctttgggcagatgatgccatttttcgatgcatccgcggcagcatgtggcggtagcatgctgagcggtgaataccggatggccgcgccatggcgtctgcctgccgtcgttcttcggttcggctgcgcctatgcggtctcgcaacatttctcgcgcatgacgatcgatggtcgccttgcctttggtgcgggcataggctcgttctttgtcggtcaaagcgaatttggcgcggaactgcgaatgagacagccgttccagcatcgcggcaatccattgtcgctcgtcatcgttgttaccagtatccgccatctccatgcccatacgttccacaatagtcgcgcacatcgtatggtggcacatgccttagctccctctgatgaaggagtccccagcaaagccagatgagggagaggccaggggcgaaacccgccaatcaggcggcaggcaagcagctggggccaaacagaatcttgatctcagcaaacaacgaagtatcccgcttgacgcggaaacgatcgccaaacgtgagcacctgagcgttacccttctcatccagcaccgcaagatgtacttcgcagtaaccaggatgattagcgagcacctgaccgagttgcatcatgcgttggcgctccaacgccaccggcggcagcgtgatgaccaacggacgttcatcctcggcttccaaggtcggaatctgcatttccgtggctctcagagaaacggtttcgtcgcgcaactccacttggccacgaatctgtacgatggcgtccacggcgagttcggcggcggccgcttcatagaccttgccgaagaacatgcattggatggagctttccatgtcttcgatggtcacgatggcccaggggttgcccttcttggatacgcgccggtccacattggtgaccaaaccagccaacgtgacctgctgtccttcacccatcgttttggctcgatcaaccagatgcgcgatggacatttcacgcaaggacgcgagaatcgactgcataccggagagcggatggtcagacacatacaggcccaacatttcgcgttcgaagttaagcttggtcttcttgtcccattcctcaagatcgggtacggtcacggaagcgtcgcccatggcctccgctcccccatcctcggcatcggagaacaaatcgaactggccctccgcctgtttgcgcttcagactcaccaccgagtcgatggcggcctcgtgcacggtgaacagcgcgcgacggttcgggtcaatcgagtcgaaggcaccggccttgatcaacgattcgaccaatcgccggttcagcgcggtcaggggcacgcggcggatgaagtccatgaagttcacgaacttgccgcgcgggccttcgcgttcggcgatgatatcggccacggccttgtcacccacgttacggatggcaccaagaccgaatcggacgacgtcgccgactgccgagtactcgtacaccgattcgttgacgtccggcgagagcacctggatgcccatgcggcgggcctcgcccaagtacagtgcggtcttgtctttgttggtggcggcaccttgcaacagggcggccatgaattcgaccgggtagtgcgtcttcagatatgcggtccagtaggagatcagaccgtatgcggcggagtgcgctttgttgaaagcgtagccggagaacggcaccagaatatcccacacggcctgggaggcctcttcggagtatccatgctccttcataccggcgaagaacggcaccttctccttggccagcacttcgggcttcttcttacccatggctcgacgcagcacgtctgccttgcccagcgaatagccggcgaggattcgggcggcggactgcacctgctcctggtagatgatcagaccataggtctcgtcaagcacctgcttcagaggttcctcaagctcagggtggattggcgtgatcttctgcaggccattcttgcgcttggcgtagttggtgtgcgaatccatactcatcgggcccggtcggtacagagcgataagtgcggaaatatcgttgaagttatcgggcttcagggttttcagcagtgaacgcatgccgtcggaatcgagctggaacacgccgagcgtgtctcctcgggacatgagtttgtaggtttcggcgtcatcgagcggaatcttggtgtagtcgatggcgggtttgccgttggcctcgatgttcttcagggtgtcgtggatgatcgtcaagttggacaggccaaggaagtccatcttgaccaaccccaacgtttcgcacgtgtggtattcgaaggtggtggtgatggtgccatcggtgcgttccagcaacggcgaggtgtcggtgatgggcgcgctacccatgatggtggcgcaggcatgtacaccggtctgtcggatcaggccttcgatacccttggcttcttcggtgatgcgcttggcgtccgggtcggaatcgtagagttctcggaattccctggcctcggcgtagcgtttggctgtcgggtcgaagatgtcatgcaggctgatatccttgccgccggtggccgcgggaggcagcgccttggtgactttttcaccgaccgagaactcgtagcccatgatgcgggcggagtccttcaaggcctgcttggttttgatggtgccatagatcacgcactgggcgaccttatcggtgccgtatttttcgccgcagtattcgatgactcgcgcacgaccttcagggtcgaagtcgacatcgatatcaggaaggctcactcgctcagggttcaggaacctctcgaaaatcaggccatgcttgagcggatcgagctcggtaatgcccatcgaataggcgaccatggcgcctgcggccgagccacggcccggacccaccataatgccgtggtccttggcccactgaatgtagtcggcgaccacgaggaagtatccgcagaactgcatctggcagatcacaccacattcgtagtcggcctgcttcaatacgtcgagcggcgggttgccgtcgtaacgcttctccagaccttcctcgacttttttaaggaacagggaggtctcatcccagccttcggggcaggggaatttcggcatgaacgcgccgtcttcgtggtcgtcgaacatcacgttgcagcgttcggcgatggcgagggtgttgtcgcaggcgtccggatggtccttgaacaggtcgcgcatctcttcggcggttttgatgtagtagccggtgccgtcgaatttgaatcggtccggatcgtcaagacgggaaccggagttgatgcagagcatggcgtcctgtgcctgggcatcttcggcgtgtacgtagtgggaatcgttagtggccagcagtggtgcgttgagtttcttggctatggtcagcaggtcaccggtcacctgagtttcgatgggcagaccgtgatccatgagttcgatgaagaagttgtctttgccgaagatgtcctggaattcgccggcggcgcgcagggcctcctcgaattgaccgaggcgcagacgagtctggatgatgcccgaagggcatccggaggaggcgatcacgcctttggaataggtggcgagcacctccttatccatacgcgggtagcgcatgacgcgaccttcgaggttggccacggacgaggctttgatgaggttgaccaggccttcgtcgttttcggcccacatggtcaagtgggtgataagaccaccaccggagacgtcgtcacggcgctgggcttcagtgccccagtgcacacgggatttgtcttgacgtgcggtttccggggtcacgtaagcttcgatgccgatgatgggcttgacgccattggccacgcagttggtgtacatctcgtaggcgccatgcatgttgccatggtcggtgatgccgaccgcaggcatgccaagttcggccgcacgcttggccaaatcagggatcttcgacgcaccatcgagcagcgaatagtgcgtgtggttatgcagttgcacaaagttgttcccgtaatcagccatgcgc

SEQ ID NO: 3707 - DNA, 72257 bp, Unknown
  R150_10m  MAG No. k141_7753
ctcgctcgttcgatgggtgcgatgccggtttcatggaccgtgcgcagcagcgatgaactcgcccagtgcgcgccctacttcgaccgccacatcttcgaagcgttcgtccccgacgcagtgtgaggttgagggcgttattgatgtgcccatggggcggtaacttgcccatggggcggtttgaagaatatgtgaaaccgcggaattaagccattttggcataccgccccatgagggttttaccgccccatgaggcaattaccgccccatgggggatttcccgccccatgaggtatggcgttttacttgtgatatggctcgccagcgttgatcttataagcgcgatagatctgctccagcagaatcacgcgcatgagctgatgcgggaacgtcatcttcgagaaactcagcagaaaatcagcacgacgcagaatcgcgtcgtcaaggccgattgagccgccgatgaccagctgaatatggctggtgccacgcaatccaaggccgttgattttggcggccaattcttcgctggacagctgcttgccattgatggcaagggcaataacaaacgcgccgtccttcagatgcttggcgatgcgttcgccttctttggccttgatctgtcggtcaacgccttcggaggcgtggtcaggcgttttctcatctgccacttcaatgatgttgagcctgcagtagcgcgaaagtcgcttggaatactcgtcgatggcgtcgcgaagatatcgttccttcacgcgtcccggcgcaataatgtcgatttgcataaaaagcccatcacattggctcccctctctgaggggagccaggaaaatcagtcaattacgccatagagacggtcgccggcatcgcccaaccccggcacgatgtagcacttgtcgttgagcttctcgtcgaccgcgcacactacgaccttgaagtcgatggacggatcgatgtgctcttccacgaacttgatgccttcaggcgccgcgatgatgttgatcgcggtcacgtccttggcgccgcgctcggccagatagtgcgtggcagcaaccagcgtgccaccggtggcgagcatcgggtcgatcaggaagcactgacgaccggacaggtcctccggtagacggttcgcataggtgacctgctgagtggggtgttcctcgtcgcgcttcataccaaggaagccgacttcggcggtcggcataagacgggtcatgccatcgagcatacccagacctgcacgcagcaccggcacaatgatcggacgcggtttggccagcttcttaccggtcatcggagcgaccggtgtttcgattggtgcggcaactacggacaggttgcgggtggcctcataggcctcgagcatcacaagctccgagacgagctcgcggaaagtggaggaaggagtgttcttgtcgcgcagcacggtgagcttgtgctcgaccagcggatgattcaaaacgtgaagttccatactccccagcctacccgtagttcgcggggaagtcacttgggcggcagtcgcgcgcgtatcgcacaccaatgtaaacagcgttcgacggcgggccgcgtaacaccgttgattttgtaacgtgagcgttatgtatgagacgcatatgaaatattcaggcaacggaaattcacgcaggcactgccatcgtatagtgcagtcggccggaagccagccgtcgatatacggcaagtggttcagcacgatatcaggcatcagggcacggtacggcaatcagcgtagacattccgcgggcgggcaacgttcgcggaatgtagtcgtatgtggggaggaagagccatatgactcgattgcaaagactgaagatgggtgctgcggtgtgcattgttgccgcagtgcttgccaccagcggttgtggctggggtcgcaccgtggccgagaaagaggcccaagagaacaacgcgactgcggcaagcgacacctcatcatgtgtggacacctcaggcaacaccatcaaaatcggtttcgtgaattcgctgtctggcacgatggccatttccgaacagacggtgagtgattcgctgcacatggccgttgatgagattaacgcaaagggcggcgtgctgggcaagcagctcaaggtagtgcagcaggacggcaagtccgagccggctgtgttcgccgaaaaagccaagaccctcatcgaaaaggaatgcgtggccgcggtgttcggcggctggacgtcctcttcgcgtaaggccatgctgcctgtgttcgaggcggataacgcgctgctgttctacccgctgcaatacgagggcatggaagccagcccgaacatcttctactcgggtgctgcaccgaaccagcagattgtgcctgcgcttgattaccttaaggagcaaggctacaagaagctgttcttggttggctccgattatgtgttcccgcagaccgcaaatcgcgtggtcaaggcgtacgccgagggcaatggcatggaagtggtcggcgaggaatataccccaatgggctccaccgacttcaccaccatcgtcaacaagctcaagttctccggcgcggatgcggtggtgaacacgctgaacggtgattccaacgtcgcattcttcaaggaatacaaggcttccggcctgaaagccgccaccacgccggtgatttccatgtctatcgccgaggaagaggtttccgctatcggcgttgacaacgtcaaggaccagctcactgcttggaactactaccagacgctgaacaatgcgcaaaacaagacgttcgtgaagaacttcaaggcgcgctacggagccaatcgccccacctccgacccgatggaatcggcgtacacatctgtgtacctgtggaagggcatggtcgagaaggccaagtcgttcgatgtggacaaggtcaaggctgcagcagacggtgtcaccttcaatgcaccggaaggcaaggtcaaggtggacggcgaaaaccaccacatctacaagacctcatacatcggcaagatcggctcagacaagctcatccacaccgtctggaagtcggacggtcccatcaagccggacccgtacctgaagacctacagctgggccaagagcctgagcgccagcgtcgagagcaactgagagaagaggacacaacaacatgggtatgttatttccacaaattgtggcaggtctgtccaacggatcgattctgctgctcgcagccctcgggttgtcgttgaccttcggccagatgggcgttatcaacaacgcccacggcgaattcatgatggccggcgcatacaccgcatacgtcatgagcatggtcatcggcaataaaacagtgtccctggccgtggcgctggtggtcggtttcgtagtagccggtttgcttggtttactgctggacgtgttgctgctggagcgtatgcgcaatcgtccgcttgatacgctgctggttaccttcggtgtatcgctggtattgcagcagctcgcacgcgatattttcggtgccactccggtctacgcttcggctcctgaagcgctgaccaatccggtgaccatctttggctacagcttctctgcaggccgactgttcatctttattctgtcgattatctgcgtggctgcgctgtacgcgatcctgaagctcacgccgctgggtcgccagattcgcgccacttccgagaaccgcgacctcgctgaggtttccggcatctccaccaagatggtcgaccatgtgacgttcttcctgggctccggcatcgccggtatcgctggcgtggcgctgagcctgctgaactcgattagcttcaacttcggtacgaccttcatcgtgcaggccttcctggttgttgtggccggcggcgttggccagctcaagggcgcggttatcgcctcgttcgtgctgggcttgtgccagtcgtccatcgaactgccgacctctgcctcgattggtcaggttgccgtgttcctgattgtggtggtgttcctgcagttcaggccgcagggcttggtctccatccgctccaggaacctcgcgtgagtgcttcagaagggtaaggaaacgacaatgaagatgactttgagcgaatacgccacgaaatataaggctttgatcggtgtggtcattgccgtggcgctgatcttcctttctccgactgtgctgagcgtgtacaacctcggcctgctgtccaaatacctgtgctacgcgatggtcgcggtcggcatcggcctggcttggggccaaggcggtatgctgacgctgggccaaggcctgttctttggtctcggcgcgtacgtgatggctatccacatgaagcttgaggacattggcgtgggccaagtgccggacttcatgtcccagtacggcatcaccaaggttcctggattctgggaactcttccgcaatccggtcatcgccgtgattggcgtggctgcggtaccgggcattatcgccgcaatcctcggtctggctgtgttcggccgtggcgtgcgtggcgcctacttcgcaattctttcgcaggcgctggttgccgcgttcgccgtgctgcttatcggccagtcgaaaaccaccggtggcaccaacggtctcaacgatttcaagggattctttggttacgacttgactgataacgccaacaagcagatgatcttctacatctgcgcgttcctgacgctggccatggtgcttatcgtctactggattcgcaaatcgtttatgggcgacctgattatcggcgtgcgcgaccaagagaaccgcatgaagttcttgggctataaccccgcctccatcaaggtgttcgccttctcggtggctgcaatgttcgccggcattggtggcgcaatgttcgtgccagtggtcggcatcatttcgccgtccgatatcggcgtgacgccgtccatcctgatgctcgccggcgtggtgatcggcggacgtgccactttgctcggcccggtggtcggcacgctgctggtgcgctttgcggaaacgcagctgtctgaggcgtatccgtccgcgtggacgtacatcgaaggcctgatcttcattctggtgattgcctttgtgccgaagggcttgggacagttcaagggcgtatggccttggattaaggagaagatcgggctcggaaagagttcggttggagcttcggctggtgctggtgctggtgctggtgctggtgccggtaccggtactgctactgcaaaggcggtgaacgcatgagtgaggagaagaacatgagctcgaatccatcggctcccgcacctgcatcgcaggccgatttggagcagttgcgcgccgaaatgattgagatgcgcgacgaagccaagcgtatgcgcgacgaagcggcccagatgaaggccgaaatcattgaagagcgtacgaagctgcacgatcagcttgcggtgctggatgatcgcggcggccagtggagcgattatctggaagttcgtggactgcacgttgagttcgatggattcgtggccgtcaagaatcttgatttgactgtgcagcacggcgatttgcgattcctgatcggcccgaacggtgctggtaaaacgaccatcatcgacgcgattaccggactggtgccggccactggttccgcggaattccgtggcgagcagctgttgggccgcaagccgaacgacatcgtcaagctgggcgtcgggcgtaccttccagaccgcatcggtggttgaagagctgtccgtgttggagaatctgcagctggccgagggcttccgcaagaagggtcgtgagctgttccagccgatgggcggcgtttcgcagaacatcgaatacatgatggacgtgtgcaatctgactgtggatgcaaacaagcccgcaggcatcctgccgcacggcaagaaacagtggctggaaatcggtatgctgctcgtgcaggacgcgcacctgctgctgctcgacgagccggtggccggcatgactccggccgagcgtgtgcagaccggtgagctgctcaagcgatgcagcaagaaccgcacggtcatcatcgtggaacacgacatggatttcatgcgtcagttcgccgattcggtcacggtgctcaaccagggcgaaatccttgccgagggttcggtcgaagacatccaaaacaacgaagaagtagtccgcatctacctgggcggcggagaaaactaactccctgtctcccctccctgaggccgaggcgttaagcaaacagcccagtgggctgtttgtagtcgaaggtgagacgatagtcgaaccagcaggttgcaggcaaggcccgtccttaattgcggacgagctgtcaccgaaggtgactgaggggagtaggtaagaggaagaagcgcaatatggaccgcactgacaacaaccatcgcatcccggaatgcgctttttcagtgcatattgagggtgatacaacgcgcctcaacatcaatatgcacgacgccgtagaaagtgaataatcatggcaatgcttgaagtaaaggatttgaacaccggttacggcaaagtgaccgtcgtcaacgacatcagtttcgacgtggccgccggcgaatgggtgagcatcgtcggcaacaacggtgccggtaagaccacgctgttgaaggcgattctgggcttgctgcccgtttcgtccggttcgattagtttcgagggcaaggacattaccaaggctgcaccgaaccaacgcatccgcaagggcatggcgttcgtgccgcagggccagcagtcctttggcaccatgaccgtggacgaaaacctgcacgtggtcgccgaccgctacggttcagaggccaaggcccgttacgacgaagccgtggaaatgttcccggtcttgaaggaatttgctggccgacgtgccggtctgctgtccggtggccagcgtcagcagctttcgattgcccgcgcgctgatcacccgccccaagctcatgattctcgatgagccgaccgaaggcatccagcccaatatcgtcgccgaaatccagaaggccattcgcatgatggccgaagacaagggtatcggtgtggtcttggttgagcagaaggtccaattcgccgtcgagcgcgccgaccgctactacgtcctggcctccggccgtttcatcgccaccggcgaaggcggccccgaccaagtagaagccgccaaggaatccatgagagtgtgattaattcgacccccgtttatggccatagagcgttatgagaaacgtcccgttcttataacgctcttattattgggcgatgttagggctcacattggtgtgcctgaaaaactccagtcaacaacagaggatgttatgagacttacaccacgagagactgacaagttgatgctgtacttggcggggcagcttgccaaagaccgcaaagccagaggcgtgaagctcaactatgtggaggcgattgcgttgatttccgccgaatgcgttgagcgggcgcgtgagggaagcactgtggcggagctcatggcatacggtcgcacgctgctcaagcctgaagatgtgatggatggcgtggccgagatgctggaagtggtggaggtcgaggccacgttcccggacggcaccaagctcgtctctattcataatcccatcgaatccaccgagaagttggtgccgggggaatatctgctggctgacgatgatttggaactcaatgaaggttccgaagacatcgagctggacgtggtgaacactgcggatcgaccgattcagattggttcgcacttccacttctttgaagttaataagtacctgaagttcgaccgtaaggcggcgtatggcaagcggttggatatcgcggctggtacggctgtgaggttcgagccgggtgaaacgcatcgagtgcggttgattgatattggtggcacgcgtgagattcacggcttcagcgcactggttgaggggaagttggatgaccctgaggtgcgggaggccgcgtttaagaaggcgcatgagcttggattctcgggaatctgagctaagggccaccctcagtcagcttcgctgacagctcccgccagcggggagcggactacctctcagtctcgcttcgcgagccagctcccctgacaaggggagctgaaaaacagcaaggacttttgacatgaagattattacgcgcaaggattatgcgggaatgttcgggccgaccacgggagaccgcgtgcgactcggtgacacgaacctcatcatcgaggtggaaaaggactacacgcactacggtgatgaactgaagttcggtggaggcaaatcattccgcgacggcatgggccaaagctccgtgcagctcgacgttgaatcgccggataccatcatcaccaacgccctcatcgtggactacaccggcatctacaaggcggacatcggcatcaaagacggcaaaatcagcgccatcggcaaggccggcagcccgcagaccatgagcggtatcacccccggtctcgaagcgggctccggcactgaagctctcgccggcgaaggcctcatcgtcaccgcaggcggactcgacacccacatccacttcatctccccgcagcagattcgcactgccctcgccggtggcgtgaccacgatggtcggcggcggcaccggtccggccgacggcaccaacgccaccacctgcaacccgggagccttccacctgacccgcatgatcgaggccgccgaagcgctgcccatcaacatcgcctaccttggcaagggcaacgactccagccccgaaccgttgcgtgagcagattcgcgccggtgccgcaggcctgaagatccacgaggactggggtgccaccccggccgtcatcgacactgcactcggcgtggccgacgaaaccgacacgcaggtggctatccacaccgatactctgaacgaaggcggttgtgtggaagacaccatcgccgcgttcaagggccgcaccatccacacctaccacaccgaaggcgctggaggcggccacgctccggacattattcgtgccgctggcttcccaaacgtgctgccgagttccacgaacccgaccatgccgttcacgcgcaacaccatcgacgagcatctcgacatgatgatggtctgccaccacctcgaccgcaatgtgcccgaagacatctctttcgccgactcgcgcatccgtcccgagaccatcggtgccgaagacgtgctacacgacatgggcatcatctccatgatgagctccgactcgcaggccatgggccgcgtgggcgaggtcatcacccgcaccatccagaccgccgacaaaatgaagaagcagcgcggtccgctccccgaagacgaacacgacaacaaccgcaacgacaacttccgtgtcaagcgctacgtctccaagttcaccatcaacccggccatcacccacggcatttccgaatacgtgggctccatcgaagtcggtaagatggcggatctcgtgctttggcagccgtccatgttcggcgcgaagccggaaatggtcatcaagggtggctccatcgcctactctcgtatgggtgacgcgaatgcttctatcccgaccccggaacctgtctactaccgcgatatgttcggcgcgctcggccgtgcgcttggcaagtcctgcgccacgtttgtttcgcaggccgccgtggatgacgatatcaagggcaagctggagctgcagcgccaggtgttaccagtgcatggctgccgcacggtaggcaagaaggatctgaagttcaacgacgtgctcgccgacattcaggtcaatcccgaaaccttccaagtgacggtggacggcgaaccggtccactctgacccggcgtacgagttgccgcttacccagcggtacttcctgttctgagagaactggtggctctcctcaaaggggagagccacttggttttagccttcggccacgaaatcggtcacgaaatcggccacatctcgaatgaggtcgaaggcgtcgtcgcctcgggtggtcagtacacgcaagcagatgccattgattacgcggctcacgccgagctcgccggtgaagccgatggcgtctgcgtgttcgtggatgcgagtgatgagcgcgtcttcggcggcgatgcgggcagtctcgatgcgctcgcggatggcggcggaggatgcttctttagttgcggcatcttgtacagcgtcgctagggtcgagttcgggcaggtgagcgtagagaacgccgcagtgggtgaattcgcgccacatgccgagttcggtgtagtcaaaagcatcaggttccaacagcatgcggtcagcaaaggccagatgttcgcgcggttgggcagcggcggcttccgccttggaaggccggcctcggcgatgtgcgtgctgttgcgccaattcggctgcggcggccttggtcacggcttcgggttcggccacatatacgcgcatacgattcgtaaaacgtttcatggcccaacgctcatccatcccaacgcggccacatgtcgccacatccgcatacacgaatgctgactcggcggaaatatgcgcggtggtcaggttcatgaatgagctgttcttgaacggaatcactgggaacggcaggaacacggctttggcattgccacgcgccctgagttcgatggtgcgttcggccgagccgtccgcggtgtcgaacaccttctcgtagctttgcgttttgatggtcgaatcggtgcctgggccgaagtcgatatcgatatgggcttcatcgcccctcaggaagccaggggaggcgagcatcacgacgaaatccgaatgacgtccgttggtgaacggggtcatcagtttgaacggcgcctcgaaataaatatcgtcgattttggtacgtccgtggcggaatgcagtggatagacgaaaagtgctactgcccatggacgaatcgctgccttcttatgattggtgcctgacgatgacatgggcaattatgccgcacttggtgcaacggtatgtttcggcccgtccgtttttggatacgggcgggccaaaacatcacatgtcctcgaacagcacgctcttcttgatccatgcgatgacgtcgtccactccggcaccgcccatcaggtcggtgaagatgaacgggcggtcgccgcgcatcttcttggagtcgcgggccatcacgtctagatcggcgtgaaccaacggggccaggtcggccttgttgatcaccagcaggtcggagcgggtgacgccggggccgcccttgcgtgggatcttgtcgccctcatcggtggcgatgacgtagattgtggagtcggccaggtccgggctgaacgtggcggacagattgtcgccgccggactccacgaacatgatctgcacgtccgggtgggtgcgggccatttcctcacaggcctcgaggttcatcgagcagtcctcgcggatggcggtgtgggggcagccaccggtctccacgccgacgatacggtccggcgcgaggcgtgagtgctcgataaggaactcggcgtcttccttggtgtagatatcgttggtgaccacgcagatgctgtattcgtcagccatcttgcgggtcaggcgttcgataagcgcggttttgccggaaccgaccggtccggcgacgccgatgcgtacgtatgacatggggtttctcctttatgtgggaattagttaggtatgtggtttgcgggtgaggttatcctggctcccctccttgaggggagccaggataattagctcatgtagagcctcgagtacaagatttcatgctgcatggcggcgatgtcgaggtaagctccggagatgccgagatcctcgggcttcaacgtcatcgcgatattcaccgcgcgcacgaggcgcgggaacgaatcatgcagggcgacttggccagcgtactggctgagcggaatcgccttcgcggcgcacatggtaagcgcgctcaacagcgaatatccatacatgatggccgcgtcgcgcacgtcgttcgcatggtcagccgcgtacaggcccatcgcgatcgaatgcaggccacggcagcggcgctcgcgaatcagcccggcatacaggtcgagcgacggcgagccgtacaggccgtcggcggcatcgtgcagctggtggcgttcggtgtgatgctcgtgcacggcgatgatgctgttttcgcgcgaatccgcagcggatgcggtggcattgtcggcaggacttggcttggcgaccccacgatgcccatccgaggtctgcgcctggccggcatccatctgctcggccagcttgaccaggcgggtacacatgcgctcgctgccttcacggatttcacgtgcggattgcagggccgaggccagctcgtcaagttcgatgagtcgctcggccagccctttgcgggagactcgcgaatcggtggcgtacttgccggccagcaccatctgcccgatttccttgtacggtgcgacttcgaggtagttcttcatatactcctcgaaatcggcgccacggcgcaagaagtcgcgctgtacgaaggtctccatgccgttggacagcgcgaacgcgcccacggggaagacgctgtcgcacacctgcagcatggccagacgtcgcgattcggtttcgttgatgttcatggggctatcagtgggtgtgccaggtgcggccgccgtcgtggctgtgggagccgtccgggcggtgcagcacgccgttcatctcatattcggcgggctcaccctcacctgcgtcgtgtgtatgcacatccagatggccggcggcctcctcggccgggaattccttgtcggcctcggcttcctgctcctcctcggccacgtcgcccgtggtcttgttggtgcccggaatcagtgtgccggtgccggcgtgggccttgacgatcaggaagccgtcaaacccaccctcgatgatatgcggttcataaccgatcttcttcgtgtattccatggtcggatggtcgtacggcaccagcacgcggtcgttctcgaccttgagactcaggtggcggttgcccagttcgaagcacaggcgtcccatttccttcatcgagttaaccggaatctcaatcagctgtgcggttttaatgcgtgcgaaatagcgcttgtcttcggtttcggcgagcacatcgccatccttgatggtcttgccaaccatgatgccgaactcggtgccgtcctcggccaccttgcgcatgcgcttcttatcggtttcgaaccagtcgaaggcaatcgacacattaagtttgccgtcgctgtactgctgactgatgatgttgccggtgatttctttggcgatcatccgttctccttggagaaaattgcttgtggcgtgagaatccccacgtccttcatgccacagtgtagagagcctgttgcgtcactttgtaacgaatgatcgaaatatgcaaaaaatatagcggaaaaatatccgaaaacacggaaaccggatatatggtacacggtgtgtcgctagtaattgcaagctattttgcatggttgtgcattagacgaatcacagttgtggtattacatatcacgttcctggagcgggaggttgtggtcgagctccgaaatcaacaaaaagagggaagttggatataatcgaagtacctgacaccgtcacattggcgatgcacattccggataatttcatttcgccgtccaccggggcgttgttctacgtcatcatgattccggtgtgggtgctgtgcctacgctacgtgatccgcaacagcacgccggagaagatggcctacctgggcgccggcgcggcgttctcgttcctcatcatgatgttcaacgtgcccacgcccggcggcaccaccgcgcacggtgtcggcggcgcgctgatcgctctgctgctcggtccccagtacgcgacggtcgccgtgtcggtggccctgctgctgcaggcgctgctcttcggcgacggcggcctgatcacgctcggcgccaactgcttcaacatggcgttcgtgctgccgtttgtggcttacggactgtacgtgttgctacgtaaggtgctgcccgacggctggaaggaacgcgtggccgaattcgtgtccggctatatcggcatcacgctcgccgcattctgcgtggcgctggaactcggcgtgcagccgctgctgttcaaagccgctgacggccaggcgctctacttcccgttcacctttaacgtgacgattcccgccatgctgatcccgcacctggccgtagccagcgtggtcgagggtctggtgaccgtggtggttgtcgaattcgtgcgccgcaccgcaccggagattatcgaagacaatgcccgtgtgaacttcgccgagaccgccggtgctgacggcaaacaggtcgcgcacgccggactgcgcaagtctgcgtggattgcgctggccgtggtggcggtgctttccccgatcggcctgctcgccaccggcgacgcctggggcgagtggggcgccgaggacttcatgagtgccacggggctcaactacgtgccgcagtacatcgcccatggcttctcgtgggatgcgctgttgcctgactactcgctgcagggtctgccggacatcgccggctacattctctccgcagtgattggcatcgccgtgctcactatcgtgttccgtctgctggcgctcgcggtgagcggcaacggcaagacatccgcgcgttgacgatacctgcatggatgcgtgagtcggaggattacgatcctccggctgacaagtcatccttcatcgaacacaacctggggcatttcggcagcgtactcgagcaggttggtcatgcgttgccgattgagtcgagcccggtcgacaaggtgctgggctcggtcaatccgggcgtgcggctgctgggcatactggccgcgattgtctgcgtcaacatcacatgcaacatgctgttctcgtacatcatgctggcggtggtgctgctgatgatggcgacccggccggcgcgcctgatgagggcgttgctcggcccggtgctggccgtatgcatcctgagcctggtcgtggcggtgccgagcctgctgattgggcagtacagtgcgccggtccggctggtggtgcgtgcgttcgtggcggtgtcgctggtgatcgcactggcgcgtacggtgccgtggaatcgcctgattgccggactgcgcgcagttggctaccctgattcggtgatttatatctgcgacgtgacgattcagttcatcgatattctcggtcgttcgatggtggagttgctggatgcgctgcggttgcgcagcgtgggccgcgaccggaccaagctgatgtccgccggccagttgatgggcgcgctgtttctgcgtgcgaatacgcaggcgcggcaaatggctgaatcgatggtgtgccgggggtttgacggtacgtatcatatccaccacgagcgtctgctgacgtggcgcaacggggtgtatgccgtgtgcattgctgcaatgattgcgctggcggtgtattcgggatgagggtggttcgaatgaatggagcccaataatgttcggattaaagcgtaatcataaacaaactgcagccatgcagccagataactcatggttccgcggcgacccgctggtcgaactgaatcacatcgacttttcctataaagattacggcgacgccgacgatgaaacctcgtcgcacgccgtgctacgtgatttttcgctgaccgtcgaacgcggtgagcgcgtggcgctgctcgggccgaacggcagcggcaagaccacgctgatgcgcatcatcaatgcgctggaatttccggactcaggcgagtatcggtttggcggtactccggtggttcgcgaggaagtcgaggcgaagaacagcctgttcgccaaagcgctgcatcagcgcatcggattcgtgttccaaagctccgacacccagctgttctgcccgtcggtggaagaggagattgcgttcggtccgttgcagatggggttgccggatgccgaagtacagcgcagagtcgatgacatggtgacgttgttcggcttggatcggatgcgggagcgggcgccataccgtctgtctggcggtgaaaaaaagcgtgtggcgattgcctgctgcatgtcgatgaatccggacctgcttgttctggacgaaccgaccgacggcttggacgagcgcaatactgacgtagtggttgaggtattgcgcgccttcactgatgccggcaagactgtactgttctccacgcatcaccacgacatcgtggagcggctcgacgctcgcatcgtgcgcgtgcatccgtcactatggcaatgacattcacgtggcgtctattggatatcttcatcgaaaaaagcagaaaggcatcggcgaggatcgcgagtccggcgaggactgcgatagtcgctttggtgatggttgccttcatgagagtttccccaaggtgttgacgttgatttcatgagattcgaaaaagagcgtatctaggccgaaccggacagtaagtcaacggtttctggaaaccagctgaaaaagctacggtattgtgaaatatgtctcatcggaatgggtcaagtttggcctagcgctcgcagtcgtgcgcgaagattcgttggattgattctcggtggattaagtcataggaagaaactagacaccttgcggtgtaaaaccgggaatcggaatggtgtaaaaccgggaatggaaatagtgtaaaatcgggaatgagaaaggtgtaaaatctatattgaggtgattgggtagctgagaaaggccggaaaatgaacgatttgaacaatcgtagtgataccttgactcaacctgattatcgtgctcgcgtggtcgatggcaggttaggtaagttacttaaagcattcggcgcggtggaaatcgtcgggccaaaatggtgtggaaagacatggacggcgctttcccgctcgcgaagtatggatcgtctggatgatgccgctacctttgcggccgcacagactgatccggcattggtactcatgggtaatgaaccgcatttggtggatgagtggcaagatgtgccgcaaatttgggatgccgctcgtcgtcatgtggatgacaatgcgaatcgcaaggggcagctgattcttacgggctcggccattccgaaggaccgagaaacaattcaccacagtggcacaggtcgaatttctcgcttgcgtatgtggcctatgagtctgtgcgagtcagggcaatctaccggtgtagtgagcttgtctggtttgtttgatggacaattcgagcctgccgaatgtgcaaccagcattgaagatattgccagatggtgctgtcgaggtgggtggcccgcaaatcttgatttggatgacgagtttgctctggaaattccgagtgaatatatcaagagtgtgcttgatatcagcgtgcccaagatgaacaagaaccctgaaaccgcgcgtgcactcatgcgtgcgctcgccgtgaacgtatcgcaggcaccaaaatatgcgacgctggctgcggatatggcctatggcgatgagcgccgtgaaccggatacgcagacagtaaagagctatttgggaatgctcaaggacttgtaccttctgacggatttggagggttgggagccgccactccgcgcaaagagtcgtgtgcgaaccaagcccaagcgatatttcgtggatccttcgttgcctgctgcggttttaggtgccgcgccgaatactctgatgcgcgatacacagatgctcggcgatctgtttgaaacgctgtgcattcgtgatttgaatgtatatctgtcggccatgccgggtgcgaacaatcgcatcgcctactaccgcgatgacaaggggcttgaagttgatgtcattatcgagttgtctgacggcaggtggggtgctatcgaaataaaactcagtgaccttaaggtgaacgatgacaatgcggataagctcaaatccttccgcgacaaaatctgtggcaaccccatggcccaagttcgcgaaccagagttcatgatgttccttaccggccgaggtgggaaggcctatcgccgcaatgacggcatactggtcgtgcccatcgcaacgttcggggcgtgaatcgggtaaaagaaaagaagcgccgaaccgcgaaagcgcctgtcggcgcaagggccgctcgcggcggcaaaaaatggagcccggggcttaagcacggtccgacgcggatacttagtatagcttgcgatggggctcgccgcgccgggggaggtgtggtgttggctggtagctgattgttggggtgcggttggtgggtctctccctcagtcacgggcatcgcccgtgacagctccctcatcagagggagcctggagcagggctactccaaccgtccgcgacgccagaggttggcaccgtgctggaaatccttggcggtggccatgaggctgccggcggtgtgcataaggcgggcggctttggtgcgcaccgccttttcatcggcatccgaggagaaggcgccgttggcctcggcccgggtcaccatgcgccgcgcctccacgcgcaagcccaacgccaccacatcggtaaacgccgccgcacgctcaagcgccacggcaaaatcgcccacaaaagcaccggagagaatcgaatcggccaatcgcacgatgtcatcttcactgggagcctgatccacgccggcgatggcggaggcggtagtggccaccggctcacccaagcgccacagatgcgcgatcgagtcgcgattcgatcgcatccacgtacgcaacatatacagtcgccacagcacaccaggcagcgaatccggctcggcatcgctccatagttcggcgatttcatccacgccgaccgtctccaccaacgtgagcacccgctcaacaaccgccgggtcttcgctatggcgcacacgatccagcaatgcggcagcagacagatgactcatctcgctcaacgcctgcgggtccatgccaccggccaatccatcggccacagccgggtcgagctgagccgggcgcgaggggcgtgaagaacccatgcgagcaggtccgaatgccgctccggccgcacgcaacgagccgaagcccgggcccagactgccggcggcaccattgtgcgcggcatgagccgcggcggcagcggccgaggagttggatgaatcaggaaatgcgggtctagtagacaagcggttgaaccttctgaatatcgatgattttgggaccatgaggcgtcggagtgacgaacagcgccaccgccgtgccggtcggcatgaacggtgtcttggcgatcaggcgtttgctcaaagacggcgcaacgcacatgctgcgcaggtgtccgaacataccaccaatcaccggccggtgcatgcatatcgctatgggctgacggcgctcaagtgcgaactcgatttcgctgagtagacactcccatgcggtgtccggcgcagcggcgtatgcatcttcggtgagcggatcgagatgaaccatgtctcgtccggtctgccacgcgaacatctccaacgtctcctggcagcgcacccaaggcgacgtggccagtcgggtcggattgaaacacgccagctcgcggttcagcgcgtatgccgcagccgcgccgcgcggcgtgatcggacggttcgcgtccgaacccttccacagcttgcgcgcttccgctttgccgtggcgcacgataatcaccggcaccgcgtccagtgcaccttcttcgacccgatcaacgaatagcgcgaggatgtccttatcggtggaatggctgagcttcttgcgggcctcggccggcgtcagccacaaaacttcgtcgatttcgccgatgtccgcccgatgcaccgggccaaacgcatgggtacgccgcaggttgtcgatggcgctgatcggcgtggccatccagaactggatatgcttggtatccgccgaccgatccttggtatggcgctgtttgctgccttcttcggacagcgggtactcgatgtcgcccagataggggccaagttccacggacaggcccgattcctcgccgatctcgcgtacggcggcatgccggtgcgattcgttcgggtcgaccttgcctttcggccagctccagtcgtcgtatttcgggcgatgcacgacgcacagttcgatgcggttgagtacgttgtccgccgcggccgggctgtcggcctgcgccgggtccggggtgggagccgcgtccgatgcgccgggtgctgccgtggccttgccgccagaatccgtggtgttcgcgatgatggtgccatcggtggcaatattggatttcgctgatggagacgatgcctgcgtcggctcggcatcatccttccaccggtacagaataccgccggcggcttccacgattcgtctcatactgttcgtacccatctcttgtattataggtcgcgttggaccgctgctacgtagtttttgcgcgctgaacaacgatgcccggcatcctctcgaaagaggatgccgggcatcgtaaccaccctcagtcagctcgtgctgacagggagcatcgaatgaaatcagttgtgcgaattggggcggcgctggtgcttgcgaatcagatattcctgactgtcgaccagcgggcggccctcgtcgtccttggtgtgcagcacatacgtgccgtcgggctgcatgtgccagctcatggtggagtcggccatctgcaggtccacgtacttgatgagcccgtcgacctgctccggggcggtgacacgcaccagagcctccacacggcggtcaaggttacggtgcatgaggtcagccgaaccgatgtagacctccgggccggaagccggaccctcgccgatctgcgggccgtccgcgttgcagaaggcgtagatgcgggagtgctccaggaagcggccgagaatcgaacgcacgcggatgttctcggacaggccgggaacgccgggcttcagagcgcagatgccgcgttcgacgatgtcgatcttcacgccggcctgagaggcacggtacaaggcgtcgatggtcttctcgtccacgatggagttgaccttgatcttgatccaggcctccttgccggcgcgggcggcgtcctcctcgcggcggatgcgctggattagaccggtgcgcacggtgcgcggggccaccagcagacggtggaagctggacttcggcgcgtaaccggagagctggttgaacagacgagtcagatcctggccgaccaccgggtcgcaggtcagcagacccagatcggtgtacagtcgcgcggtcttcgggttgtagttaccggtgcctacgtggcagtagcggcgtagaccgtccgcttcctgacgcacgacctcgatgagcttgcagtgggtcttcaagcccacgatgccgtacaccacgtgcacgccggcgcgttcgagcttgcgagcccacgcgatgttggcgtcctcgtcgaaacgagccttgatttccaccaaagccagcacctgcttgccggcatgagcggcgtcgatcagggcgtcgatgatcggcgagttggagctggtgcggtacagggtctgcttgatggccagcaccttcgggtccgcggcggcctgcgcaaggaaggcctgcacggaagtggagaaggagtcataggggtgatgcagcaggatgtcgcgctcgcggatggcggcgaaaatgtcctgcgcacgggaggactcgacctcggcgatctgacggttcgtggtcggcacgaacggacggttcttcaggtccgggcggtccacgctgccgagctcaaagagcacggtcaggtccagcgggctgggcagacggtatacctcgtcctggctcacgccgagctggtcggcgagcagctgggagaggaacgggctagtggtgtccgtgatctccagacggatcggcggtccgaagcggcggcgcagcagctccttctccatggcgttgagcaggttctcggcgtcatcctcttccacgtcgatgtcctcgttacgagtcacgcggaaggagcgggcttccttgatgatcatgcccgggaacagggattccagatgcgcggcgatgagcttttccatggcgatgaagccgtaacgctcgtccttggactcctcgtcggtcatgtcgtccaccggcaccaggcgcggcaggttgcccgggatcttgacacgggcgaagtgcgacttgccggaggccgggttctccacaatcacggccaggttgatggaaccgccggaaatgtaggggaacgggtgggccggatccacggcgagcggcgtcaggaccgggaacacctgctggcggtagtagcgcgagagacgctcctgctcggaggaggtgagcttgtcccacgtcagcaggacgatgcgctccttctccaattccggcagaatggtgtcgatcgcgtaatgtgcgtgctcgtcttgcagacggtgtgcggtctcgctgatcgcgcgcagctgctgacgcgggctcaggccggcggcagacggcacggcgatgcccgagtcgatacggcgcttcaggccggcgacgcggaccatgaagaactcgtcaaggttcgaggcgaagatcgcggcgaagttggcgcgctcgagcaggggcatgtcttcgttctccgcgcattcgagcacgcgctggttgaacttgagccagctgagctcgcggtcgaagaaacggtccttgggcagcggtgcctcgccttcctgatcgacgcggcggtcgttgttgtcgttttcggcaatatgctctgcgatttggctgcgcagaattgccttcgagggtgcgtcaaatatctgtgccatagcttatatcgtaagctctggcgtggccggaaaacggctgaacgcgccagaattcaacgggcgttcatgttagttcggtgttggttggttttgagtgtgctagcgtgctcgcgacacgccgtgagcggcggtgaaacgaacgaaaccgaacatcagacgggttcgatgtgaacggttcagctcgttttccgatagccagaaagtgcgattgaacagttgtgataaaaaacgcacaacgactctctgcaggttgcgagaaacgggagtgatgaatagattatgaggtacaagaacaactgaacagagcagagcccacaaatagtgtatggtcacgaggactgttacgttggacgggcattggaaagacttaccgttacgacgatgatgttgtgcagagattctgctccagtagttgaacttgtagaaaaggcccgctccggcgggccttttcgtttgtgtgtacagtggagggcatgacggaaacacagcgtacgccagaggggatgtcgtcgaaaccccgtatcaagccggccgatgccgaagacggccgcccggtctctatctctgcgcgtctcggacgactgcaattccactattccggcaagttccgcgtgctgcagattgccgacattcaggatgggccgaaagtctccaaagacaccatcgccctgattgaggccagccttgatgccacacggcctgatctggtgattttctccggcaaccagatcgccggctacgatccggcctttgccaagagcttccgcaaacgccgttggtgcgaagaggcgattcctgaatctgcgttgaaccatacgcgtgaattggtgcgcaaggccatcggtcaatttacctctcctttggcgtcacggggcataccgtgggcggtgacctacggcaaccacgatttccagtgcggtttgagcaatgccgaactcgacggaatctactgcgagtttcccggttgcatcaatccgccgagcgatgcgctggccaagcagaccgtatatatgtgtcataaggacggctcgcctgcggcaaccaatggtgaagaaaccgatgcgccgatttccgcgtccaccattcccggcacttttgcattgccggtgatggatgtggattgcacgcgcaacgtactgggactggtactggtgaattccggtgactatgcgcatggaggcggtttcggcacgccttcgcccgagacattggccttcctcaaggctttgcccgaacatatcggagccaaatcaatggtgttccagcacatgccgctgccggagtattaccaggtactcaaaccggtggccgccaatgcggctttcgccatgcagggctaccgcaagcatgcggatacctattatgtgctggacgaggatcgcactcaagccggcgggtatctgggggaaggcatttcctgcccggatgagtcggacgagtttgaggcgctgcgcgaggggtatttcggcgtcgtagctggtcatgatcatcgcaacggtttcgtcggcgaacatgagggtctgttgcttatcgctacgccaacctgcggattcaatacgtacggaccggctccggccaaacgtgccacgcgattgatcgaatttgatatccgtcacccttacgagccgcgtacgcaattgctggagtttggcgaactggtgggcaagcccagttccaaacgcgcctacacctatgcggtgaaccaaaccgcgcctggcgagggcgagggtgatgatttgctgcgcaagccgtcgctatggagccaactgtccggtttattcaggtaacccggtttattcaggtaactgttcctgatagaagcggaaagcggcgcgaagtattcgtatacgcgcgcggccggaggcgcggccgtataccggttccatatcccggcacaaagatatgccgacatatgatacaagtgataacatttgttgaataaagggttacgttttcgcgtttagggacgtgtgcttcggcgcgcattcaaacaagcgcatcccttgcggtcactatctcacgatggttcgcgcgaagcgatgaaccgtcagtatgtgcggagttctggtatggtcacacgtttaacgcggttggcgacggctgtcgcgctggtcgtcggcatgatcgtaccggtcgccacggccgccgccgtcgacggggggggggttgtcgatgccgcgcaacagacgccggcgtgcggacgtccttggaatcaggacgaacaaggcaccgtcgttgattctagccagccttccggccgattggtcggctgcatcagcaatgccgcagtgcaatatcgattgcagaattcgacgcaatggcagaacgttcccgtggatgaacacggcaatgtctcgttcgattacagcacgaaaatagcccaattccgttttgacgcgcaattcgtcatacccaaaggaagcatcaccgaagacaaccacgtgttccgataccacatcgcgggattcaacggcaccggtaccaccatgtcgggcacgctcaacgacgatctcggcacgtacacgatcgctccagacggattggtgaccatcgtcttcagtgagcacgccatcagcaagaacgccgccgccccactggacaatggccgattgtacatcgaagccgatcgcaacaaggtgaccggcaataatccagggcagaccgtattggatttcggcaacggccataccaccaccatcaccatgtaccgcagaagcggcagcacctccaagcaggtcgtcggcacgccgacgctgcaaccggacggaacgctcagtaccagatggcaggcgcaatacgtcaacacgggaaccatcgaccagccgatcgtgaggatcgaggattggttggcctatgagaacgttgatcaaccgaacgccggttccatctcgttaagccgaggatggtacacggctgagaacatcaacgatctgtaccaaacgttgaccacaacgatggggcacggcacgttgacggtatataaggtcacgctgccgaactatcacggcggcgccgccgtgacatggccggccggaggattggccacgggaacctattggaagtggatcttccagccggattcgtattcgattcccgcagggcagacgttgacgttgcaatacaattcgacgttcgccaatgatgtgctgtatcccgcttcgaaaaacatttcgcggttcgtccgttccaacaacggaggcgactatttcaccaacaatgcaatcgcctggaatccgctgcggccaaggatctcactcaccaaaacggcgggcgggcagcagaccccctcggcggagcagtgccagaccatgggcgtggcggaaggccattgcggccttgcgtcgtggaatgtctcggtgcgcaatgccggcgacggtcaattgccggcgggatgggtcatgcaggacaccggcagcggcgtctggtacacgaagcaactgctgcaggacagtctgcgcgtgaccgtcgacggtaagcagctgaccggagcgacgcaagtgtcctccgacaacggcaggacctggatagaccttaacaaagcgcaggaatcacagcgatacacgtccttccggttcgtggccgacaacgcgcttgcccccggcaaaaccgcggcgatcacttatcaaagtctgttcgattccagcgaaacgactgtgcgtaagaattcggccaccgcgggaaccggcgtcggcggatcgttcgtcaaacccgtcacctccagtgtgcaagtcgcctctttggtcaaagacggttgcggcgatccggtcgacggacagggaaatcccaaattcacctcctgctcggccaacggtgccgactacacacgtaccgccacccccgatccggtgtccgtgaggcaagtgggatggcgtatcagcgcgcacgtgaccgacaattggcgtcgcgcgccgctcgtcttcacggaaaccctgccggagggcctgcacgacgtgaagttcgcgttctccgatcatggcgaccgcaaacagtggcttaccgtgggggagacgcggttcaccaatacccagggtgtgcaatatgtcgttaccgtcaagcagaccggcgaccgcacgtaccagatcaccatcccccaacaggcgaccgatctcatgaacgacggcaacgtgtatctgtatgtggccgcacgcactcccgacatcaacgacggcaagtactgggcggaaggcaaatacgacggcaaacggggttgcgtcgccgatcccgcgctgaaaaacggtgccggcgattgcctgacggccaaataccgtaatacggtttccatgggctccggcagcataccttccgtgtccacgtcggaaaccttcgtcgataatttccagaaaaccaataccggcgtcgaggacaagcagaacgtcgacggcggctggtcctccgacggcaaaagcttcaccagaacctattatgtgcgtgccaaccggtatggactgaacatcgatgccacgcatgcgaaacaggatgacgtccccgataccgatatgctgcccatcaaagacacgctgaccgtgcccgccataccggaaggcagcaatccgcaggtcacgttcctgggcaacgtgaccgtgtgtctcgcctggataggcaacggacagccctgcccggccggcaaaacgtaccaaccatcctcggatgcgatcgtatatcaggaaaacgatgccaaactcggcggcgtattgacggtgtacgttcccgattccacgccggtgaccatcagctaccagtacgggttcaaaggctccgccggattcgacgtggcgaacaccgcgcaattcgccaactcgccatggtccgatgccggcgcattcaatacgaacggcgcggccatcagcagtagcggcgtcatcgtgcagacatcgacgatgctgttgcataaaaccgatgatgatgcgtccggctaccgggatctggccggcgccaaattcgaactgctcgaatgggacggccatgactatgcgtcgagcaagcccacgcccattacagcggtgacggatgagaaaggcatgatcgtcgtcggcaaaacccaagggttgcagtgcggcacggcgtatcggatcaaagagctccaagcgccgctcggctatgagattaacgacgagcagaccgatttctatctgacgaattgcggcggaggcgcgtacttcggtccggcgaacgaggatggcagtccgcaggcgtcggtgcatcaatggaccggcggctatacggtgacgattcgagacaagaagatcaccggctcggtgtcgtggagcaaggtggacgccgatcatcacgaggaatacctgtccggcaccacgtggcgacttgaacgacgcaacgataacggtacgtggaacaaggtcaacgattccctctataacttcgccgattgcgtgggcgacggtgatgccgcctgtgccggcaccggagacaaggatccgaccgtcggcaaactgaccatcgacaatctcgactggggcacctaccggctgacggagatcaccgcgcccggcggataccggttgcccgacagcgaccgtacctgggccgaattcacgattcgccaggaggatcccaaggcgaaagccgtactgcacggacggggtgattgggccggcgttacggacaatcgtctgaccaatcggccgcaaccggtttccgcgctgccctccgcggggcgtcgtgccgcgtgggtggtgacgattgtcggcatggtggcgtccggaggggcgttggcggtgttggcaatcgccgcgcatatcagaaaacgttcatacgggaaccgttccgtatgaccaacatggattcatccatatattccataaggaggagaacaatgaaagcaaaatcatggatggcgggagtcgctgcggcggccacactgttcgcggccatgaccgcaccggccagcgccatggccgaagagtcgggtgcgccaggtgctgcgcagtcttccgcgtcttgcacggccacgagcaagaccatcacggtgaagggcaaggatgcggacgcgttcaagacgtggagtgacaagacccctttgggcaatcgtacgttcaaggtggcgaaggtcgccgactacaagatcggtaatggcgcgtccggtggttcgttgcatcttgagacggtgagggaatcgaaggcggccattcttcaggcggtgaaagatctgcccaccaatacgggccaaccgttgtatgaaggtgaggaaaatgatggcgacccgatgaactggcttgccaacacccagaacgatatacttatccgtaagtacgcggataaaccgggcgtcaccggcagcacgcttgaatcgaatagtgtgagtgtcgacgacacgagcaataccatgacgctcaccatgcccggtcccggcctgtatgtgatcttcgatgccacgacgcccaagcagcagatcaaggacacgggagacaaaaccattgcttatgacggcttcaacaatatgctcgtcggcacctcacttcccgatggctgcaacgtgtcgaacaacaatggcgtcgtggatctgacttccgacttgaatgccaagaccacttccacgacaaccaatcgcggtggcttcaagttcaccaaggtcggtgtgggaagcaacaaggctggtttggcgggtgccgaattcaccgtgtactccgacgagcacttcacgcaggttctgcacgacgccatgggcgaggaggtcaaggccacgtccagtgaaaacggcggtcttgtcgatttccgcaacttcaagctgaatgacggcacctattacctcaaggagaccaaggtgccgaatggctattggtccggttccgcagccaaactgaaggtcacgatgaagaacgtccaggggacgatccagttggagtcgatcaccgacatgagcattcccgccagcggactgctcagcaatggtacgaacggttacgcgtaccgcaacatcaaaagcatcacccagctgccgctgaccggtgccatgggcatggccatccttggcgtcgtggcggtgttgtgcatcggcggtgcctcgatcatcatcgttcgggcccgcaaaacgaagcgtagcttcgcggcctgaacatagggccgaatgacgccggtggcaccttcgttcgagcagctggtcgacgttgccaaagaataccgggcgcatgcccgtatgcagcggcgattgcgcgtgatgtacgccgtcgcggggattttgatcgccgtggcggcggtatgcacggtggttccgctgctgatgcagtatgcgtcgcagacgtccatgtccgcgtcggcgtcttctgtcgaacagcaggtgcgactgtggccggaaagccggatcgacgacgaactgcgggcggcgcgtgcctacaaccgcgatctcgtccgatccgggcagccggtgctgggagcccaggccgacccgttcagtaacggggaacgcctgtcctcccagtcggcgcaggatcaacgctacggcaggctgctcaacgaaggtcacggcatcatgggccgcgtgtccataccgaagatctcagtggatcttcccatctaccacggcaccggagacaagcaactgtcccttggttccgggcatctgtatggcacgagcctgccggtcggcggcaacgacacccatgcggtcatcaccggccatcgcggcatggtgcaggcgcagatgttcaccagattggatgaaatgcgcgaaggcgatttcatctacatctcaacgatgaacaggaccctggcctacgaagtcgatcgcatcaccgtaatcgaaccgaccgatacctcgcagctgcgcatcgttcccgggcaggatcggctgacgttgatgacctgtacgccatacggcatcaactcccaccggctcctggtctccggccatcgtgtgagcatgcccattcccgcccccgatccgaccgatctgcatgacggtcggaccgccggcgcatgggtgtgcgggtcggtgctcctgtgcggttggggcggcattgcggcggtccgtcggcgcaagcgcgcgccggaagggccaccgcgccatgccgtgcgggtgtgattggatcaaggtccggcatggcgatgccagccgttgcggacggattcggggtgcgacgcaggaggttcgcctggtccggagaaaacagtctacgcggcgggaaccgttcacgtcgaaatcacctgcacggcctggagtacccgcaattcgggaaacctgtgcaaccgtagaacgtgcgtgccggtgccgaaacgttcctcggcgtcatcggacgcagcctcggcgtgtgacggcggcgacgcgtgccgccgacaccgattgcgggcggtgacgggtgcgtgacgtgtgtgacggatggtcggatggcggggtggacggaccgagcggaaccgggcggtccgtccggaaccggctagagaccgaggaaggcgcggatgtcgccgatctcctcgtcgacgatggctgacccatgccaggatactcgcggtattcgagccggccggtggcctcgagcacgcgacgcgcggtctgctggtccgcaggtggaatcgtgcggtcccgcgagccgtacaagagcaggaaacgggtgggggagtcgaaaccggtgaggtccgtcgactcctcgcccttgaacgacgggctcatcaggatcgcctcgtcgaacacgtgcggatgctcgagcaccatgcgatacgacatatagccgccctggtagaacccgacgaggatcttgcggcggcctgcgaacatgggggagtcgagcagggagacgacggcgtcgcccatgcgcgagcactcgcggcggcgtagacagcgtcgatgatgcggatcatctcacgctcgtcattgccgtacccatggaacatgacgaacaggcggtcgtcctgttccgatgcttgaacttggggagctccaaacgtttcatacgtattgggtgtcttaggcgttcgagatatgtcgtgtgtctcgtcggggaacgacgattcgaatcgatggtcgcaataacatgtcggctccttcctcgcggcttgtaccgcttcctcatcatcccgcgccatgcaggcgcgtggaatagaatgttcgacttacggcgtcaatacgtgttgaaggtgttgagcaatccggttcgaaacgctttctcgcatggtgacatgcgggatatgaaatcggcatagtcgacggccgtatcgggaatcgacagtccgagtttggccacgatgatgtcctcccgtgctttgacgtctccgtggaacgtcgttccttgcagcatgtgcagctccttgcgtgaggtttgcttcgcatcggggtagaggaagatgccgagtttggaatcaaaccggtacatatatgccagaatctgccagtaatcttctttgtgaatattggatataggcttgtacttggcgtccgcaatgatgggatgttgtttggaacggctgatgaaatcaggatagatagggcctgtgccaccttcgaacaggtgttgttttccttctttcaatttgtttcgcggatggaagaagctatcgccaatcagggaatcgacgtattcctcccatagccaggagccgtcgaagagaatgccatgaagtcggttttcctgaccgttgaacgcgtgacgctgattgctaagaatgatgatgcataattgttgcagcatgcggtattgcgtaaaatacgcatgattgaccggatgtctgagattgtattccagaacggtgctgcggtttgcgcgacgatatgagggagtacattcgattatgtaacgtacctccttgcggatattgcctaatagcgtggaaccgtacggttgaagggctatatattccattgtgtgacgaatcagctgtgtgagaggattgtctgcagtaagctcgcgcacatcatatgcgatattgccggtgaaaggaatattagtggtgatatgccgtggaatatcaattcttccacggatgtggctgtcattgtacttgtgctgaatgtatgtccgataaatcccttgtcttaaagctccccgtaaacagtatggaaacatgaatacatggaattggaacagtctcgtcgataaatcggattgaatactcaggcttgacaggttgggaatattcagtacacgatacatcatgtattgcaggaagaaatcccctgcggatgaggcaaaacgtgaatcgatgaccaactgttcgtcttgatagccaaggtaccccatcagattccctgagcggtagcctccactgtccttttccaataccatctggcattcgtccaagtccggagaatcctgaatcgactgcgggaacaccagcagaccttcttgcgaaagccgggctatggaacgatcggacacagccgcgacgatatccttgacgggagccagcgtggttgcctcaatgcgggagttgtctttgatcgatacggtactcataccgaccgttccgctggctgcggcgaatccgaagcatcttcatatgccgctttcagcttctccatgatttctgtttcgttatacatgccgcgcacgtaatcgtgcaatagcggttgcaggaaatcacgccaaaggtcatcgaacgctttcgccgtggattcggatttggaaagattcaggaaatacgcagggccgacatggtaatccgaacccaaaccgatatcgggggaggatatggtctcattcagcttcgtcaagcggctctcggcttcctccgacaagcctccaagttcttcaagcatgtccaacccgtcttcggccttgacctcgatgaagcggaaccgtcggcgcatcgcgaaatcaaaggtgtcgacggatcgatcgatgtcgttcatcgtgccgatgatatagacattgtccggcacatacagctcatgaccgtactgggtggtcacattgccggcagggccgcgataaccagggtcgatggagaagaacagctcgccgaatatcttggagatttcacctcggttgatctcgtcgatgatgaacacgaagggtttccgaagaaccttttcggatgctcgtgaagccgacgaaggcttgtgcttttggatttcctgtagcaaggcgaatgcataggagtcctcccgctgtcgacgctttcgctcgagaatttgatgcacgtcttcaccatttgttggaggggtgctggattgcataagcgccagaaggtcttggacgcgtattcttaattcctgtttgatgccgtggggagcgtacacaagaacatgatgttcggtgacgttggttacttggaaaggcttaccagtcgagattctgaactgattgtcgtcgaaatcaagagaatcaaagtaggcgtccagacgttcccgaacggatggttccctccgttcctccttggaaagccgggactgttcgacgttgtcccgagccttgtcaaggaaacgcttgaatatgccgtcctggatggagaagccgtgagttcccgtcgcatccgtctcctcggtattggggcggatgccctccacgaaatccgtgtagtcgtagctgggatgaaattggacgaaaccgatgcgtctgcgctgttcatcatcaagcttggaccaatcgccgcgcttgccgtcgctgacgatatcggcggcgatttggcgggcaagataggttttaccggttccgggagcgccacggaagatgatgttcttggaatccaacagtgtctgcgaatacttattgttgtagacaggggacttctcatcatcgggtgaagcgtaacctttttcttcttctaccgaagcgtcagcattcgaggcttcttgggaggtcttacgacgataccgcaagatgaaggcgtcattcggtttgccgaagcgtttcagacactcctgaacgaagaatagcgtcgagaagatgttccagcagtagagatacatctgtacatccgttccgcgccaataacgcacgtattcgattgagttcttgcagccgcttctgaaacgttcctcatcggggaagatgccggtgattagcggcttatccagaccgtaccgacagatggggaaggactcgcgcttgtcgtacggcaattcgagaagcttatcttcgaatacctgacaggtcagacgtggcagtgtctgacatgagatccggcgttctcccttgttacgatttcgttcgattggttcgccgtccgcaggcttgaacttgacgtcttcgggggtatacgcacttcccatgttggcgaagaaggaagggtcggtataggaatcggtatcgggctcattcgactgaatcgagtcggccgtgatgatcatctcatatgttccatcgggttgtgtcgtcattgagcaccttgccttatagcgtctcgtgttgtcaactatcctacactgtgcggattcatggcgtgtttgtcttcataggaatcggcctgcggccgatgcggtgtttttgcggcctttggccgcggtctctccctcagtcggcttcgccgacagctccctcgtcagagggaacccgcgctgcgcgcgttttgtcggctcgctattacctgcatgatgcctacggcatcgtctcgtcagagggaacgtcctgtggccattgccggtctggtctgtaccgcatcgggaacgctccgtaccgtgtcggacggcgcgcgaggtgggggcgtgcggcgacgttgcgatgggaatcggtcagcgcgggcggcctcatgctggtgagaaaggccgtgtgcgttccggcccgaacaaaggacgatgggatgggccgagaccgatgaaccgatacggaagggactacgacatggacaatacggcgcgcagggatgcgggattgccataccactacgacgacccggccatcatggacggacagctcgcatggcagaacaaactatgggaatacaaccagaccaaacccaccgaacgggagcggcgcgccgaactgctcaaagacatgtgcgccgaagtcggcgacggcgtgcacatcgaaacgccattgcatgcgagcaacggatgccgtcgcgtacacctcggcaaagtcatctacatcaacgcgttcatgagcatggtcgacgacgcggagatatggatcggcgactacacgatgttcggaccgtccgtcaccatcgccaccgccggctacccgatcttgcccatcctgcgcgaacaccacactcttgttcctatagcccagaaatcccgcgtctctttcgttgtgacgcgggatttctgccggttgggctatcggttggattgactggtatgtttcagcgaacggctttgaccagtgcctcggtgaggtacttgccggcggccatcaccagcggcgcatagcggcgtccgggggcggcacccatgcggccggtcgggccggaaatcgagatggcggcgatgacctggccggaggcgttgcggatcggggcggaaatcgagcacacgccctcttcgcgttcgttcacggactcggaccagccgcgcttgcgtacggcggccagcttggtggcggtgaacttggcgtggcgcaatccctggtgcagacggtcggaatcctcccaagccagaagaatctgggcggcggaaccggcttccatcgacagcatggcacccaccggaatggaatcacgtaggccggaggtgcgttccacagcggcgatgcacacgcgctgatcgccttggcggcggtaaatctgcgcagactcgccagtgcgatcgagcagggtctgcaggatcgggccggcggcggtcagcagacgatcctcgcctgctgcggcggcaagttcggcgaaacgggagccgagtacgaatcggccatgctggtcgcgcagtacgaaacggtggcgttccagtgcaatagccaaacgatgtgcggtcggtcgagcgagaccggtggcggccacaagctggcccagcgtagacgggccggattccagtgcgtcaagaatctttacggttttatcaaggacgccaacgccggaatggatttccccatcgtccttggcggtggtgtcttcaaccggctcggactcggtcaagctgttgttcaatggttcttcccgggaatcagtcataataagggcgattatgccatctcacatagtgaaatggcaaattggggaagtgtctcacagggtggccatgaagttgaaagggcgttcgtggatgccgaagagacatgtctggagcggaaccgagtcatgactaggtcatgttcgagtcgggtccgagtcatattgaggccatcatttgaccgtatctcaatatccggcatgctcatggccgggcccatcgcaagcacataggctaataccacgaacaaggcgcgaacacaatacctcgcgcggaattttttggaggaatcactatgggaacgacactggccgagaaggtctgggccgatcatctggtgcgcaagggcagcgacggagctcctgatttgctgtacatcgatctgatgctcatgcatgaggtcaccagcccgcaggcgtttgagggcctgcgcttggccggccgcaagccgcgtcacgtggatcagctcattgccaccgaggatcacaacacgccgaccgttgatatcgatcgcccgaacccggatgagacgagcgcgttgcagttgacgactttggagaagaactgcaaggagttcggcgtgcgcctgcacccgctgggcgacgccgatcagggcatcgtccacgcgttcgccccgattctgggcctgacccagccgggcatgaccatcgtgtgcggtgattcgcatacgtcgacgcacggcgcgttcggcgcgctggcgttcggcatcggcacttccgaagtcgaacacgtgatggccacacagacgctgtctctgaagccgttcaagaccatggccgtcaacgtcaacggcaagctgcccgcggacgcgacggccaaggacatcattctggcgatcatcgccaagatcggcaccggcggcggccagggttacgtgatcgaataccgtggtgaggcgattcgcaacctcaccatggacgaacgtatgaccgtgtgcaacatgtccatcgaggccggtgcgcgtgccggcatgatcgcgccggacgagaccacgttcgagtacctgaagggccgtccgcacgcgccggaaggcgagctgtgggatcaggccgtggcgtactggaagacgctgaagaccgatgacgatgccgtattcgacaaggtggtggatattgacgccaccaagctcggtccatatgtgacgtggggcaccaaccccggccaaggtctgccgatcaccgcctccgtgccggagccgggcaagatcgccgacgccaccaagcgcgccgccgccgaacgtgcgattacatacatgggtttgaagccaggcatgccgatcaaggacatcgccgtggacaccgtgttcattggttcgtgcaccaacggtcgtatcgacgatttgcgccaggccgccgcgattatgaagggccaccgcaaggccgagaacatccaccgcgtgctggtggtgccggcctcctcccgcgtgcgtttgcaggcggagaaggaaggcctcgataaggtgttcaaggactttggcgccgaatggcgtaacgccggctgctcgatgtgcctgggcatgaacccggacaagctggtgccgaacgagcgctcgatttccacttcgaaccgtaacttcgagggccgccaaggcaagggctcgcgcacgcatctggcgtcgccggccgtagccgccgccaccgccatccgcggcacaatctcgtctcccgccgatctctgagtcaatacacgtgagccccctctgacgaggggctgtcagtcgaagactgactgggggagagatccccgaaaggaaaattgttatggaaaaactcaccacactgaccggcgtgggcgtgccgctgcgccgctccaacgtcgataccgaccagatcattcccgctgtgttcttgaagcgcgtgaccaagtccggcttcgatgacgccctgttctacgcatggcgccgagacccgaacttcgtgctcaacaagccggaatacgccggtaagggccagattctggtcgccggccccgaattcggcatcggctcctcccgcgagcacgccgtgtgggcgctgcacgattacggtttccgcgtggtcatcgcgccgagcttcgccgacatcttctacggcaacaccgccaagaacggcgtgctggccgcgattatgccgcaggagtccgtcgaactcctgtggaagctactggaggaagagcctggtcgtgagatgactgtctcgctggagacccgcactgtcacttgcggcgacgtgaccctgccgttcgaggtcaacgattacgtgcgttggcgtctgatgaacggctacgacgatatcgatctgacgctgcagcacgaggacgacatcgccgcctacgaaaagatgcgcgccgaaaagttccccttcaagcccaagaccatccccgccaaacactgggccgaagaaagaatcgagtccgcccgcgagcctgaggacgcagactggacagggccgttggccgatcgcggcattatttagccgcgatcggtctgctgaaagcccggtgggctttcagcaggccctgtgccgagctgcgacagcagcgaggccagcattgagcctcgccgaaaggcgagtccataattgcaggcccagggccgttggctctgtgtctgattgagattattgggtcgctcgcatcgcatcaaacaaaggtctcactggtgcccgcgccccacatccattgcgcggcgggcaggagttgcggcaatattcccttcagtgccaacaacgccatacggtcgttatccaccgcagccaccaacaccggcgtggcggcgctttcctcaacactcatgaactccgtcctagcgttcgaaatactgtgcctgaattcgtacacatttgtggacataatcacgattcatccagtaatgacggttaggttgagcatcatgaccatgaatgacatgaatccgtcgaacgattccgatacggctccggcgcaatcgctgtcagcgcaaccgttgccacctcgaccggcaccgcagtctgcggcacagtcacagacgccgatgccacagacgccacagtatgttcagcctgggccgagcatgcagccgcaatatgcgggtcagccggaggcatgggcacaaccgctacctccacaagatgtttcacggggtgtttcacggattgtttcacaaggtgtttcacaacctgtgccgcaagccgcaatacctgctgtgcagcctgcacaatacgccgcgcagctcgtatacccgacatatcccgtccaacctacgtatcctgcccagccgatgtatcccacgcagccgacgtatccggcgcaatccgcctattccccatacccggcgcaacagtcggctccacagcccctcgctcatccgtactacgctcaaccagtgggctacgcgccacaaccctattccgctgcgccgcaaccattcgtgcaaacggctccggcaatgccagtcacaatgcccaacgcaatgcctgccacgatgcccgcagcaatgcccgtggtcatgccgatcgatcctcgccgtgtatggcgcacgtggcgtcgcaaggtggtcaatcgtgtaatgggactgactctcgcctatgaaggcatgatgctcttgggcgcaatggtcgccaccattatcgtcggcgtaataaccgcgagcgatttgtccggcgtgcagtgggatggcatcatcagcctgatatcggtgttcgtcgcgttcggatttctgctgctcatgcgccaccgtgacatcttcacctgcgaattctggcttggtggccagcatcgcgactcgtacggggagcccaatcagcttggccacatcagccaatatggcggcgggcgcatgcagcctctctgggcgttgatgttcatcgtgctgggcatgggcgtgcaaggcatcgttatgttggtgcaggtcgctttttccatgctgggcaccgatcttgcctctcccacgtcagacagcatcgccgaatccagcgtcaccgtaagcatgtggctgtacgttgggctggtcgctccgatttgcgaggaagtactgttccgcggcgtactgatgaaggagctcaagccgttgggcaagaacttcgccatcgtcacctcggcaatggtgttcggcctgttccatgacgacgtagtgcaaggcacattcgcgttcctctttggcctgattctgggattcgtggccatggaatactcgttggtttggtcgattgcactgcacatcttcaacaatgcgattctttccggcgccatcgatacccttgccggcaactatcttgatgacaacgcatatttgatattctcattgtcgctatctgtgatcggcgtgatcggatcgattatcatattcgtgatatacggcaaagagatgcgccaatatcaccgtacgaatcgtagtattccagacacgtactttggctgggcagctccgacgttcatcatctttgtggtagccaatgccgttttcgccattatttcgtttgtcggcgcgatgatgggttgagtgtgcgtgtgcgcatgcaggttggcttatcgttgaagcatgagtgattttgagccgttttacgatgtcagccgcagttacgaagacaactatgagcaagggccgttcggcgcgttcgccgaggcgctgaaggatggcaacggtgccgatgccgccggaaccaccagcgagggtgccttggccacctttttgggccagccggtcaacctgcctttcggcattcccgcaggcccgctgctcaacagccgtttcaccacggccgctttccacatgggtttcgatctggcgacctacaaaaccgtgcgttcgcgcgcctggggctgcaacccgttcccgaacgtgctcgccgtacaccccaagtcggcggacggttcactgacgccgggcagcgccgaactggacgaaggcgtgctggccgacaccaactatgaacagccgatttccatctccaacagcttcggtgtgccctcgcagagccctgacgtctggcagccggacatgcgcgccgccatcgaggccgccggtcccggtcaagtgctggtcccgagcttccaaggctcgcgtgtggagggcatgagcgaggaggaatacatcgccgaccatgccactaccgcccgcctggtcaaggagaccggtgccaagctcatggtgatgaacaccagctgccccaacgagggccacaaccgcctgctatgccacaatccgctgctcgtgggccgcatcaccgaggccgtgaagcaggagatcggcgacatcccgctgatggtcaagctcgcctacatccccagcgacgacgctctggagcttatggtgcgttccaccgtgggccacggcaccgtgcagggcttcagcaccatcaatacgatttccgccaaactggtcgatgccaatggcaatcaggccctgcccggcgcgggccgcgatcgctcaggcgtgtgcggcaatgcgattcgtggcgccggcctcgacatggtcgcccgtctggccgcgattcgtgaaaagctcgggctcgatttcgcgatcaacggcgtcggcggcgtggtctcgcccgccgactaccaggcgtaccgtgacgccggcgcggactcggtgatgtccgccaccggcgcgatgtgggacgccgaactggcccacaagatcaaggccagccggtaaatcggctccaaaaacaagcaacagcctgtacgggccgtgattcccagacgattcccagacagtgcccatgttgcattgaaactgttgctgttatatgtaatcacggccgaacaagctgcataacttaacctctttcttcttctctcctttctctccccggcgcccatcacgccggggtttcttttttgcggtgggtacagccgtcttactcggccgccgccttcatggccacggctccgacgtagtagaccggcttgtcgaagttcggctggaacaggaagtccacgttggcgagctggtcgatggtgaagccggcctgaatcgccatggaaatcacgtttgccgcgccggagatatcggccttggaacagaactggccgcccttgaccttgcgggtttccgggtcccaggtcagaatcgacgtgactggggtggtggtgagcatgaagtccgggcgataatcctcggtgagcgaggtctcgcggaccgtgagcccgcggcgttcggcaccggcgcgggtcaggccggaggcggcgagcgagagatcgtacagctgcacggcggacgtggcctgcgtgcccatgtacttcacggtcggcgtctcgatgttgcggcccaccagcaggccctggcgcaccgcgttggtggccagcggaatgtaatcgtgctggccggtggggttgtagaacacggtggcggagtcgccggcggcgtacacgcccggcgcggacgcctgcatgtagtcgtcgaccacgatcgcgccgttcggcagcatgtccaccttgcccttgagcaggtcggtgttcggcaggaagccgacggccggaatcgccatttcggccgtgtactcgcccttttcggtgaccacagtgacggtgtcgtcgtcattgtcgcggaactcgaccaccttctggccgagcgcgagcgtgacgccgtgctcctcgaacgcggccgccacctgatcggtgatggtcttatcgaaattattggccagcgggcgatcaaggccgtcgaccagcgtggtcttgacgccggtgacgctgaactgctcggcgatttccgcgccgatatagcccgacccgatcaccactgccgacttggcggttttcgccttttccttgatggcgatggcgtgatcccagttcttgcacagcagcacatgcgggctgtcgatgccggggatcggcgggatgaccgggcgcgagccggtggtcacgaccagtttgtcgaaagcgagggtctgttcggcggggtctccggcctcgtccagcgcgcggtaggtgagggttctggcgtcgaggtccacggacgtcacgtcggtgcgcatatgcatggtcgcaccggcttcggccagagcggcaggggaggagtagaacattttcttcgggtcggatacgtggtcgcccacccacagggcgatgccgcaggagaggaaggacagcgtaccgttgcgctcgaaaacatggacggtccaatcggggtgctcggcgagaatcgaggtggtggcgaacgtgccggcgtgcgtgcagccgatgacggcgactgtggtcatgaatgctcctttgcttgtggccatggcgtctgatgccattgccctgaatcgtagcgtagaagtatggagaacgccgcggcggcaaatgtgaggaagatcacgttatcggtttgattcgacggggggtatgggatccgttgtgcacggtgatcaaagttcggctggggtgcatttcacggagtcggcacatggcttatggcaaactggacggtagcattttttgaatcttgattgattgaggagagtggcgtggctgagaatccggatgacgtgttgcatgtcgagggcggcaagcctttgaatggcacgatcaaggtgcgtggcgcgaagaacttcgtgagcaaggcgatggtcgccgcgttgctggcaccgggcaagtcggtgctgaagaacgtgccggagattcgtgacgtgcatgtggtgtccgatttgctacgtctgcacggcgtggacgtggatgtggacggtgcgaacggcattgtgaccatcgacgcctcgcgtgtgcagctggccgatgtggccgacgtggatacactgtccggttcgtcgcgcatcccgatcctgttctccggcccgctcgtgcaccgtttgggtgaagcgttcattccggcattgggcggctgcgcaatcggcgggcgcccgatcgacttccatttggagacgctgcgcaagctgggcgccacggtggacaaggagcacaaggacggcatccacatcaccgcgcccaacggcctgcatggcgcgaagatccacctgccctacccgtcggtgggcgccaccgagcagactttactggcggccgtgctggccgagggcaagaccgaactgtcgggcgcggccactgagccggagatcatggatctggtgtgcgtgctgcagaagatgggcgcaatcatttctgtggacgttgatcgcaccttccgcatcgagggtgtcaaggaactgcaggggtacacgcacacgtcgctgacggatcgcatcgaggcggcgtcctgggcgtccgccgcgctcgccacgcacggtgacattttcgtcaagggtgccacccagccggagatgatcacgttcctcaacgtgttccgcaaggtgggcggcaaattcgaggtgacggacaagggcattcgtttctggcatccgggcggggacttgaagcccgtggcgatcgagacggacgtgcatcccgggttcatgaccgactggcagcagccgctcgtggtggccctgacccaggccaacggcctgtcgatcgtgcacgagaccgtgtacgagaaccgtttcggcttcaccaagccgctggtcgagatgggtgccaccatccagttgtaccgcgagtgcctgggctcgctgccgtgccgtttccggcagcgcaactacaagcattccgccgtgatcttcggaccgaccccgctgaccggacgcgacatcgacgtgccggacctgcgtggtgggttcagccatctgatcgcggccttggccgcgtcaggcccctcggacgtgcacggcatcagcctgatcgaccgaggctacgccgacttccgcggcaaactcgaagcgttgggtgccgacttcgattaattcggccgttcctcggctcccctctctgaggggagccacaattttttacaacagcccgtccgcctcaagtgcggcggccatgcggtcgaagcattccttcagtagcgggtagggcatggcaaagttcatgcgtacgcaaccgcgcccgacctcgccgcattcgcggccgtccgtcaacgccacattggctttcttgaagaaatagtcggccgggtcgtcaatgcccagtggcgagaaatccagccacgcgatatacgtgccctgcggctccacatagcgcaccttggcgaatctcgtgcgcatctgctcgttgaccagcgcgatattgcgctcgatatatgccatcacgccctcgaaccatgccgcgccgccgtcataggccgcagtggtggctatggcaccgatggtggccgtctggtgctcggaccattccgcgttcctcatccatagttccagatcgtccggattggtgagaatcacctgcgcgcacttggtgccgggaatattgaacgacttcgaggctgaagtggaggtgaaagcctgcatggccgtctgccggttgattgaggcgaatggcacatgcgtgtggccttggtagacgaacggtgcgtgaatctcatcggagaatatacgcacgtcgtacttggcggccaggtcggacaatcgcagcatttcctcgcgcgtcaataccttgccgatcgggttgtgcgggttgcacagcacgaaggcatggcagccgttcgcgaacgcctgctcaatggcgtcgaaatcgaacagccattcatcattgcgcccgctgctctcgccggcgccctcacacagcatcggaatctcaaggacctccacgccatacaggcgcggcacacttaggaacggcatataggccggagtcggcaccacgatggagttgccggcgcgcacgatctcgcgcaggaacacttcgaacgcctccagcacgtccggcaccgggcggatgcacgtcggatccacatcccagccgtatcgacgctgccatgcggcgcacgagcgggcgacctccttcttccacgggtcgggaatgtagccgagcgcgccacgttcggtggcctcttcgatggcttcggccacgcacggcgccagaccgtaatccatctcggcgatgaatgcgccgatgcagccggggtagcgggtccatttgtccgaaccgacctgctccagatcctcgatggttgtcacgtcgatgtgattggcatcaaagcaagaggcgccggcggttgcgttgctcacagtcgttgactggggaatgttgttcatgctcataacatgccattgttcccggtgcagaagggccgctcaacggtctggctccccgaaatcgtgatggcgctcgcaagcttgcttatcgctgtgcgactacttggcactcaaatatttgagtgccgtgcgctcgagctcctcgagcaatgaaccaagcgctgggcgatggtcgccggcacgagtcacgatgccgacctcgcgcgccgcaaaatcgtcggcgatgggacaggccaccagatcgccttgcagattgatatgtgtatcgagcgccggcaccagcgagacgcccatgccaacctcgaccaggttctgcgtggcccagtaatcatccgtgcagtggcggatatccggcttgaatccggcacgggtggccagtttcaccaaatttgcgcggcaggtggggcagccggcgatccaatgctcgtctttggcggcgaacagcggcacgggttcgccggtctcctcgaatcgtttggcgatgtcgctggagcggcggaccaacaatcgcatcggatcgtaacccagcgactggaaggtcagatcgtcgccgatgtgcaggaagttcgggatgctgctgtaccggaacacggcggcggcatcggccttgccttgggaaatcagaccgatcgcctccggcggctccatctgaatcaggctcagctcgatgtccgtgaacatactgagcttgaccacggtacgggccgcgatagtagagcagattgacggtggggccaccaaatgcaggtgagcaaaccgatgatgccgataatcctcgacctcacgggccgcccgctccagccgatcggcgatggcctcgccgtggcgggcgagcatcgaaccggtggcggtgagttccacaccatgcgaggtgcgttgcaccagagtcgaaccgcactgtgcctccagctttttgatctgctggctgatggccggctgcgaccaacccgtggccttggccgtggcggagaacgaaccatactgttcgatctgccacaacgtgaccaatgattgggggttgagcccggccatatgcacctctttcgcgcgtcgttccattatgaccgccgacaatgaccggacgcggcacggtgtcgccgtcgccggtatccttagaagaatgagccctgaagccttaagtgaactgatttccagcattgcccacaacctcgtcgccgccggccaggccggcgcgttgaccgacgagctgattccgcccgtcgacaagctcgccgtgatgcgcccgaaggaccgcgcgcatggcgactgggcctccaacatcgccatgcagctggccaagaaggccggcatgaagccgcgcgatctggccgagccgttcgccgccgcgctcgccgaagccgacggcatcgccaaggtcgaggtggcaggccccggcttcatcaacatcacgctcgactccgcctcggccgccgccgtggtggacaccgtactcgccgccggtgccgtgaccgacaccgacaagcatctcaacaaggtcaacgaatacggccgcaacgcccatctgggcggccagaccctgaatctcgagttcgtctccgccaaccccaccggtccgattcacatcggcggcactcgttgggctgccgtcggcgatgccatggcccgcgtgctcgaagccaacggcgccaaggtggtgcgcgaatactacttcaacgaccacggcgagcagatcaaccgcttcgccaagtcgctggttgccgcctgggccgaggccaataacttgggcgacgccggctaccagaccgaaaccccgtgcgacggctacaagggtgcctacatcaacgagatcgccgcccgtgttcaggccgaagccgagtccgacggcgtggacctgaccgcactggcccaccaggatcaaggcctgaacgacgacggcgaaccgctcggcgaagccgataccgaagtgcgcgaggaattccgcaagcgcgctgtaccgatgatgttcgacgagattcagaagtccatgaaggacttccgcgtgaacttcgacgtctggttccatgaaaacagcctgtacgccgacggcaaggtcgacgccgccatcgaagagctcaagtcccgcggcgacatcttcgacaaggacggcgccacttggtttgaatccaccaagcacggcgacgacaaggaccgtgtgatcatcaagtccaatggtgagttcgcctacttcgccgccgacatcgcctactactgggacaagcgccatcgcgccgaaaacccggctgacgtggccatctacatgcttggcgccgaccaccacggctacatcggccgcatgatggccatgtgcgcggccttcggcgacgagcccggcaagaacatgcagattctcatcggccagctggtcaacgtgatgaaggacggcaagcccgtgcgcatgtccaagcgcgccggcaacgtcgtgaccatcgacgatctggtctccgtggtcggcgtggacgccgcccgctactcgctggcccgctccgactacaaccagaacttcgacatcgacctggccctgctcgcctcgcacaccaacgacaacccggtgtactacgtgcagtacgcgcacgcccgctccaagaacgtggaccgcaacgcagccgccgccggcatcagctacgagggtgccgacctggccctgctcgacaccgaggccgacggcgaggtacttgccgccctcgcccagttcccgagcgtgctcgccactgcggccgacgaccgccagccgcacaaggtggcccgttatctcgaagagctggccgccacctatcacaagtggtacaacgtggagcgcgtggtgccgatggccctgaccgatccggaaacccgtggcgacgatgaggctcgcaaggccttggagatcgccaagaatccggagccggcccgtgccgccgcccgcctgaagctcaatgacgccgtccagcaggtcatcgccaacggcctcgacctcctcggcgtcaccgcccccgaaaagatgtgattatgcccatttctccaatttggccggccgctacggctgtgaatgccgacggtgccattacattccacggtcgtaccgccgaatcgctgcttgacgagttcggctcgccgctctatctcatcgacactgatgaagtagtcgcacgtgccaggcacttcgtgcgcgctgccgctgaagcattcaacacatccactacgcacgtgagctttgccggcaaggcgttcctgtccaaagaaatcgtgcgattggtcaccgaggccggcatgtttgtggacacctgcacgatgggcgagatgaaaatcgccctcgccgctggcgttcccggacgtcgtctggtgctgcacggcaacaacaagtccgatgaggaaatcgcgctggccatcgaacagggcttcgccaaaatcgttatcgacgagcccgacgagccggagcgcgtcgccgccatcgcccgcaggctcggcaaacgcgcccgtgtgatgctgcgcgtcaccgtcggtgtccacgccggtggccacgagtacatctccactgctcacgaggaccagaagttcggcgtgccgctgctggccgccggggccgacgccgctgtgctcgacgtgctgaacgccctcaaagacgtgacgcctgccgctaccaacgcgcgtatctctgcgacgcattccccggaaaatggcgcggaaaagaccgagaaatcagagcgcgagctgcactacgacgtcaagtacccgtacgacctgagccacgaggaagtctccgacacagacaaggcgctggccgccgcgatggaagccattgcggacggtccgtccatcgccgtgctcaagaccatcctcgccgaccaggacgtactcgaactggtcggagcccactcgcacatcggctccaacatccacgatgcggacgccttcattcacgcggccaagcgcatgatgctgctgcgcaagaccctgtgggccaccgacgcctacatcctgcccgaaatcgacctcggcggcggctactccgtggcctacaccgatggcgaagattcaatggacattgacgtggaactcactcgcttggcggatgcggtcaacagcaccaaccgtgcgctcggcatgcccgcgccagccatcagcttcgagccgggccgctacatcgtggcacccgccggcgtaaccctgtaccgcgtgggcaccatcaagcacgtgcacttgtccgatgccaaagacagtgccggcaacccgattgccgagcgcgtgtacgtgtccgtggatggcggcatgtccgacaacattcgcccggcactctacggtgccgactacaccgcgcgtctggcgaatcgcaccggttccgctgaaacgatgcttgcccgtgtgtgtggcatgcactgcgaatccggcgacattgtggttcacgaggtgcagttgcccgccgatttgaagcgcggtgacattctcgccgtgccggttaccggcgcatacggccgcaccatggccagcaactacaaccaggcgctgattccggcggtggttgctgtcagcgagtccggcgcgcacgtcatgctccgccgccagaccgtagacgacctactcaacctcgacgtcagcgagtaatcagcgtgcagaggtgagcgcctgacagtctgtaatgtgcggccaaaaccgtcataatacgaaaagggccgtcagcttgatgagtactttcggtctgctgtcggaaataatccgtaaaataggcgtgggatatagaaaactttttggaaggaccctgaattggctcacaacagcgaaaccccgattcgcgtaggcctgcttggtgccggcaccgtcggctcccagaccgcccgcctgattgtcgagcagaaggacgaactgtccgctcgtatcggccgcccgatcgaactgaccggcgtcgcctgcctcgacccgaaggaaaccgagaagttcccgtggatcgaccagtccatcgtcaccaccgatactttgagcgtggccaccaactcggacatcgtcatcgagctcatcggcggcaccaccgtggcccgcaagttcgtgcttgccgccatcgaatctggtgcttccgtggtcaccgccaacaaggcgctgctggccaagtacggcccggagatctactccgccgccgaggccaagggcgtcgacatctacttcgaggccgctgtaggtggtgcgattccgttcctgcgcccgctgcgcgagtccctggtcggcgacaaggtgaccagcatgctcggcatcgtcaacggcaccaccaactacattctcgacgagatgaccaccaagggtctccagttcgacgacgtgctcaaggacgcccaggccaagggctacgccgaagccgacccgaccggcgacatcgaaggctacgatgctgccaacaaggccgccatcatggccaccctcggcttccacacctccgtgaccatcgacgacgtgtccgtcgaaggcatcaccaagatcaccgccgacgacatcgccgccgccaccgccgagcacaaggtcatcaagctgctcgccgtggtcgagaacggcgaggccggcgtctccgcccgcgtctacccggccctgatcgacgagaaccacccgctggcctccgtgcacggctccttcaacgccgtgttcgtcaaggccgaggccgccgacgacctcatgttctacggccgtggcgccggcggcgctccaaccgcctccgccgtcgtgggcgacgtggtgaccgaagcccgccacattgctgctggctgcaccggcccgtccatcccgctgtacaagaatctgccgaaggctccgattaccgcctccaaggctgcattcgccgtgcgcttcctgatccacgacaagccgggcgtgctggccgccatcgccgccgagttcgccaagaacggtgtctccatcaacggtgtgaaccaggatctgaagcccaccatgaccgaccccggctacgacggcgagattcagcagttgcgcatcgtgacccacctgaccgacgaggaaaccctgcgcaacaccgtcaaggccgtgcaggcgctcgacttcgtcaccggtgacccgtccatcctgcgcgtgctggactgacaccgcctaggctccctctgatgaggcggtcgaacggctgcccgtgagttgaaagctgaatacccaagctcccctgacaaggggagctcctttttaaggaacaaccatgaacccaatctgcaatagcgttcacgtgcgcgtgcccgccacgtccgccaacctcggctccggcttcgataccgtgggtctggcgctcgactaccatgacgagctcactttcacgctcaacgacgacccgaacgacggcattgcccacgtgatcatccacggcgagggtgccgacaccctcccacgcgacgaaacccacctcgtggtctccaccttccgccgtgcctgtgccacgttcggcctcggccgactcggcttcacgctggaagcgaccaacaacatccctcaggctcgtggcatgggctcttccgccgaggccatcgtggccggcatcgccgccgccgcggccttcgcccagaccggtgacctcaaccgtccggccatcttcgatatggccgcccagatcgaaggccacccggacaatgtggccccggctgtgttcggtggcctgaccgtctcttgggacttcgaaaccgcggaaggcgtcggctcggtcgccgttcctggtggtgaaccgctgcacggcggattccacgccgtcaactacccggtggacccgtccatcaccgccgccgtgttcgtgcccgactatgagctgtccactgagaaggcccgtcaggcgctgcctagggaactgccatacaaggacgccgtctacaacgtgtctcgcgtgggtctgctgcccgctgcgatgaatcccatggtgctggcccaggccgcccagcagggcaagtccggcgtcgccgctgccccggctcaggatgccgatacgtgcgcttgcgctggcggaacccgtgaatcgccgttcgctgacgagcttgcggccgctcaggcccagtccaacgcgctactgttcaccgccacgcaggacaagttgcaccagccgtatcgcggtaccctgatgccgccgtccaccgagctcattgcgctcttccgctccaagggctatgccgccgccgtctccggtgccggcccctgcgtgctcgtgctgcactacggcaacgcccgcgaagccatcgaccagatcgcatcggagcagcttgcttccggccactggcgtgtgcttcacctgcccatcaacaccgccggcgtcgaaatcgagcgtcgctaagtcgaggagaaggctcccgctggcgggagctggccgccgcaggcggtctgagagtggtccgccataccggcagagaccaccctcagtctcacttcgttcgacagctcccgccagcgggagcataaggacttaagtcatgtccattccgctaattcttgcttccaagtccaagcctcgccgtgacgtgctgtattcggcgggtatctgccccacaattcgcgtctcgcacgtggatgagcctgctgcgctggaagcggccgcccgtgaggaaggtgtcaccgtcgacgatttgagcatcaagcagcgtgtgatgattcttgccgcagccaaggccgaggccgttcaccgtgcgtatcgcgatgtggccaatactgccgccgccgcaaccggcgatcgcgtgattgcctacccgctcaaggccaaggaaatcaaggattcggaacgcgaagccgtcgtcgaagacctgcgcaaagccgccgctggccggcccatcgactattccaaggcggaagtcgccaccacgcgcgacttctccggcatcgacatgccgaccatcaccgaacccatcgccaccgctattgccggacagccgggactgaccgaggcgacggtcggcccgctgattctcggctgtgattcgatgttcctcctggacggcgaatgctacggcaagccgcacagcgaatccgtggcccgagaacgactgaagcgcatgagcggcgcgaccggcgaactgtggaccggccactgcctgatcgatttcgcgaccggacgtaccgtgcgcggcgcaagccatgccaaagtccatttcggcgaattcaccgatgacgacatcgaacggtacatcgtcaccggcgagccgctggaagtcgccggatcgttcacgctggaaggcttcggcggcgcgttcatcgacagcatcgagggcgatccgcacggtatcatcggcctcagcctgccgctggcccggcatctggccggcgaactgggcatcacgtggaccgacctgtggaatgtcggccgtggcgaactggagccggaaagcaaggcctcgggcaaccagcacgctggcattctgccgccggtcgaaaacgtgcatcagcccggcgatggctgggtggactgcgcctgcggccgcaagcattggggcaccaacggtgcgtccggcattctgctggctcgccgtgacccggcgagcggcaaggtgactcacgtggtcatgcagcaccgtgccgcgtggagcgccgaaggtggcacgtggggtatccccggcggtgccactgcggacggcgaatcgtccatcgaaggcgcgctgcgcgaaagctacgaggaagccaacatcacccccgaagacatcgaggtggtcggctcctaccgcgaggaccatggcccgtgggcctacaccaccgtgtttgcctttgaaaagcccggccacaccgtcgagcccaaggcaaacgacgacgaaagcatggaaatctgctgggtcccgattgacgacgtgcccaaccgcaagctcctcaccgccatgaagaccgactggccccgcttcgccgcccgcctggacgagctggcctgtgctggacatcggtagtggtgttggctgggccaatgttttgccgatgagttcacttgggtaatgccgtgtgaaccgcgtgtggaccgggacggattctgctgtcccggttcgtcatttcgtctcttttgggacaaccgggacagatttcgctgtcccggttcgtcattttgcctctttttgggcaaccgggacagaatctcattcacctgacgccctatcgtgcgatggtcgccgtcggggaatggcggaattccggggttttggatttgcatatatcgggtgttcatggaagggcctgtcccggttcgccaaaagaggccgaaatcccgaaccgggacagccgaatctgtcccggttcgtatgtcgatcgattgaccccgccaccgggacatcaaccgcgcatagacaggacgcttcaatgtctggcgggcatgaccatatcggatgacacacgttccctcgtgcgtttcgccacgacctccgccccaagtcagtgcaaaaatggcatttttagcggtgtggtcagctgtcgcatgcggaaaatcctaaatcaaccgccgaagagacacatcgccgactcggcggaactcgctggtctgcgcgcaatgaggagtgttgtgtctgaatgcgattcagacaatggtcggcgtcaaatagcggtctccagccattaatcattggtgattgtggacattgagcggagtgaacattctagatgattcagggatatgccgaaaatcatatcgttcagagaatgaaataccgcatctcggagtaactgactgtcgacgtgcatggtttgaaatctgatatccacgcccatcatgcctagcaaaattacgggaatggggttcgaactatttcgcctcagccaactgggcttccgaatgctcaatgctgtatgcacttagtgtgtggaaaccagccaatcattgaccaatggcaggccgcagtcgaaaccagaaatatcctcgctcgcagtcaggtgccgaggctcagtgaagttggtcacgtccatatgggatcacgctccaacaattcattcagacgtaggcccataggttcgtttaatgctgcggtgaaatcattccacgctttactgttgagccgaatgatatgagcttcatggatgtcccgatctgcggcggcgagcagattcgataatgcccattgcaacgaagtcatgcctttggactcggccgcttggtcgattctggaacgttgctcttaggtgagtctcatttcaaaacgactgttcttgttattctctgtagtcatactcctgttgtacgacttttgtacggacacgattggtgtgtgcgggatgtcgattgcgatggccatgtgggctcctttgcttggtctgttgtggttccagcttccgaaccggtcttccactgttcctcgtcttctcgagcaatgaacatctgatatatggattgtcgcgtcgactgcgtatctctaatccttgcggatgaggagcgggccggtgatccagaaaggttcataccgcagcccgatggtcggctgggcgttcgctccgtacgctcgggagtatgaacacagcagcatcgcaattgcagcagcctcagccggcatcgggaccggcggctcagcctcagcagtctcagcaaccccaacagttccagcagccggcatcgcacacccagcagtgggccccggtcatcgaggcgcacgacctggtcatggactacaccgccagcatggcccgcgcacaggcagggcacggcgtcaccggcgtgatgccagccggcacgggagccggttatgcgtcggcgaatcccgctgcggccggaccgggtgccattcaggccggccagccagcccagcccggcttcgccatgccgaccatgcacacgctcgccctgaaccacgtgaacttcacgctccgggagggtgagacagtagccgtgatgggcccgtccggctccggcaaatccactttgcttcacgcgttggccggcattatcaagccgactgccggcaccgtcatcttccgtggtgccgacctgagccgcatgagcgacgccgagcgcaccaaactgcgccgcaacgccttcggcttcatcttccaatccggccagctgctgcccgaactgccggcggtcgaaaacatcgccctgccgatgatgctcgacggcatgccctaccgcaccgccaccgacacggcgatcctgtggctggaacgcatgggattgcgcgcgctcgccacgcaccggccgggggagatgagcggcggacagatgcagcgcatcgccatcgcccgtgcgctcgccgtcaaacctgccgtggtcttcgccgacgagccgaccggcgcgctcgaccaagccaccggccgcgaggtcatgggcattctcatggccgccgcgcgggacaacggttccgccgtggtcgtcgtcactcatgatcccaacgttgcttcgttctgctcgcgcaccgtgaccatgcaggacggccagctgggaggcgtacgatgagcgctttcgcattgtggcgattgttccatcgccccggctcgcgtggcagtgcgggtcatacttcggtgttggccatcattgcttttgccgcagccaccactatctttctcaccgttttgggcggcgtgcatgggttcatgtggcgcgcctccgccgaccacaccattggatgcgcaatcaatctcgacgcttgcaaacccggaacagcggaaatctggaagcagcgtatcgccaatccccacagcctggatcaatacgccacggcatacgtcgtgctggcgttatttgcctgcctgctgctgattgtgccgttcgtggcgcttgccggttccgccgcgcgattggctgcgtcccgtcgtgacgctcggctcgcatccctgcgcttggcaggcgcgaccacggggcaagttattcgccttacggcgcttgatgcggctgggcaggccttggtgggggcgctgattggcatcgcggggtactgcgtgttgatccccctaatcatgttgctgcatttccagaatcagacgtttacgttcgagcaactgtgggtggggccgattgccttgatcattacgcttgttggcgtgaccgtgttggcgctgatctcttcgctggtcacgcttcggcgcgtggccatcacgccactcggcgtcacttcacgcgttgcgactacgctgccgtccggctggcgtgtggtggtgttcgccgtcatcatggtgattgccgttcttctgttcaagaatccgatggtgctggctcaggccggtgaagtagtgatgtacggcgtgatcatcggtttcatgctgctgtgcttcgcgctggtgaacctcgtgggctcctgggtggtcaccgctcgcgccaaggccaaggccaagcgccccaaggatgcggccacgatgattgccatgcgccgtattctcgacaatccgaagcgcgcctggcgcaatgtgtccggcattgcactggccgtgttcatcgccggcatcacctcgatctgcggattctttggctcggccgccgtggtcggtgacgccaacgacccgtccaccgtgttcattcgcgacatcggcaccggcggcatcctgacgctagtgttcgccgctgtgcttgccgcggtcagctccggtgtgatgcaggccggcagcgtgtacgatcaggccggcgaatatcgcatgctggtgttggagggcactgatgtcaagaccttgaaccgcgcgcgattcatcgaggtactcaccccgctcaacatcgtggtgatcgtggccggcggctgttccatgctgcttatggcccctctgttcgccgcttcgatgaccgaaccggccacgctggccagcttcttcggcgggcttgcgctgtgctatgcgctggtttccatcggcgcgttcgcgtccaatcgggtggccgccagcttgaatctggccgattatcgggccgatgactgaggcggtacggtactttcccgggtgacgacactggtggggaggatgacgtgcatatcaccctgattgcccttgcggctgtcgatgatcatctgcacggcgcgttgggctatttcgctgaacggctgatgcacgctggtcagggagggcatgagttggccggcggggaaaatgtcgtcgaaccccatgacggacaattgctttggcaacgcgatcttatgctctcgtgcggcacgatacgtgcttactgcagataagtcgttgcagcaaaaaatcgcggtgggtcggtcggtgagttccagcagccggcaggctgcttcatagcttgtttcggcggggaagtagtcgccctgttcgatataggactccggcagatccaccccggcctgttgcagagcggcggtgaatccgctatagcgcgcgatgctggtctgtaggttcgccggcccccggataacggcgatgcgtcgatggccgagcgacagcaggtgtttgccggcctggtatcctgcggtccagttatcgatggacacgctcatcacatccgaatcgacggtatcgattgggtcgatgatgaccacgggaatactgcgcgatttcaacaaagacttcgcttgagtggtcagaccgcccatctgctgcataatcacaccttggggatttctatcgatgatgccgcggaaacagtcttccgtggcatcgccatggttggtctgggtgaccgtgatggcgaggcccgcctgctgcgcccagtatgaggcgtatttgatgagttccatcgtgccgttgtgctcaatgtattcgacgacgagctctatggtgggggagagtttggtgttgaccagaggccttgagtaaccgtgatctttgaggatttgctcgacttgtctccgcgtctcgtcggaaatgcctgacctgccattgatgactttggaaacagtggatgcggatacgccggcgatttttgcgagctcgccgaccttgagcttgtgggtggatgtatcgttaaccatcggtgcttccctcttggatattcgccgttcaattactgagacgatttcgtcgttgttcccaccattatgacgcattgtgccgtaacaattccgtgttttcttgccctttgtccggccttgaataaaaattttcgcaaataggcttgcaaatttctttattcggacgtacgatatagccgttggttcacaccaggcgaaggagcccgaacacatgagtaccatcaccaaagtcaagacgtatgacttccgattccccacttcaacgacgctttccggctcggatgcaatgaaccccgatccggattattcctctgcgtacgtggagatttccaccagcgccgacgacggcatcacgggtgtgggattcgtgttcaccatcggccgtggcaacgacgtggtttgcaaggccatcgaatcgatgtcgcaggtgctgattgggcgcaacaccgaggaactgctcgacaacatgcgcattgcatgggacctgttcgtgcatgattcccagctgcgttggcttggccctgaaaagggcgtggagcatatggccatcggcgcggtgctctccgcgttgtgggatatcaaggccaagcgtgcgggcaagccgttgtggctgctgctgggcgagatggagccggaggagctggtctccacgctcgatttccgctacatgaccgacgccctgcgccctgaggaagccgttgcgattctcaaagagggtcagaagggcaaggccgagcgtatcaagcatctgctggaggtcggttaccccggctattcaaccgctcccggttggctcggctactcggatgagaagatggtggccctcgccaaggaggagacccaggtcaagggcttcaagcagattaagctcaaggtcggccagaacatcgacgacgatctgcgtcgcctggccaaggcccgcgaagccatcggccccgacgtgcgcctcgccgtggacgccaaccaggtgtgggatgttcccaccgccatcgactggatcaacaagttccacgacttcgatctggcgtgggtcgaggagccgaccagcccggatgacgtgatcggccacgccacgattgcgcgcgccatcaaccccatcaaggtggccaccggcgagcagatgcagagccgcatcctgtacaagcagtatctgcaggcgaacgccttcggcatcatgcagatcgacgccacccgcgtggccggtccgcaggagatcgtgctcgaatacctgctcgcgaagaagttcaacaagcccgtctgcccgcacgccggcggcgtgggcctgtgcgaggccgtatgccacttcgcgatgttcgattacgtggccgtgtccggcacgatggacggccgcatgatcgaatacgtcgataaccagcatgaacatttcgtccacccgaccgagatcaaggacggcaactacgtcgctccgaccgctccgggcaacggtaccgaaatgacgctggagacggccgagaagtacctgtatcgcggctgaccgcaactggaaattcataactgaacaacacaacttaacacaacaacacacaaccactccggctggggtgccgaagccccggccgggcgtgacatggaacacccatgaaacgcagaataaggatggacgaaggagttcccatggatctgcatctcgaaggcaaagtcatcatcatcaccggcggtttcaaaggcatcggcaaaggcatcacgctgcaactggcccaggagggggccatcccggtggtgattaatcgacccgacagcgctctcgacgagttcaagaaggatatcgagcagtacaccaccacctatgatgtgcacttgcttgacctcaacgacaccgacaagatcgccggcgtcgtcgaagcaacatacaagaagtacggccatatcgatggcattgtgaataacgccggaaagaacgacaacaaggatctcgagaccactacttggcgtgagttcgaggaatcgcttcacggcaacctgactcactattacgagctggtccacgcggccgtgccgtatctcaaggaaagccgcggatccatcgtgaacatctcgtccaagaccgcgcttaccggccaaggcaagaccagcgcctatgcggccgccaagggcgcgatcctgggcctgacccgtgaatgggccgccgcattggtgcacgatagcgtgcgtgtcaacgccatagtcgtctccgagtgctggaccccgctctatgccgattggatcaagacctttggcgatgaagcggcccagcaggcgcgcctgtcggtgatcaccgacaagattccgctggaacatcgtatgaccaccaccgaagagatcggtaatgaagcggcattcctgctctccgaccgctccagccacaccaccggtcagtgggtgtacgtcgatggcggctacgtccaccttgaccgtgcgctgagctgacaagcagccctttcccgaatattcgcgcggcaattccggagctttgatcattgctccatccgtacgccgtatccgcgtatgccgcccgtatcacccgcgccctgggtcatccgtttaccaacatggcccagggtggtccacttctcgctaggcaatatcggggaaactcgtatcactaaggagtcaatgatgacatccaaaaacacaaccggttccaaggcgaccatcgccattgtactggtgacctcactgttctttatctggggtttgaccatgaacctcgtgaacgcgttgaactcgccgttcgcaaactacatagaactcagcagcgccgaagcgtcattactgcaggtggcctattacggcgcatacttcgtcatggccattccggccggcttgatcgccaagcgtttcggttataagggcggcgtcatctccggtctgctcctgttcgctctgggcgcgttcatggtgattcctgccaccagcatggccagctacggcctgttcctgttcgccatgttcgttatcgcgctcggcgcggcatcgctggagaccaactgcaatccgtatatcaccaagctgggtgatgaaaagggcgaatcgttccgtatcaacatggcgcagagtttcaacggcgtcggcaacatcgttggcccgctgattcttggccagattctcggcaccaccgtcgcatcaggcgagtccggcttcgacgccgctaaggcgcagttcctgaatgatacccgcacgatatacattgtgatcggcgttgtgctggtcgtggtgctcgccgtgttcgcgctgttcaagctgcccacgcctccgggagacgaagaggaggccgcgggcggcgcctcctccgagaacagctccttcttcggcctgctcaagcgcccgcacttcgcattgggcgtgcttgccgagttcattttcatcggcctgcaagtggccggcatggcggtcttctccgcctacgcgctcaagcactggggcgcgggcatcacagccggcaccgcggcgatgatgctttccgtgctttccctgctgttcaccatcggacgcttcgtcaccaccccattgatggccaaattcgatcccgcgaagattcttggcgtatacatgaccatttcagccgtgctgatgttcgtggtattccttggcctgggcaaggtctccgtcatcgcgttcatggtggcgtatctgttcatttccatcggatacccgaccatattctccctgacgctgaaaggtatcaagggttccgcggcgaagaccggttcctcggctttggtgatgagcattgtgggcgccgcgttgattccgctgctgctcggtgtgattcaggatgcggcaggcatcgagatcgccatcctggtgatggtcccgggcttcctgttcgtggcatggtacgcattctggggttccaagatcggtctgaaggaggcctgacatgacactcaacgtaatcgattcccacttccatatctgggatccggatgcgcaggatctgccatggctggcaggattgccctcgctgcaacacaagtacacgattgaagacctagccgcacagtacgccaaatttggcgtgaatttcctcggcggcgtatatgtggaggttgacgcggccgatcacgagcttgaggaccggctgctgtacgagaatgcaagtcctctgatcttgaagcgcatgctgcaggggcgggtaagcccttggatgcgtgtcccgatcaacgccgatggcatcagggaaccgctgcatgtggattccgagccgcggggccgtgcgctcgaacccgaattcatcgccggtctacgcgcgatggccgccaagggattgccattcgagctgtgcaaccggggcccggaactgggcgacatggccaaggcgttctcgcaggttcccgaagtgacggtcatcatcgatcatctcggcaacgtgcccgggcttgatgaggaatcgtgcgccgcactcgcagcgttggccgaactgccgaattcgtatatcaaggtttccggcgacaacccggtggacccggacatcgtgaaatacgtgcgggacacattcggcccgaagaaggtgctgtacagctccaactggccggtcgtggaactcaactcgacctttgccacgcacttccaactcatgctggacacgttcggcgaggacgaggacttcttcgaaaacaacgcccgccgcgcttacaacatcgactaaacccaagccccctctgatgagggggctatcgtccgcaggacgactgggggagaggccgcaaacccggtgccgcttgtgcggcacccctattccgtaacgaaaggaacaatcatgacgagcagcgccgaattctcaggcatcatctgcccatccatcaccatcaccaaggacgacggtgacatcgactatgaacgttgggggcagcatctcgatcatctgatcgaggccggtatcaacggcgtgctggtgtttggcagcatcggcgagttctatgccttccctctggacgtcaagaagcaggcggtcgacttcgtggccaagcatgtcgccgggcgcatcaaggtgttcgcgggcgtgggcgataccaacttgaacaatgtgatcgacttcgcgcgggcagtcgaagcaagtggagtggatgcgctcgtggtcgtttcgccgtattacttcggccctactgcgggaggcgcgaaggcgtacttcggcgcggtcgctgaagcgacgaatcttccggtgatcctctataatttcccaccgcgcaccggcagcgacttgaccccggagctcgtggccgagcttgccgccgcgcacccgaacatcgtcggcatcaaggacacggtcgacacaatcagccatacccgcaaggtgattcgcgcggtcaaggccgtgaatccacggtttgcggtgttctccggtttcgacgagtactatctcgtcaaccgcgtctccggcggtgatggcgtgatctgcggcatgaccaatgtggagccggagaccttcgttacgctgcaccgtgcatatgaggccggcgactatggcaccgcaattgaggccgccgaacgcatcagccacctgatggcgctgtacgatcagaccgacctgttcatctccgccatcaagggtgcggtcaaggccaagggactgaacatttccaccctgatccgtgagccagcggtgcaactcactgctcagcagtatgaggcgattaaggcgattctcaagtagtgtatatctcaggcttccgcggaatcctacggtggatttcgcggaagtttttttacggtgattacagttgccggctcagctcagcagcgccgcgatgatcgcgataaacaccgggctggtcatggtgctcatcagaatgccgtcgcgcgcgaaggtgaggcccacgttgtagcgggccgcgtagttgtacacgttctggccggtgggcagagcggcgagtaccacgcaggcgtacagctcggagccgcggaagcccatcacgaaataggcgagcaggaacgcgatgattggcatgatgatgttcttgaggaccgcgaccgtgaagatggccgggcgatcgcccttctgctgcagcggcttggtgccgtgtagggacatgccgaacgccatcaggatcattggcaccgctgaatcgccgatcatgtcgatcgggtcgaaaatgaatttcggcactgggaaccagccgcttttagcggaaatcgcagagaccacaatgcccagcagcgaaccgataagcagcggttgatgcagtggctgcttggcgatttccttgatggagaccttgcccttggtggtcacgtccagcactgtcaggcccaccggtgtgaagatggcctgctgcatgaccagaatcggtgccaccagagccggattgcccagaatgtaggtggcgattggcaggccgatgttattggaattgaggtacagcgaattcagggtgccgatggtggcgtccggggcgttcaggtggaagaacatgcggttgagcaccaggaacaccacgcctaccagcacggcggagaagaacgccacgataatcgagggatggaagatgtcgaagatcggttccttggagaggatggcgaacatcaggcacgggctcgatacgaagaaggagaaccggttgagcaccatctgagcggacggcccgccgattcgcattcgtgcggcgacatatcccaccgcaatcacgatgccgataacgcagaagccttgcatggcgctgattagacctgacataatcctccctttcgccaccccagtgtggcacataaaaatgtattcggccgcaaaatctcatgtagtgggtgtgctgggcccgccgcccacgcggtacgctgttcacatgacgcttgaattgaaccgcaccgcatccactgccgagcagctgaacagcctgctcacccagatcatggagaacttctccgtgtccgaccacgagggccccctcaccgacgaggtcgaggccttccttaacgagcaagagcacctgaccgtccgccgtcacggcgacacagtggtggccggcaccgacttcggcgagccgaaccgtgtgatcttggccgggcacctcgatactgtgccggtcatcgacaatttcccaccgaagtggctggagcccggcgattcgctgattcgcgaagaaatcgcccacgctcatcccgaagaccgcgtgctgtggggccgcggtgccaccgatatgaaggcctccgacgcggtgatgctctacctcgccgccacgctcgacggccgcacgccggaaaccaccccgaaagtcgacctcacctacgtcttctacgaccatgaggaagtcgtcgccgaaaagaacggccttcgcaaagtcgtcgaggcccatcccgattggatcaccggcgatttcgccatcatcggcgagcccaccaacagcggcatcgagggcggttgcaacggtacgattcgcttcgacgtcgtgacccacggcgtggcagcgcactccgcccgcgcgtggatgggggagaacgccatccacaaggcggccgacatcctgagccgactcaacgcttacgagccggccaccgtgaacgtggacgggctcgactatcgcgagggcctcaacgccacgctgatttccggcggcaaaggcacgaacgtcattccggatgaatgccgcgtacacgtcaactaccgcttcgccccggacaaatcgctggccgaggccaaggctctgatgatgggcgcggatgccggtgccgaactcggcaatggcgagcatgtggccactggcggcgtgttcgagggctacggcatcgaaatgaaggacgaaagcccctccgcgcgcccgggcctgaacgccccgctcgcccaagatctggtccgactggtcaaggagcgcaccggccgcgacccgttggccaagctcggctggaccgacgtggcacgcttctcccagctcggcatcccggccgtcaacctcggtgccggcgacccgctgctggcgcacaagcacgacgagcaggtgcccgaatccgacctggccgccatgaccgcaattcttgccgactggctggtctgacacctctctagctcccctctctgaggggagctgtcaccgcagggaggggagccgagagaacgtcagcctcgccgggccacgcccgcacaaaatatgtggcatactaaaggatggtggttctgcataaccatcagcgtgtgagatggcgtcgatccccttgcggctctcgagaatgagacaacgcaagcgccggtgtccgccacccgcaggacagacttgagacgaagttgcctttacgcggcgcgttttcgcgcggccacggtgagagcgtggtgtgagccaagcgtataggcctggaaataggcgtcgtgatgcagcgcgccgcgaggagcattgtgcccactgacaaccgtgaaggtttcgtcaacgacggaaccgataattcaaccgtatccaatgccgattcggctgcagccgtgaacgctgcgcctgccgccgcctcccagcccgtcgaacctgttcgccgtcgtcgtggcggccgccgcgtggtccgcggcaccggtgctgccggcgcctccctggaactgcaagtgcaggaacgcaccccgctgttcgaagcccccgcgcttcccaatgccagcaccgcggccgattccaagtcatccgattccggcgattccgatgaatccagcgattccaaggattccgccgaacgtccaacccgccgccgtacgcgccgcgtttccacggccgacgatgccgccgaaacgccgcgtcgcacccgtcgtacgtccgccgcatcttccagcgataccgatgatgacgacgagactccgcgccgtccgcgccgcgccgcttccgcagtggccgacttggatagcgaggatgatcgtccgcgccgttcgcgccgcacggtcagtgccgatgatttcgatgacgatgccgccccgcgttcccgccgccgttcagtcgtggacgatgacgattacgacgaggaccgttcggttcgccgccgctctcgctcccgccagtccgacgatgatgactacgaggatcgcccggttcgctcccgcctccgccgtgcgcctatggatatggatgatgatgacgaagaccgtacggttcgccgtcgttctcgccgtgcagttgcggatacgcacgaggacaccccggatgagcgcctgttcgacgcggtcgaatccctgccctctggccacgagaccgtgcgccgtggcaagccgatgacgtccctgctgttccaggaaccggtgctgcccgccgccgtggatgcgcacgataccgctgacactcgtgatgacgatgttgacgccgacgaacgcccgtctcgtcgctcccgccgctcgcgcagccacgacgatgacgatgcccagccgcgcagccgtcgccgcgacgatcgcgacgaccgcggccgcgcctccgccgaccgtgacgcttcccgtgacgccgcgtccggcgataccaacgccgatcacgacgatttcgacgccgacgacacctcggactcccgccgttcgcgccgctcccgccgtctgaacgcccaggagcgccgtgcagccgccgaagtcgagcagattgaggaagacctcgagctggacgatatcgcctactcgccgattgccgaggaggaaggcgacgaggaatccgacgtcacccgcacccgttcgcgccgtcgccgccgtcgtggctcacgcggcgaaaccggtgccaacggcgagcacgataccgccgagaacgatgccgaggatacgcgttcccgccgtcgtgacgatcgcgatgatcatgaccgtgatcgcgatgaggacgatgaggagcagaccgtcactcgccgtcgccgccgccgtcgtggcggcaagaacggcgagggcaccgacgaccagagtcagaacagcgaacagccgctggtccgccgctcccgcaagcagcagtacatcgacgaaatcaccgatgtggaaggctccactcgtctcgaggccaagaagcagcgccgccgtgacaaccgccgtgagcgcagccgccagagccagcttatggaacaggacttccttgcacgccgcgagaacgtggaccgcctgatggtggtgcgcgagaaggaacaccacacccagatttccgtggtggaagacaatgttctggtcgagcattacgtctccgacattcaggaagtacagaccgtcggcaacatctatcttggccgcgtgcagaacgtgctgcccagcatggaggccgcattcgtggatatcggccagtcccgcaacggtgtgctctacgccggcgaggtcaactgggatgccgctcgtctcgaaggtcagccgcgccgcatcgagctggcgttcaagtccggcgacccggtgctcgtgcaggtcactaaggacccgatcggccacaagggtgcccgcctgacctctcaggtcacgcttgccggccgcttcctggtgctcgtgccctccggtggcatgaccggcgtgagccgcaagctttcggagcgcgaacgcagccgtctgaagaacatcgtctccaagatcgccccgaaagacatgggcgtgattatccgcaccgcggccgaaggcgcatccgaagacgccatcgtcaaggatctcgaatcactggtccgccagtgggagcgcatcaacgccaagcgcgaggaattctggcacggcaagcgcccgaaactcctgcagggcgagcccgacgtggccatccgcgtggtgcgcgacatcttcaacgacgactttagcaagctcatcgtggaaggtgacaaggtctacgaccgtatcgaggaataccttgacaccatggcccccgacctgaaggacaagctggagaagtgggacccggccgagcacgaaggcaaggacgtgttcgacaaatggtccatcgactcccagctgcgtaagggcatggaacgtcaggtctacctgccgtccggcggctcgattgtcatcgatcgcaccgaggccatgaccaccatcgacgtgaacaccggccgctttatcggcaagggcaagtccttggaagaaacggtgacgcgctgcaacttggaggcgtctgaagagatcgcccgccagctgcgcctgcgcgatatcggcggcatggtgatgatcgactatgtggatatggtcatgcccgccaaccgcgatctggtgctgcgccgcttggtcgaatgcctggcacgcgaccgcaccaagcatcaggtggccgaagtcacctcgctcggtttggtgcagatgacccgcaagcgcatcggccagggtctggtcgaggcgttctccgaggaatgcccgacctgcaagggccgtggtttcatcctgcatgatcagccgaccgtttcggccgactacgacgatccctacgcgcttcgcggtggcgacccgttcgtcaaaaccaacaagcacggtcgcggcaccgctcccgctcccgaaccggctggttccagcgccgacgtcaaagccaaactggctcagattgccgccgctgccgtcgccgccaacaatacggcggaagagtaacaggtgtgtcgtgcttgacacgcgggcaaaaatcatttgatttagtccgcatggtggtgtaaatttgaaactcggtgtctgaccgcaggctcggtgcgtgttaggcaaggtagctttccaaaacataaaaggaacgataatgtacgcgattgtgaaggccggtggccatcaggaaaaggtcgaggttggcgacgtcatcctcgtgaaccgtctcgacgccaagaagggcgataccgtggaattcccggtctccctcgttgtcgatggtgacaaggtcaccctcgccgccgccgatctggccaaggtgtccgtcaaggctgaggttgtgaacgatgaagccaagggcccgaagattgacatccagaa

SEQ ID NO: 3708 - DNA, 5245 bp, Unknown
  R150_10m  MAG No. k141_7760
aacggtgattacggcaacgcctatgccgccggccagtgcacgtactgggcgtatgaacgccgtaggcagatgggcattggcacgccgtcctatctcggcaatggcggcgactggtggcgcaacgccccctcgtacggcttgcgcgtggaccacaaccctcaggtcggtgcggcgctctccttcctgcctggtcaggatggtgccgacggtacctatggccatgttgccgtagtcgaagccgtgtatggcgacggcacattccagatctccgaaatgaactggggtggtccgtggaacatgcacgaccgcaccttgaccaatttgggtcagtactggttcgtccactgaccggttggttcggccgatatatgcggttgaagggttcctcttgaagaggaaccctttttcgtattcgaggccggtccgtgatatcgtcggatgttgcgttgctacccacgagttgctactcacgagttattgcccacgaaaggaggagacatgcccaaggaaaccggtgagaaactcatcgtccagaacaagaaggcccggcatgactatgccatcgaagacaagtacgaggcagggctggccctgaccggcaccgaggtcaagtcgttgcgcgaaggccgcgcatcgctgtccgaggcgttcatctccatcgaccgccgcggcgaaatgtggctggagggcgcgaacatccccgaatacctgaacggcacatggaacaaccatgcgcccaagcgcaagcgcaagttgctgctgcaccgactgcagatcaccaagctcgcccgcggcatcgaggccaagggatacacgattgtgccgctgagcctgtacttcaaggacggtcgcgtcaaggcggagatcgcgctggcccgaggcaagaaggaattcgacaagcgccaggccctgcgcgaagagcaggacaagcgcgaagccctacgcgccatgcgctacgccaacatgcgccactagtcccgccccttggctcccctccggaggggagccaagggtaggatgtccgcgttgtgggtcatttcgcccacgattaacgcttccgtagcattgcactcctacgctctggaaccatctgggaaacatacccgcccagctgactatccggagagaggaaatccaatgtctctaagcaagggaatacaatccgctgcggccgccgccctgagcgcggccatgctgatcgccgtggcggcctgtggcacgactgacagcaccgacaccgcatccaagagcggcgattcatccaaggactcgtccagcacttcgattcaaggcttcgacaccagcagcatccagaaggacgacgagattgccgcactgctgcccgattccgtggccggcgacggcacgctgaccgtcggcgccgatacttcctatgccccggccgagttcctggccgaggacggcaagaccccggtcggctttgatgtcgacctgtccaaggcgctggccgcagtgttcggactgaaggaaaacaccgtctcctccacgttcgattcgattatcccgtccgtcggctccaagtacgacatcggcatctcctccttcaccgtgaccaaggaacgcatggaggctgtggacttcgtgacctacttcaaggccggttccacgttcgtggtgcagaagggcaacccgaacaaggtcgactcctcgaacctgtgcggcgtgaaggtggctgtgcagaccggtaccacccaggaagaggaagtcaacaaggataacgagcagtgcaaggcggacggtaaggatgccatcgacatccagtcctccaagctgcagaccgatgtgactaccgccgtggcttccggtaaggctgatatcttctacgccgatacgccggttgccggctacgccatcaagcagaccggtgatacgctcgaggccctcggcgaggacgttggtgtgacccctgaggccgtggccgtcaagaagggcgattccaagaccgccgaggccgtacagaaggccatccagaagctgatggatgatggcacgtacaagaagatcctcgacacgtggggcgtctcttccggcgccgtcgacaaggccgagatcaacccgtccgtcgagtagtttcggttactatgaagactcccgttgccctgcggcgggagtctttttgtatatgtatgcactgtagtgtataaatatgcttaaccgttgatcgttgccgttgaagcggcgtaagagagaagaagaaacgattatgcagtccaccaaactgaagtccattatggccattgcactgagctcggccatgctgttcgccaccgccgcttgcggcgcctccgacaaggccgatgctggtacggattccgccaagggctccgatgccgccaccatcaccagctacgatgtcagctccgtggagaaggatgacaccatcgccgcactgctgcctgaatccgtgaccaaggacggcaagctcaccatcggcaccaacccctcctacgccccggccgaattcctcgacgccgacggcaagacccagatcggctacgacatggatctcgcccgcgccatgggcaacatcttcggtctcgagaccgaaatcgtctcctccaacttcgatacgatcattccggccatcggctccaagtacgatctgggcatcgccgccttcaccatcaccaaggagcgcatggaatccgtcgacttcgtctcctacttcaccgcaggcatgggctatgcagtggccacaggcaaccccaagaacgtcgatgagaacgacctgtgcggtctgaacgttgccgtcgagaccggcaccgtcgaggaagaggccatcaacaagaccgccaagcagtgcaaggcggacggcaagaaagacatcaccatccagtcctccaagcagcagaccgacgccaccaccgctgtggtgaccggcaaggccgacgtcttcttcgccgattccccggttgtcggctacgccatcgcccagaccgatggtcagctggaacagctcggcaaggacttcgatgaagtgccgaacgccatcgccatcaagaagggcgattcccagaccaccgaagccgtgcagaaggccatgcaaaagctcatggacgacggcacctacaccaagatcctccagcactggggcgtcgaatccggcgcactggacaaggccgaaatcaacccggccgtcgaatagtcgacaagctgtcgcgaaaattcgaatggggcgcactgtttgtaacacagtcgccccattcgtgcactaaggttcaacgctagttgcaacttgcagttcaggctgcccaacacatccaaggaaccagattatggcgaagaaagaagtcgacggtgagggactgaacatccccaaccgcatcaaggcgttgccggtcaagcgccccggcccgattgtggccgcagtgatcgtggtactgctcgccgcgatgctcattcaaggcttgattaccaatccgcgactggattggcccaccgtctggaagtacctgttcaacgagaacgtgcttgaaggcattcgctataccttggagcttaccgtgatctccatggtcgtggcgatcatcctgtcggtgattctcgccatcatgcgcaaatccatcaatccggtgctgcgcggcgtcagctggttcttcatctggttcttccgcggcacgcctgtgtacacgcagctcattttctggggtctgttcgccgtgctgattcccaagatcagcctcggcattccgttcacctcggtggagttctggagcatcgactccaacgtggtggtcaccgcattcaacgccgcatggattggtctggccctgaacgaggccgcctacctgtccgaaatcgtgcgtgccggccttgaagccgtggaccccggccagaccgaggcggccaaggcattgggcatgaaccgcacgctcatcatgcgccgcatcgtgctgccgcaggccatgcgcatcatcatcccgcccaccggcaacgagaccatcggcatgctgaagaccacctcgctggtcaccgccgtgccgttcaccctcgaactgcagttcgccaccaacgccatcgccaaccgtatctacaagccgattccgctgcttctcgtggcctgcttctggtacctgctgatcacctccattctgatggttgtgcagtcccgcctcgaggcgcacttcggcaagggcttcgaggcccgaccggtgggcaccaagggcaagcagacgccattgccgggtaagaccgacggtgaaccgaaggatgacgtggacaagctcaaccagaccacatttgtcggattgaatgcataaggcgggagcgcgattatgactacgaatgacatcaccagtgttgccccggtcgtgcgcaaggcggctgacggttccgtgattcctgccgtcgaggccgtgcaggtgcacaaggcgtttgggccgctgcatgtgctcaagggcatcgatctaaccgttatgcccggtactgtgaccgtgattctggggccctccggttccggcaagtccacgttcctgcgtctgatcaaccagctggaaaccctgaccggcggttccatcgaggtggacggcgaactcatcggctacaagcacgtgaccaaaaacggccaggacgtgctgcagaccttggacgataaggagatcgccgcacagcgctctcgcctcggcatggtgttccagcgcttcaacctgttcccgcacatgaccgcgctggagaacgtgatggaagccccgatccacgtgcagcaccagtccaagaaagccgcccgtgacctggccgtggccgagcttcagcgcgtcggtctgggcgatcgcatggactattacccctcccagctgtcgggtggtcagcagcagcgcgtggccattgcccgtgctctggccatgaagccggagatcatgctcttcgatgagccgacctccgcccttgaccccgaactggtgggcgaagtgctcaacgtcatgcgttccttggccaaggaaggcatgaccatggtgtgcgtgacccacgaaatcggcttcgcccgcgaagtcgccgaccagatcgtgttcatggacggcggcgtagtcgtagaaaagggcggccccgacatcatcgaccaccccaccgagcctaggtttaaggacttcctacagcacgtgctgtaggaaggctgttatattgcctcagcactgtcgtgcttcggcgtcgcctacggggagcccactgggctccccgctttacggctccgcctacagcatgtgctgtaggaaggctcgttgttgca

SEQ ID NO: 3709 - DNA, 84482 bp, Unknown
  R150_10m  MAG No. k141_7935
aaggtcaccatccgcatggtctacggcttccaccacgcgaacaatcccatcgccctcgtcatgctccgccgcggcggactcgacatacgcccaccacaaccaagaacccaacccacgaaaacagcagaagcctcatatgtattggacatttctgcgcagagagggaggtgtaaccgcagcattacggtgtgagaacgcaaggttacatagctgggcattggctgtggcgttgctagacattgaccgtcgagccggcaatcatggcgcaagcgacaatcacgacacgccgttattgacataccgccgttcaatggtattgtaattacttgtgcgcttttgaagcgtatggatcgggcccgtagctcagctggttagagcgcatccctgataaggatgaggtcggaggttcaagtcctcccgggcccacagaaaaaatgaagcggctgcgagccgctctttttttctcacggggctatagcgcagctggtagcgcatctgctttgcaagcagagggtcgccggttcgaacccggctagctccacagacaacccttggaataataccgattctgagggtttttgcgttcttgttcgagggattctcccagtgcgccatggccctctccatcgaaaaaggggtggtcctgttaaggaccacccctcgaggattcagaccaaccgcgtggtcattgtcgctccgtcttcacggaacggtacacgaaaatccttcgccttgcggcgatatcgcccggacccggaggactacaccttcctctcgggtggaaggtaccggcagataattggctcttccggttttggtgtgtagggggatgcttataggtgggcttgtatggtgtgtctgaagccgccggtgtggaggaggctgcgggtcacgccaaaaccggaagagccgttttcttttccttctccggtggtttcgtcgttgaccgtgttgccggtggcttccttgcaggcttgtttgtaggcttcggctgggctggtgtggtggagggcgcggatgcgtgcagcggcgtgttcgatgtgttcgagcgtggcggatggcgcgtcggtcaggccgtggcgggcgaggacttcgttgcgccacgagtcgtagcgttgctcgcgcaccacgcgtggcttcctccgccccctgacccatgcgtcggcgtacgcccaatcgccttcctcgtagatgtcgcgtgcccaggacgccgtcggacggtcgaacgggtaggggcccgccggcagcggcaacttgtcgaccgtcgggtcgaacacagtgaatcgtcgccgttccctcgcttcgcgttcccgttccggcgctgccagcgcctccgcgacgtccgagtggaacgcggccatgcgctccttggcgccggaggacgtgaacccgtcgtcgggttcgcgcagtccgtgctcctcgagcagcgggtggatgtcgtggtccatgagccagcggagccgggacatgttgaacgcgaggatgaatgcgagcgagattgcgaccatgaggcccatcccggcccccatcagcagtgtgctcatttcagccggctccagcgttcggcgcccgcgcgcgggctgaaacgtccccgccagtcccacggtccgacgaaacgcaaggccaacagaatcggggagcatgtggcgaggaacgcccagaagaaagccaaccatccaatccagtcaggtgtggatctgccggtgtcgacccattgcgcgctcgaccagaacatccatgtcatcgctatggggaagcccgatatcgcgatgaggaacagcgtgccgacgatggggccgccgaacatgtagcgcagcttcgtggcgggcacggaggaggcgaatgccaagtcctccagcgaggcggggacgtaggtgttcggccggccgaacacgagccggcagaaaccccagtacaggaggagtccggccagccacatcacggcgaccgccacgtacgtgttccatgcgtcgcgggatatagtgaccggtctgagaaaagccagcagcgtcacgtcatcggtatgcgtgtggtgcgtcttcgtgtccggggtgagcagccgggcgatgccgtggatcatgaccatcaggccgggcgcagccgcggcggcagcgccgccggccgccgcgccagcccgcgcccagccggaatcgccgccgaaatccagcttgcgcttgaccggcgtcttctccagcgtgtcccagaacacctgcgccccgtcctcaagacgccccaccaacacataccgagtgaacaacgccaacagatacccccacttccaaaacccgagattatccttgaaatgactgcccgggtcatctccaccgcctctgtgcacctgattgtcgtaaagtgcgtctaagccgctacttatcagccatccggctccagtgccaatcgccgttccgacaaatgcgccgaccacggtgccggcaccggggacgatcgatccgacgaccgcgcccacggcaccgccaacggtcccaccgaggccatcaacggcaggcccgagaccctacgcggcatcgccctcggcttccgcaacctcgacaactacgtcacccgcagcctcctccacaccggcggcttcagacacaccatacaagcccacctataagcatcccctctacacaccaaaaccggaagagccggatgattccctgcaagccgatcacgccaatccgacccgacgactaatcagattgaggacggctgaattaagcttgtgccctcatgatacaacatgtcctgcgaccgacgccagacacaacggcagcattctgcccaccatagggcgtgtctttaaccagaaagtaccctcaaatacgttcagcaagatatatgcacgcagaacagcccttccgcattatcttatttgacatagagcatgccccttccattccacagaatcaagcaaataaacgagcggagagactgggcacaccgcaaaacaatggcccaacccctccgctcgtttgttatggaaggaagagggatgaataagtatgtttacttcactgacttgatgaagacgatcagcaccgcgccaatcagcgagcagaccgctgcaagcgggaagagtgcgtgatagcccaccgaggaaattagcgccgccgcaacatcccacgcaccatattcaggacaaatccagtccgttgttgtccttggctttgctcaccatatcagtcaaatcggggtcgtccacagacaccgcgttctgctgactgagcgtcaacgatagcgagccattataggagtcgccgtattcgtccttgccggacacgcttatggcaatcgaattcatcagacgctttctgccgtagttcagatccacggtgatagtcggcatctccggctcttcatccgtgccgaaatcccagttgcgcacattatcgagcgcctgacggtactcatcttcagcatcgtccacgccggcatcctcgatttgctgaatcacccaggatttcagatgcggatactgcgcttcatgactgatccagtaattcacgaaatgctgagacaacgctttgatatcgatttggtacgacagctgcgtattgccggcagacttggcagacgatgtcttcgggaacagctggctgcgcacattcttatcttccagctccacgccgaaatattgttggatgaatttgctggcctcggccttcacctcggcagacgttttcgtgcccttggcccggtcgatgtcgttcgagtacccatcgtcgttcatcttgtccagctgatcgtagaacgtttgctccgcgccggtgatgtcccaagcaccgttcttgaccaacgcatccttgacgttcaatatcaagtccgccacatcactaccaacgccgttccttaagtcatcttcatattggtcggccgggcagtagatgtagtaggggtcgtcgtcatgccaaacgaatttctcggcgaatgcgcctttgtaccaagcgaaggtcgttgcatattcgtctgttttgctagtgaaggacgcggaggattcgttggtggttttgcccagcgaatacatgccagacatccgcacgtcaagagaatcgtcagtgatgctgtgggttctgagttcgtatttggtgctgcgcagagtggacagcgagttgatcgcgtcgaaggtgacgaccagcggattggtgggccggaagcccagcatcgctttgacggcggtgaagttggggatgatgaacgccaaggccgccaccagaatcgtcgcaagcaatgcgcagaaagcggcgatcagcttcttactggatttgcgctgcggtgccaggacggcggttgcatcagtcgcctgatatgcggcaggagcgggaatcggcaaagccggcaggggaacggttggtgccggctgtggggcagcggacgcggcgtaaaccgatggggcaaccggcgcggctggtatcgatggtggtaccgcagacgccggcacagcaggtgccggtatcgacgcaggcggtacggctggcgatgcggccggtactggtgccgtcgcaactggtgcgctgtctacagacgctccacatgccgggcaaaatcgtgccggcccatcaactctatttccgcagtggccgcagtacgccatcgtgtgcctctctccctcaaatcggcttgattgccatcgcttcaatgttactcttcagcattacgcctcagccagcccctacgcgtaacgatacgagacgcggcagccttaatgcggttgttttgacacgatgccaacatcgagctctggccaacgttctggtactcggctacatcttgctgcgagccaagaagcaggccatcgctcgcgccgacgaggccgaatggcggtctagcctcgctttaagcctcaggccagcacctccatggggtgataggtggcggtgtggtggccggtgatggggttccatacccgttcggcgaatgcgcgcagacgggcgacgccctcgcacagctcgtcggcatctccggcgtaggagaggcgcacgaagccgcgcccctcctcgccgaaggcctcgccggggaccacagccacgcgctcttcgtccagcagacggtctgcgaattcaccggagtcaaggccagtcaggcgtacgtccacaaaggcgtagaacgcgccttgcggttcgatcagacgcaataccgggcatccggccagaccgtccagcacgatctggcgcttggcgcggtattcctcgcgcatggcggccacgttatcttgcgggccagccagtgctgccacgcctgcgtattgcgccaaggagttcaccgaggagtgcatgagttcggcgattttgccggtctgttcgatgaccgcttcgggtgccagcaggtagccgatgcgccagccggtcatcgcataggttttcgacaggctttccaccacaatggtgcgctctttcatgcccggcaccgcggcgatcgatggtgccacggctgcctctcccccaagcgtttccccgaacgtttccccaaacacgaacggatggtaaacctcgtcggagatggcccaaatattgtgctgcttgcatacttcggcaatacgcgccagttcggcggcagaggttaccgcgccggtcggattgcccggtgagttgatgattacggcgcgggtgcgcggggtgatcgccgcttcgatgtccgccgcgttcacgcgcatgccgtgctccggacgcagcgccacggtgaccgggcggccgccgcacagcatcacttcggcgtcataggaagtgaagaacggcgagggaataatcacttcatcgccggtgcccaccacggctttcagcgccagaaacaggccaatcgtggcaccgtcaacggcttgaatctcggtttcgggatcataagtaagtcccttcacacaggcggagtaatcggccacggccttgcggtattcggggatgccaagcacgttggtgtaccgagtgcggccagcctgtgcggcctcgcaagcggctgccacgatatgcggcgcggccgtggcgctgggctcccccacggtcagtgaaatcgcgtcaggcacgcgctctacacggtcgaatacgtctcggatgccggagcgcgggatattcagggcttcggcggacaggctcgcgggctcggcggtcggcacagcaacccgaccggcagcaggcatagtagcaggcgcagcagcagatgcaacttcggacagagacatgttggaaaacttctgcatatcatccctcctcaatggaattatttcatcgttctcttatttcaaaaggaattattacatccaattaggactttaaacgtaaacattccaccacacaacagaaaacacaggaagaactactgaaattaccaggcaaaatcggaaagccatcgcattccggcaacaggtacagtgaacacagagcacaacgaacggagaagacatcatgaccgcgattgacgagaccgaccagcgcatcctcaccatgctggaggccgacggccgcgccacgctcgcgcaactggcccaggcgaccggactgtcagtctccgccgcccagtcgcgcgtgcagaagctggagaagcgcggcatcatcaagggatacaaggccatcatcgaccaagagcagcgcggcttgcccatcagcgcgttcgtcaacgtgaccccgctcgactactcagccgaatcctcgattccggacaagctgaacaatatcgacggcatcgtctcctgctattcggtggccggcgcccccagtttcgtgctggtggtgcgcgtggcttcccctaccgcacttgaagaactgctcaatctcatccaccgcacggtgccggtaagcaccgagaccacgatgattctgcagacctacttcgcacactgaccgcgaacccggtaacctgcgcgccgaagacctgcggccacacaccccacaaaccccacaggtcacaaaaaccatacgaccccacggtccagccacaccccacaaaccccacagaccgcacgatccccaacagacacatctgacatcacccaagtccgcctttatgtccactatatgaacgtgcctccggtgtgatgcggcttccatttcgacccgattcacgcatagacagacatccaacaatcgcccgaaaaatctaacaaacggaaacttgagccactccataaccacgccgaaagctttcccgttatccgagcgagactctatgcagcaagggcctgcgcgcatagaataaaaccgtcttaattccctaccaaatcgaggagaatcatgctcactgacgagtacatcaagcgtgtctacgaccaggtcgttgcccgtgacggcgatcagccggagttcctgcaggccgttcgcgaggtcttcgagaccctgcagccggttgtcgagaagcacccggagtacgagaaggccggtgtgctggagcgcatcgtcgagccggagcgcgccatcaagttccgcgtggcctgggttgacgacgagggcaaggttcaggtgaaccgcggctaccgcatccagttcaactccgccattggcccgtacaagggcggcctgcgcttccacccgaccgtgaccgagtccgtcgtcaagttccttggcttcgagcagattctcaagaactccctgaccacgctgccgatgggcggcggcaagggtggctccgacttcaacccgaagggcaagtccgacgccgaggtcatgcgcttctgccaggccttcatgaccgagctgagccgccacatcggccagttcaccgacgttcccgccggcgacatcaacgtcggtggccgtgagatcggctacctgttcggtcagtacaagcgcatccgcgacgagtactccggcgtcctgaccggtaagggtctggaattcggcggctccctggcccgcaccgaggccaccggttacggcgtgtgctactacacccaggaagccctgcgcgtgctgcgcaacgactccttcgagggcaagaccgtcgtgatctccggctccggcaacgtggccacctacgccgctcagaaggctgagcagctgggcgccaaggtcgtcaccgtctccgactccaacggctacatctacgacccgaacggcatcaacgtcgaggtcgtcaagcagatcaaggaagtcgagcgcggccgcatcaaggaatatgccgagcgcgttccgggctccgagtaccacgagggcagcaagggcgtgtggaccgtcaagggcgacatcgctctgccgtgcgccacccagaacgaggttgatggcgaatccgcacagaagctcgtggacaacggcgtgaccgtggtcgtcgagggtgcgaacatgccgtccaccccggaggccatcgaggtctaccagaagaacggcgtgctgtacggcccggccaaggctgccaacgccggtggcgtggccgtctccggcctggagatgagccagaacagctaccgtctgtcttggaccttcgaagaggtcgacgccaagctcaagtccatcatggaagagatcgtcgccaactccctggccgccgccaaggaatacggtcacgagggtgacctgatgctcggcgccaacgccgccggcttcgtcaaggtcgccaacgccatggttgcccagggcgtgctgtgacgcttgcctctgagcagtactaagcagtagcgtaatgcccttgcttcccgtgaggaggcaagggcattgctatatgtacaacgagcaacaagtgctatccccaaatacgtaagcccgataacaacttagcttccacctccataaccccggaactcaccaccgtcgatcagcacatggatcagcgcggctggaccatggccgacgtggtcatcaaagccatcaacggagtctcttcaccgcgcgtgatgcacctgaacaccgatttggtggtgcgtgattcggcgtaattgccacgtggctgtcggcaggactctagataccgcgtcacaatcacccagtaatgcatcacgcagtgtataactcttccgcggaaacgaacaccattcgttcatcatccatgtagcgggttcgcgtggactcactcaccggattcttggtgaacagcataagccacgcattacctgcctgatagccgcggactaagccagcacgctgatggagcttttcaatagcctccgtttcgttgaatgaattacgccatttgcattcaccgaacagaatcgttttatcgagcgaatccgcagcaatcacatcgatatcggtttgctcgtgagcaatcggatcattgccccaccatttgccgaactgagtggcaacaaaggggaggttgcccatagcgttgtttcgaataagccattgcaggcaaatcgtctcaaattgttgaccaacataggtatcaaacgctggtccaaaagcgagtctgctcgtaacctcctcgctgatattaccatccaaaatgctcatgttgcgccccacaaagcggaaccaatatgcaaagaagggatcgctcaccacatacattcccttgcgcgatttactcggatcttcaccaaacggcacttttcgctcaattaagcgcaaatcgaccagcgttttcagatatgctccaatcgaatcagatccgacacccgcatgttcagcgataagctttggcgaggaattaccacccgcaatagattgcaatatcgaataatacgatgccggttcacgaagctcctgacgcaacagcatcataggttcctcacgcagtacgcccaagttgtcgaacatcaagcgcagcacattggattcaaagccatcggcttcctgtatacgggccagataatatggcgtaccgccgaaagtcgcatagtattggaccagttcttgcggagatgtgttcgttaggaattttgccgcatccgcatagtcgaatggcaggagtcgaatctgtgctgtacgacgcccgtatagcgggcttttacgccccaatacgtcgttttccatgaatccctcgttactaccggatagaatcatcgtcacttttgtggcgaggaatccatggtcaattgctatctgcaacatggagggtaatgctggctcggcggcagctgcataagggaactcatcgaatacgaacaccatacgttcgtcagtctgtgcagcacgttcagcaacaaacgataacgcatcagaccacccgccaaacgacggggtggaatccggcataccaaagaacgacaatgccgctcttgagaaatcttcaagattcatcttggcgctttgctgtatggccgtgaagtacagcacgcgtttatctttgacaaattcgtcgatcaacgccgttttccctacacgccgtctaccgtacagcaccaccatttcgaacgaatcactggtaaacagcttttccagcacttgtaactcgtgctctcgtgcgacaaacattgcagccctccgatccgcttaccgcccaataataagagtatcatggttaatgtaatcacgattaccttaattatgatactgataattgttgccctaccgcgaggaggatcttccttccgctgtcaaaacgaaagcccaacagtccagactgacgagcagcaacatcggcagatcaaccgctgacgccagccagcctgacagcacaaatcagcctgattgcaggcatataggcactagttagcgaaaccggctcttcgcattttggtgcgtaggggccgtgcggtttgattcggtgtgtgattgaaaaagtgaatgaaaccgcacggcccctacacgccaaaaccggaagagcccataaagtcccctcagtagcgccaacctgccagtcctttggcggaaccacaccacatagaccttcctcaacggcgccaagctgccacacgctggcagaccaacaccgctgtgtgcattctctgcgtcggcggcagtccaaaacttggcccagcaacgacgcttgctgtgcccagcgtcggcagagggccaagaattggacgcaaacgacacagaacacaccctcagcgtcggcagaactccaagatctgtaccgctgacgacggtaagccctccacagcgtcgtcagagatacaaaacctgtcccaacaccgacgcctgccaccccagcgtcgccggagtcccaagtctcggcccagcaacgacgcctacgaaccccacacataagaaaccgcacctccgatcatcgaatctgaattacttcagtccaacaaccggggtgcggttcactgaggggagttctgccagtatagctatatcagtcgtcgccgagcgtgacgtgcacgccgccgaccagcgagctgaccacgttgtagatcagtgccgcaatggtggccagcagggtgaagatcaccacttcaacaatcgagaagatggtgacgccggagaccacggtggtaagggacaacacgttcttgagatcgaaaccgcctgcatcaagaccggtggaagacacaatctgcgtaatctggctgaatacaccgaccacatcaagcagcacccatacgatcgcggaggcaacgacctgaataatcgccacggcgatggacagcatgaacgtcactttggccacggaccaagcatccacgcgggtcagcgacaagctcatgcggcgagccctgggggcgctacggcgaggtgccggacgcacgggagtggcggcacctgaagaaggcaacgtggattcttccggatcgctggacacggagcgtgccacgcggggagcgtgctcagtaccgatcagcggctcgacatgatcgttctgcgtattgccgactgccggcggtatgatccggggctcgttgtcttcgagattctcgctcatcgtttctccttaacaggcttggcggtagcctctgctgtatgcgaggctaccagcttttcaggacgctgctcacgcctcgtccgcgttgttcacattctcgccggattgtgcggtctcggcggtgccgttcgccgcggcatcgccactgtcctcgggctcgtccttctcctcgttacgggcgatggagagaatcgtgtcgcccttgtcaggcttggcgaaggtaacaccctgggtgttgcgcccggtgcgcttgacctcgtccacgttggaacgaatcaccttgccggacttcatgatggccatgacctgatcgtcttcggacaccacgagcgcgccgaccagggcaccacggccctcgaccagttgcacggccttgatgcccaagccgttacggccctgcagacggtattcgctgatggcggtgcgcttggcgaagccctcgttggtcaccacgaacaggtccttgtcggagtcgccagggaccacatccatggccagcaggctgtcgtcgttacggaacttcatgccctgcacgccggcggtctggcggcccatcggacgcagctgctcgtcgtcggcctggaacttgaggctcatgccgagcttggagaccaggatgatgtcatcctcggcgttgcacagcgcggcaccgatgagctcgtcggcgttctcgccattctcgtcggccatgaggcgcacggcgatcaggccgccctggcgcggggaatcgtactcggccagcggggtcttcttgaccttgccggaacgggtggcgagcaccaggtacttggccacctcgtagttcgggatggacagcacggtctggatggtctcgtcgggcgcgaactgcagcaggttggccacgtgctggcccttggagtcgcgcgaaccctcgggcagctcgtaggccttgatgcggtagacgcggcccttgttcgtgaagaacagcagccaattgtgcgtggaggtcaggaagaagtgatccaccacgtcgtcctcgcgcagcttggtgcccttgatacccttgccgccgcggtgctgggcgcggtattcgtcggccttggtgcgcttgatgaagccggagtgggtcacggtgaccaccacgttctcttcggcgatcaggtcctcgacgttcatctcgccggagaacggcaggatcttggtgcggcggtcgtcgccgtacttggccacgatctcgtcgagctcatcgccgatgatcttgcgctggcgttccggcttggcgaggatgtcgatgtagtcggcgatcttgcgctgcaattcctcatgctcggccacgatcttgtcgcggttcatgcgggtcagcgtgcgcagctgcatggccagaatggcgtccgcctgcacctggtcgatgtccagcagccccataaggcccgtacgggcggtgtcggtgtcttcggaggcgcggatgagggcgatgacctcgtccagcatgtcgagggccttgagatagccctgcaggatgtggtcgcgctcttcggcctcgcgcttcaggtacgcggtgcggcgggcgattacgtcgagctggtggttcacccagtggcggatgaaggcgtccaggctcagcgtgcgcggcacgccgtcgaccagcgccagcatgttggcgccgaaggtctgctgcagctgggagtgcttgtacaggttgttcaggaccaccttcggcacggcgtcgcgcttcaagaccagcacgaggcgctggccggtgcggccggaggtctcgtcgcgcatgtcggcaatgccctggatcttgccgtcgcgcacggcctcacgaatggagacgacgaggcggtccgggttgacctggtagggcagttcggtgaccaccaggcacatacggccgttgatctcctcagtgttgaccacggcacgcatggtgatcaggccacggccggtgcggtaggcctgttcgatgcccttgtggccgaggatggtggcgccggtggggaagtccggtcccttgatgatgcggatcaggttttccagcagttcctcgcggctggcgtccgggtggtcgagcgcccagtggacgccgtccgccacctcgcgcatgttatgcggcgggatgttggtggccatgccgacggcgatgccggcggaaccgttgacgagcaggttcgggaagcgggccggcagcacggtcggctcctgggtcttgccgtcgtagttgggcacgaagtcgacggtgtccttgtcgatgtcgcgcaccatttccatggccagcggggccatgcggcattcggtgtaacgcatggcggcggccgggtcatcgccgggggagccgaagttgccctggccgtcgacgagcatgttgcgcatcgaccaggactgggccatacgcaccaaggtgtcgtagatggcgaaatcgccgtgcgggtggtacttacccatcacgtcgccgaccacgcgggagcacttgttgtagccgcgatcggggcggtagccgccgtcgtacatcgcgtagatcacacggcgatgcacgggcttcatgccgtcgcgcacgtccggcagggcacgctcgacgatcacggagagggcatacgccagataggactcgcgcatctcctgctgcaggtccttgcgctggatgcgttcgccggtgtccatcaggccgtagtcggtggtgtccgcctcctgcgggctcaacggctccatcgagccgtccggcgtgaactgctcgtcgccggtgttgttttcatctgccactgttgttcctttagttgtctaagtccgttgtgtacctccctctgacgagggaggttggaggattccgttacgcatcgatccaacgcacgttcttggcgttgcgctggatgaagaggcggcggggttcgacctcatcgcccatcagcatcgagaaggtctcgtcggccgcggcggcgtcctcgatgtgcacctgcttcagaatgcggtgctcggggtccatggtggtctcccacagctcctgatagctcatctcgcccaaacccttgtagcgctggatgccttcgcccttgggcagctggcgtccgttggccttgccttcggcgagcacgcggtcgcgctcggcgtcggtgtacacgaagtcgtgcgggcccttggtccacttcaggcggtacagcggcggcatggccacgtacacgtagccggcggtgatcatcgggcgcatgtagcggaagaacagcgtcaggttcagggtggcgatatgcgcaccgtccacatcggcatcggccatgatgatgaccttgtggtagcggaccttggagatgtcgaagtcctcgccatagccgccgccgaccgcggtgatcagcgattcgatggtgtcggacttcatcatgcggtccaagctggcacgctcggtgttgaggatcttgcctcgcagcggcaggatggcctgcgtgatcgggttgcggccctggatggcggaaccgcctgcggaatcgccctccacgatgaacagctcgcactcttccgggttggaggactggcagtccttgagcttgtcgggcatgccggcggactcgaagatggacttgcggcgggtgttctcgcgggctttcttggcggccagacgggcgcgggatgcctcgatggccttctggatgatgttcttggcctcgttcgggtgggcgtcgaaccagtcgccgagcttgtcggtcatcacgcgctgcacgaaggtcttggcctcggagttgccgagcttggtcttggtctggccttcgaactgcgggttggtgagcttgacggagatcacggcggtcaggccttcacgcacgtcgtcgccggagaggttctcgtccttgtccttgaggatgcccttgtctcgcgcgtaacggttgaccagcgaggtcagcgcggcgcggaagccctcctcgtgggtaccgccctcggtggtggagatcgtgttcgcgaaggtgtgcacggcctcggagtaggcagtggtccactgcatggcgagttcggcggagatgccgagcttcaggtcttcggcctcgaagctgatgacgtcctcttccaccggcgtggccttgcgcaccttgaccagatagtcgacgtagtccttgatgccgttgaggtactggtaggtgacggtctggtgctttgcgccgggctcgtccgcggcgtcgccggccacctcgtcgccggcctggtcattctcacgctcgtcggtcaggctgatcttgaggcccttgttcaggaaggccatctgctggaaacgggaacgcagcgtctcgaagtcgtagatggtggtctcgaagatcttcgggtcggcccagaaagtcacggacgtaccggtggactcgccttcggtcatcggctcgccctgcttcaagggcgcggtggggtgctggtcgatgtacgtctgggtccagtggaagccctgacggcgcacttcgatgtccacgcgggtggagagtgcgttgaccacggagatacccacgccgtgcagaccgccggacactgcataaccgccgccgccgaacttgccgccggcgtgcagcttggtcatcacggtctccacaccggagacgccctcgccgggcacctcatcgaccgggatgcctcgaccatcgtccaccacgcggatgccgttgtccggcagaatggtgacctcgatatggctggcgtatccggccagcgcctcgtcgaccgagttatcgacgatctcatagaccaggtggtgcaaaccgcgcgggccggtggaaccgatgtacataccggggcggatacgcacggcctcgagtccttcgagcaccctcagatcggaggcctcataatgctcgggggccatggattcgtcaagttcgccttcggtcaattccgcattgttgatgcgttccgcagccgccttcagctgctcctctttgctggtttcgtctgccaacaggcttccttccgtgactacagggtcaacctccgtcatgaaggtcattcacggaggcgatatggcttacgaggcccgtaaagggctcttctggccatttgaccatactgcatgtgattttactcgtctaacccgacgagcgccatagcgaggcttctgcgaatttgtttggtatcttggctaccgccgccgagcccatttgcgcgtgtatccggcggccggtccggtcacgcgaatctcggcgatggtcaatcctttgagattgcgacggatggtatcggtaagttgggggataaggtaggtcagctgcgtggcccagaccgtggattcggcacggatggtcagtacgccgtccgtgaaatcggcgactgccgaatggctggcgatggcctgccccaccacttggtcccaatggttgcgcaattgcgcaagtttcatattcgccgcccagacgccattgccggcgatggtggtcatcacgctgcccagttcagccggatcgcgccccggtttgccgaagttttcgatggcctcttcacggcggcgtctgtagtccttcaaggtcgccccgcgacgggagagccgctcgaatatttcggccggcagtttggtctcgtccaggttgagttggcgggcgatcggcgggttcatgacgctttccgttctacggacgcgctgtccaccgcgggttttccgtcatacttacccaaactctcgttttcccgcgaatcggacaaattgcccagagttggcagtattacggaagcgggttcggccagtgtggccacgtcgatgcgatgggccgattcatagtcgggcacatcgccttcagcggccacggtaatcagcacctgatcctgttttctggcgaaatcaagaatctgcgtgcgccggctgtcgtcaagctgggcgaacacatcatcgagaatcacaatcggctgcaatcccaaccggtcacgcactatttcgaacaatgccattttcaaggccaacgccatcgtccacatctcgccgttcgaagcgaactcgcgggcgggaataccggccaactcaaggttcatgtcatcgcgctgcggaccgataaggttcacgccgcgagccatttcaccggggtagatgcgttgaaaatgctcgctgatctgcggatgcggatcgtcgaacatcagcacttcgtcgaatgaaggcgcatatgtgagcgtcacctgctcgccggcaccggccaagtcggcgtaaatcgcggcaaatggctcggcaagcagaccgatcacatgagcgcgcatacgggtcaacgccacaccggcttcgatgaactggccggtccagatttccaaaccgctcagaaccgcatccatcggctgtccattgttggcattggcattcaattgcttcaacaatgtggcacgctgtttggcgatgcgcgtgaactgttgcaacgtctgcatgtatccgggctcgagcagagccgcagcctgattcatcatgacgcggcgtgctcccggatcgccggacaccaatcgctgatcttcgggagtgaaggaaacgctgggaatcttgccgatgatatcgcgcagatacagcgacgaccccgagttgatgcgggctcggttggcaccacgcgcatgaatcgacgcttcatacgtagtggtttgaccggcatcatcagcgacgttcgcgcggatggtggccgtggtctgcccgcgttcgatcagcggcaacgtgctggacgtgcgatggctcgatccggtggacagcacttcgacggcttccaccagattggttttgcccaagccattcttgccgaacaggatattcacgcctggtacgaaatcgaccactacctgactccatgagcggtagtggtcgagtgcgagacgggagatgcgcattatcgaatcgttggaaattcagggacttcagttgttaaagcgcatcggcacgagcaggtatcggtagtccatggactcgtcggaatcagcttcctgctggccgttgaactcgaccggcttgaccggggtcgtcatcttgatgcgcacgaatggttcggtcacggcggacagaccctccttcaggtaggacgggttgaatgccacggtgatgtcgtcgccatccatgtcgatgtccagtgtctcgttggcctgggcctcgtcgaccgatccggcggacagcgccacttcctgaccggtgaaggtcatgcgaatcggagcattgcgttcggcgaccaaagccacacggctgatggcgtcgagcagatcctgcttgttgactacggcctgaatcgggtattcgtcggcgaacaggcggtcgaccgccgggaattcaccgtcgatgagctgggaggtggagacgcggccggcgttttcgaagccgagcagcgtcgggctgtcggcgtcgaaatcaaggcggatgttctggtgctcatcaagagcgcgggccacatccttgagcagggagccgcgaaccagcgtggtggtgtcgacgtccgggttctgcggagtccaagtgaaggtggcgcgggccaaacggaagcgatcggtggaggtcatgacgaccttgtcgccttggaattgcatgcgaacgccggtcagtaccgggcggttttcttcgcgggagacggcaacgcatgcctggttcactgcctgaacgaaagtcggggcatcgacttggccgagcatggccggtaccacaggcagatccgggtactcggtgtcgggcatgagctgcaaggtgaacttcgacttgccggacgtgatggtcagcgtggagccgtcggtgaccaggtacgttttctccgaacgcagcgatttggtgatatcggccagcagcttgccctgaaccagtacggaaccggcttcgtcaacgccggcttcgatgtggtggcgagcggaaatctcgtagttgaaggcggagaattgcagcgttccgtcaatggcttccagcttgacgccagcgagaatcgggttggagggacgtgcgtcgatgactcgggaggtccaggctacggcgtcggccagggctgcagtatcgatttcgactttcatgtgtgattgttcccttcgtcggattggctgagaaatattctagccgttaggtggcgaacttacgtacgatgggtgactggctgttactgtggcgatgatgcttttcacgtaactgagtaagtaatcgtcgtaataaggccggtggatagtgtggataagtaggggtgagccctacaaatgcaacggttcataagtccctgaaaattgtggacaaattctgcatggcttgtggataagtgggcgagttttccacagccagttcgtcgaatttgagttttccacatcgaggtcgcggttatgcacgagttttccacaacaaaacagtgggtaatccacgagttatccgccgagtttacccacatctgtgcacaactgtgtggataacttttttggttttcgtactttcgcacggcgtgttgaaggctgtttttcgtcgaggagaatcgattctggagaccgttttcggcacttttttcgtctcgctcgcccaaacccgcaaaatcggtcctcagaatcgattctctcgtttcatgggttttttgcgtgttccccttcgatactcccctcagtcgtctgcgacgacagctctcctcacaaaggggagccatgaggaatctgatgtctcgaatccgttgcctcgacgtatccaccagaatccgcctgagcaaccaaaaacggcacttttcggaaagtcagtccgaaaagtgccgtttttcgtctctcagaagcgttgtgtcagttggtgttgctttgcttgaggcgaaccgtgagctccataacgtagttatagatctcctgtttttgctgcattcggtcactgattcgagtgcaggcatgcattactgtggtgtgatcgcgcccgccaaagacctggccaatatccatcaggctcatactggtcatttcgcgagccagatacatggcgatctgacgaggaacagccacgtttttggttcgtgatttaccgacaagatcctcaaacgtcaggtggaagtacttcgccacctgactgatgatgtccgtgggcttgatttccacatcggtggtgaagaagtcctgcaacgtctgctcggccaaggcgcgggtcaccggctgattactcagcgaggccacggccgtaacacgggtaagcgcgccctcaagttcgcgaatgttctcggtgaagcgttcggcgatgaggtccaacacatcgctggggattttcgaaccgttcatcgaggcgatcatacgaagaattgcgattcgggtctccagatccggcggcttgacgtctacggtcaggccggattcgaagcgcgagatgagtcgagcctcgaaacccttcaaattcttgggtgccacatcggaagcaatgacaatacgcttatttgcctgatgcagtgcattgaacgtatggaagaactgatccaaggtggcttccttgccgccgaggaactggatatcgtcaataagcaacacatcaacctgtcggtatcgacggttgaattcagcaatctgaccctggctttggttcgggttttgcagcgcgtcgatgaattcgttcgtgaattcctcagacgtgacgtatcgaacctttagcccgggatccttgaccagtgcatagttgccgatggcgttcagcaagtgggttttgcccaggcccgatccgccatagatacacaacgggttgaaatcctgaccggaaccttcggccacggccagtgcgaccgtacgggcaaaacggttggaatcgccgggcacgaaggaatcaaacgtgaagttcttattgagatgagtctcgggatcgcgattcatcttctgctgaccgaccgggaactgcgactcggtggcgggcatcggttcccgcggtgcggctaccggctttgcaccataggattctttaccgaactcggcgacggtcggagaaatttccgaaggatatggctgcgccggctttgccgccgaaagcggttcgggctcggttttcggcacgaccttgaacgcgggaaacatattttcgccggttaccgtacgcaatgcctgaagcagggaatcgttcaaatcaccctgaatggcttgaagcgtatcgttgttgtccacacacagcacgatggtcgaaccgaagacgccttcaggaacaacgccttccaaccagcctttttctcgtgggctgagcgaagcgctgtgtttgagcaccgtcagcgtgtctgaccagatgtgggcggcctcaattacggggtcgccggaagcgttaaccatggtggccccttctatcggtgtggcgaaatctgtacaacagataatatttactctggtttagacaagttatccaccgtgtcgcgtgttgaaataactggattgtgaataacagacatgtaatttgtggataacttttggccgtgaatggttggtattccgccgattataagagatttgaggcgtgtctcgcaacgtgtcgaaatgtgaaaatactccgtccgttttgacttgagggtaggggtgagagtactttggtatagcttgactcacgtgagggcagcgcgaagcgttgccgaatagacctaggagcaatggattatgaagaggacgttccagccgaacaaccgtcgtcgccacatgaagcacggcttccgcctgcgcatgcgcacccgttctggccgtgcggtgatcaaccgtcgccgtgccaagggccgcaagtccctctccgcctgatcattccgatcagtgccacaggcatagtcgaggtggagcggcttcaaagccatcgtgatttcgtcaccgtgctgaaacgccggcgcaaagcaggtggcaaggatatcgtcgtgcactatttggtgcccgacgaccatcatgatgatgacgaccggacggtgcatcgccgtttgggattagctgtctccaaatcggtaggacatgcggtcacccgtaatacggtgaagcgtaggtttcgtgtattggccagagcccatgaggatctgctgcccgcgcattgcgatatcgttttgcgcgccaagcccagtgccgcgaccgcatcgttcgcttcgctagatcagcagatcgcgaaggcttttgccacagtggcgcataaggtggctgaggcatgacagcttctttcaaggcggtgatgattggtggggtgcgctggtatcaacagcacatctcggcaaacacaccgccttgttgtaagtattatccaacgtgctcgaattatgccattgaggcattggaacggtatggcgcgttcaaagggggagtgctcgccatgctgagattactgcgttgccggccgtggagtcgtgggggaatcgacgatgttccacaacggtattccattttttacagattttcgtggtcgaaggctcatgaagagccccgactgacaccattggccacaacccaaagagaggcccaacgatgaactcaaatgaatttctgcttgatagcgggttttggggatttctatataaaatcctgactcccgttgagtggttgcagacctggatcatgaagatcgtgcatgacttcttcgcgatgctgggcatgagcccgattggtgtctcatgggtgcttgccattatcatcctggtgctggtggtgcaggcgtgtatcttcccgctgttctgcaagcagatgaagtcgatgcgcaagatgcaggcgttggcgccgaagatgaagcgcatccagaacaagtacaaaggcaagacggatcaggcttccaaggaggccatgagccgtgaaaccatgaaactgtatcaagacaatgacgccaatccggctggctcctgcttgcctatgctcattcagggcccggtgttcatgtccatgttctatacgctgtcggccattccctacattgccaacggtaaacgcggtgcgttgggcgcgttcgacgtagcaaccgccaagcaattcacccaaaccgatgtgttcggcattgtcagtgtgaccgataacttcacccgcgcatctactgcaggcaaggtggtcatcggtaccttcgtgttcctgatgtgcttctgcctgtggtttatgcagtacttcaacatgaagcgcaacatgcccgccgcatcgatgaacaaacaggccgagaccatgcagaaggctatgctgtggctcttcccggtgatgtacatcttctctggtgccaccatgccgttcgccgtgctggtctactggctgaccaacaacgtgtgcaacctctgccgcacattgtggcaggtgtacgcattcccgacccctggctctccggctgcggcggacaaggagaagcgcgatcatcgtaatgagaatgctcgccgcgcaaaggccggcctgccctctctggaagaagaagcattggccaaggccaaggaagaggctgagcgtaaggccactcagggctatcagcgtcaacagcccgtgcgtaagcgcaaaaagaagtgacgaccatgtcggtgcgcgttcgatgtttcacgtgaaacattcaacacgcaccgacattactttctctgttcgggggagcagggcttagacttggaattcaaacacgacatgaaggagtagcgtatggcacaggatgacgtgaagtcgatcgatcagctcaacgaagaggctgacatcgccgcggattaccttgaaggcctactggatatcgccgactatgagggcgacattgagatgggcgtgcgtaatgaccgccccaccgtgcaaatcgttgctgatgacgataccgacatcaaacatcttattggccataatggtgaagtcgttgatgctctgcagcaattgactcgtctggctgtacagcagaagaccggcgagcgttctcatctgattgtggatgtcgacggtttcctgaagcgcaagcgtcagcacctccgtgatatcgccctggatgccattgacgcagtgaaggattccggcgagccgtatgatttgaagccgatgaattccttcgaacgtaaagtcgttcacgatgtggttcgggaagaggggctgaagtctcgctcgcacggtgaggagcctcatcgttacgtgacggtgtatctcaagaacaaaatcgaggatgttgccgaagacgacgagcttgatcaggagtaataggtcgacgagtttttgagatgacaaggacgttcaacggatgtcgtctctaaacaaacaagagtgaccgtagggagaatggcgtcgtaatgagcgacgccttttccatgttgattgtttcacgtgaaacatggtgagggagatggctatgacggatcagctgcaggggtcacctgtacttgctgaggtcttgggtgatgcgttgccgaagttggagcgtttccatgccaagattgccgaagagggtgaacctcgtggattaatcggcccccgtgacgtcgatatcatttgggaacggcatattctgaattccgctgcgattgtgccgtacgttcggaatgtgacgaatggtattcgcttcaaaacagttgccgacgtcggcagtggtggtggttttcctggattggtggctgccgcgtgtttgtctgatcatgacttcacgctgattgaaccgatggagcggcgaatcgaatggttgcatgaatgtgttgacctgatgcaactgcagaacgttgagattatccgtggacgctccgatgccgtcatccagcaggtacggaagcgggaaattcatccgttcgctgttgtcacgtgtcgtgcggttgctcctatgaccaaactctctggctggacgttgccgttgctgaaaccgtcgggacagttgatcgcactgaagggacggtctgctcaggctgaaatcgacaaggctggcaaggagattgcaaaattcggtggtcgtcgtccacgcgtcgttgaggcggctgtcggaccggatcttgagcctacccacgtggtgattgtggataagcgatgagtggagtactgattgagttatccacatttccatatgtgcgtaaaagttatccacatttttacgggacgatgtgcagaatgatgaaaacactgatttttcaatgtttttcgtctgcgaatacataatctaacactcaacgtcattcacacttatccacacttatccacattgcatatcgcaattgtggataacgagcatcatgtccatacgaatgagaacactggaacttacgtctgtgcaaggaggagcgatgtccaccaaggatcatcagtcggaacctatagaatcggcttccgaaacgcttcagcgaatattcgatggtcacggttcagtgcttggcagccagatggttgatgaaagctcacgctacgatgtactcaagaaaaccgatttccccaaacctcaacgtacccgtcgtattgccgtggccaaccagaaggggggagtgggtaaaaccacatccacggtaaacaccgctgcggcgctggcgaacaagggcgcgcaggtgttggtcatcgatatggacccgcagggcaatgcctctacggcgttgggtgtatctcatgcatcgggagagccctcggtctatgacgttatcgaggggcgttccgatctgggtgatgttatcacggtctgtcctgattttcccacacttgatgttgtgcctgcatcaatcgatctcagcggtgccgagttggaagtggctgatctgcccaaccgaaacacattgttgaaggaggccttggacctctacctgcgtcaatcagataaacactatgattacgtgttcattgattgcccgcccagcttgggcctcttggtcatcaacgccatgtgtgcagtgaccgagatgctgattcctatccaggctgagtattacgcattggagggtcttggccagctgatcaacacgattggtttggtgcaggagcatttcaatccagtactgctggtgtccaccatgctcgtcacaatgttcgatcgccgaacgctattgagccgtgaagtatataacgaggtcaagggacactatcccagcattgtgctgaataccaccatcccgcgttcagtcaagatctccgaagcgccgagtttctcccaatcggtgattgcctatgatcctcgtggcataggtgccatatcgtatggtgaagcagctttggaaatcgcacagcgttcgcaacaagtccttgacaccattgatgcgaggaggaacaagtaatggcatcaaaatcacgactcggtaagggccttggcgctttgttccccacattgccaggggaggagccagtggcggagcagcccgcaatgattgaggaggattcgtctactccggcggccactgctgacataacccccgccaagaaggctactgcccagcaggaatcaaagcctgccgcgcctcagatggtatcgtccagtaaagcagccaagaaagccgccggtaaacgcgcatccatgcccgcattggacaccattactcatcctagcgacctgtttttcggtacggagaaacctcaaaccggtaaggtcgccgcacctcagcagggcggcaagccgtctgcgtctcagacggcacatcgtacatccgtcaccgtcaaagatgtttcacgtgaaacatctcagactgcatcggcggcaaagaccgctgacacagataagaaggacgagctcaagccggtagccggtggttatctggctgaactcaaactgtctgatatcgggcccaatacacatcagcctcgtaccatcttcgacgaggatgagttgaatgagctgtctgcttccattaaggaagttggtgtgctgcaaccgatagtcgtgcgcaagcgtccggcaagccagattgctgcggccaaagccgccaagcacgacgagacggaatccagcacaaatccgtttgccggtcatttggacagcccgtatgagctcattatgggtgaacgtcgttggcgtgcatcccagttggctgggttggagacgattcccgccatcgtcaaaaccactgcggatgatgatatgctccgcgatgcattgctggaaaacctgcaccgtgtggccttgaatccactggaagaggcggctgcctaccagcagatgattgaagagttcgggttgacacaagtacaactgtccaagtcggtgtccaagtctcgcccgcaaatcgccaataccttgcgactgctgaacctgccggcctctgtgcaaaagagagtggctgccggtgtgctatcgtccggtcatgcgcgtgcgctattgggcctgagcgatccggaggaaatggacaagctggcttctcgtattattgcggaaggtctttctgtacgcagcaccgaagaaatcgtcgccatgaagattgcgtcgggggagcagccgaagaagcccaagacgtccaagaccaatccttgggttggttccgccatccagcagagtttggaaaatcatttcgacaccaaggtgtcgattaagggcagcaccaagcatggtcgcatcgaaatcgtcttctcgtcaccagaggatatggatcgcatcctgcagctgctggtgccgagccaaggcgatgccgattccaaatgggtgtaacacgataagaacattcgtgttgtcgccggcattattgctgtgcagtgcgttgtacgcgcaagacgttatagcctctgcgtgattcctggcaggggcgtatgcctgcgttgtagcccctgtcgcaatagaaaacccctcaggctggaggatgacaaatcacacatcgtgattctccgtcgcctgaggggcctttctatgcctttgaccggtgcgtactatccaagggcggcatgctgtaacactgacctagcgctgctcctatgtcacaggcagcagtcagaacagcaagccatcatcaggtcgccgcaatcagtccgtaagataggcctgcgcatccagcgctgcacggcagcccatgcccgctgcgctgattgcctgacgataagtacgatccacgcaatcgcctgcagcaaagatgcctggcgcactggtcaccgtgctggcaccctgcactacgacatacccatcattgtcacggtccacaacaccagctgcaaaatcagtggctggcgtatggccgatagccacgaatacggcgttggtgtccagcgtgctttcttctccggtcaccacgttacgtacggcaatgctgctgacactggccggtgccacagccggtcgtttgattgtcaagccaggaatggcaataggtgcaccggtgttctgtgtgggggaggaggtgccggtaatggaggtcaccactgtgttggtcagcagggtgatggtcggattggctttggctcggtccaccatgatctgcgaggcacggaagctatcgcgtcggtgaatcaaggtgaccgaagaaccgaaccgggtcaggaataatgcctcttcaaaagccgaatcgccaccgcctacgaccacgataggcttgttcctgaagaagaagccatcgcaggtggcgcagtacgagacgccatgtccggacagctcctgttcgccgggcaccccaagcttacggaatgacgaccctgtggcgatgatgagtgctgatgcctccaactgggagtcatcggagagcgttacacgataggtcggcttgaccgaatcactctcacacgcctcaatggaagagacatcgtctgtgatataggttgtaccgaagcgcttggcctgttccttcatgcgatccataagatccgggccaagaataccttccgggaatccggggaagttctccacctcagtggtgttgaccaactgtccacctggcgacaacgcaccagtgaccataacaggattaagacctgcacggccaagatagatggcggccgtgtagccagcgggaccagaaccgataatgatgacgttatgtttcacgtgaaacattgtcacacccccatacgatattccatgtcattcagccagacgcgaagaaagggcggcaccgtcgaatgtatgcgaacggtaccgcccttcttgggtcagttatcggtatagatgccgattagaagacctccaccttctcgatgtacagctggttctgcggcaggctacccgatggcacccacagcagcagatcctgcgtattgacggctttggtgaacttcacctcagtagtgccaccttcagcaaaggtgaattcggccacctgctcgccctgagtggggtctccagtggtatttgcgcgaatatagcccttaccaccggatgtgcggatggtgataaccatgcggtacgcatcctgcggctggtcaaggtgcatgtagtatgcgtacccggattggccgccaggattcgacaggaagttggcgctggaaatcgtaaacgccgtgttgttctcatggcgcggttgcggagcagcgctggaatccttatcgccggacttcttggccttggtcttcttggacgacgaatcagcagtctcggacttcttggacttgtctgatgccgagtccctggattcgctctgagtggcatcactcgactttgaggaatcgtcagtggcgccaccgttcgtcgcgttcttgctgccaccgaatggcacagcgtcagcattgatatcgggccagtcaccttcactggagttgctggaagcatcggcaggattgtctccggaggattggaacgcatgcactgcccaaacagccgctgccactaccaatatcagagccacaatgatggcaacgaccttggtcgacagtttgccgaacagatgttcatcgggcagcttgctgtcatcctcgtcatccggcacatccttcggtgtgaagctcggaggaatggcgcttacttcggcaatgcgggcctgctcctcttccaaggcacgcagcgattcctcaccgggggccacagcacggccgctgacatcgaacacgggaatacgactggtcgtctctcccacggtggcatcggaaataccgccggtaacaataggcaccgtcaaccgagtattatcacccggaccgccgatgggggccggattcatttcgctgtaccagtcaccggtgtcttcaccggaaagattctcgtgctcccaggcgtcagaaaggttgaagtcaaacagacggcgggcgtcagattgagactggttgccgtcagcagtactggacccatcaggcagaggagccggtgacatcgcgtgcggagcggggacggcggccggctgaaccggcagggaaggggcaatagacaattccggaagactgctgctgttaatcaacgtgctgggaataggcacgatatcggtctcgttggcgggcttcagtatcgccttggtaatcgagcaatcgctttccacgctcggcaaagcgatatcagcatcgctcagttcagagagcggcttccaattacccaacaaggcgtcgagttctacaagggcagccatcggcaacgtgtgctcgtcgggcttgcttaaggccaatccacgcttgcaaatcacgcggaattcgccaggggtgtcttgcggcaaggcgcgcagattgaatgtgggtgtcgcttggcttggcgtgcgtgtcagcagggcatagagcaatgccgcaagcttgcgaatcgcataccgttcaggaccgtccgtacgcagatcagtagcggacgtgtcggccagcatcgtggcacatggtgcatcggcaatctgcacaccggaggtagtcactcgaacggtgtcggttgtgatgacgatgctgctgggagtatccgcaatgacctcgcgcagcacgttggcgcattctccgataatcgaccggatggcgctgtagctgagcggcttgtcggtatccaccatgtagtcagtcaggcattggccgctgtccaccggcatgacaatgagaagtacgtcggattccatacggtatttcagtacgggaatcacacgatcagggcgagtggcggcgatgcgaccagcgagctcatcgattgcggcgaaagcgctgcgattggtaatgatgaacagctggcaatcctttgccaacacacggtcgttggctttccatgcctgaatgccaggctcctcacgcaacgatgataccaaggtgtatcggttgagaatcgtgtctccgagttgcggtttcatagtgcgttcggctccgtgtgattggtgttcgagactggtcttagatattctacgtgtggggctatccttgacgggctccgtctcaggattgatttgcgtatcgtcgactttttccggctgggctgtcacagcaacgtcctcactggccggagtcttgtgtagacgggccagtatcgagtgataggcgctgatgagttccggggtgcgtatcacccacaacacagccacatatactacggccagcacgatggtgagcaccacgcagatggccagcgcagaccaccagctcatgtgcccgcctaccgatcgaatatccgcgccgaacagtgcgactaccggtcgtttgatcagccagaccacaactccggaagccagcgccgccacaatggccttggcatatgtcctcgtgatctcccgaccaccaagattgccttcgaacttgcggcgcaacatcatcaacgtcagcggcaacgccagtaatccaccgagtgtcaccgagcaggcgatgccgagtacccaatgctcaggaggaagtaccatcatgccaatcatcatgaataccgaggtgaacccatactgcatcaccgcggacaagaaggggtgaaggccgtcctcaaaggcatagaacgtgcgctggatcagcaggaacgccgatcccaaaggagtgcccacagatagggcgataagcgcgtaggaaatcagcatggtctcgtccatcgagacggacggaagcaatgcgcggatgatcggttcggggaacacaatcatggcggcggcgaaaaatatgatgagcaggcccacattattcagtgcgttgactaggtcgtgccgtgcctcatccagattcgcagctgcgatggaacgggagatcttggggaacatagccgtggataccgatacggcgatgagcgaatagggcaggatgaacagggtgtacgcattctgataggtcgcgttgcctgccacgctgaacaggctggcacccgtcagttcgtgggcgcgctgcggtgcggatgtggcgatacgggtaaggataatgccgcagatctcactggtgaccaccacgcccaaagagcctaacgccacgggacccatagacctgagtccaaagccgccaagcccgaagctgggtttgtacttgaacccgatacgggccagtggcaggaacagtatcagcgcttggaaggccacgcccaaagtccaggtgcctgcggtaagcgcgattttgtcggcggtccagaattcgaggggctgttcattggccttgctgaacagcagaataaaaccagtaaaaccggcgcaactaataatgttggcaccggttgagctccacgcatacgtgaggaaatggtctttggcggccaggatctgacccaataccgtatacaggccgtagaagaacacctgaggcatacaccacagggtgaacgaggtggtcagggctatcatctggtgatcgtcgctacccacgtacaggcgggcaagcagagggctggccgccgccatcaccacggtcatggccaacaggatgccgatggccaacgtaaccagacgattcagtcgttcttgggcgtctttttctttcaacgtgcgcacaatctggggcaccagcacggcgttgaagatgccgccggacaccagcgtgaacacggattggggaatcatggaaccggcctgataggcgttggccgccaatccagtggtgccgatggccgcagcgagaagaatcgtgcggagctgaccggtcacacgggaagcagcggttcccgtggccatgatcagggaattacgacctacggttgaactcattcgtcggggtccttcttccgatggaactgccgccacaggccgataatgcacagtagcacggcgaagccgatgataatgaaaccgctggcatcactgacgcgcatcacactggtgatcgcggtatcctgcgtgttgccgaagctgttgccttcccggtcgctcagcgacacatgggccgtcgatgagccggaagtggaaacgcggatggtgaaggtcacctgagcgtcgctatgcgcgggaatatcgatgtcagtggttcgcgaggtgacgatctgcatggagtcagtcagcgagttgacctgcacgctgacggcataaggaaggtcattgctgacggtgattggcattttcgcggattcgctgaacacggatattgattccgatgggttgatgcgtacgccgttcagaagatcgctggccagtgttttcgcggctctgaccatggattttcgcgtggttgtcggctggggggagccagacatggatcgcagcgccatatcgtcatgcagcaccagcaaagagccaatccattgcgtcggatcgttgctgtgcgagacggtgtcattggcatcctgccgggccagggcctgcggggccaacgacgagacctcgtcggaatcaatctcgttcttcaatatggaggtggccatgcgcatgatgtcatgccggctgtcggccaactgtctcaatgccgaccgggtattggcggtgttggcatcatcggccttgtcgggattgaccgaatcgctgacatcgtacggatcggccttggccatggtcttcagatccgtcagattcaaccaggacgcctgctcgaaggcgctcatcacctgatcgatccagctggcctccgtggtgcgggagaacgtcataagcaggtatcgggatgtatagggctgttccatctggtagaacgcgctctgagcgaccagtcgggccaaccgaccggcatcgctggactcggcctgcgcgtccgtgctggtggcttggcccttggccagcgtgcccaaggtcgattgctccttcagcacggtgacatcgccggcaggcgtatccaccacgtaggtgcctgtgtgtacggcttcagtctggtcggcatcgaaagaggcatcggcaatcaccgtgtcatagccctgctcgcgtgctgcggtcagcgcatccaacgtccaacagttgttgccctgccatgcgtacgcggagggtgtttcggagtcgtttccggcggcataccatgcggccgcctgcttggcgttccactgttcagtggtgatgccggccttttcgtaggccgcggtatcacccagcgcggtataggcggtgatgtcaaagtcggcgggctgcatgatgccggcaatggacggttgcactgcggactgacgccaatacagaggatccgcgatcacttgcagcgagcggtgcttggcgaatgtctgcccaagggatcgcgcggtatcggcatcctgctcggataaggatatggcttgcgtatcagtggctttggccacgttgccggcgtcggcgttatcggacttgtcggccttgtccgtgctgttggacttggacgatgttgatgtcgaggaagtggtggtttcggcaatgcgattgctgatggccttgttatcgacctgccagccgctggcggtgtagggcatggccacggtcaggttcatggccggtgtcgtcgcggtgttgagcccatccgaagatcgggtcagaaaactcggcaaatcggcgagtatccgattgccgacgatatacgacagcatcagcggcttcggcccccagctccctatggaggcaagggtctgctgattggcgttcacctcgatggtgacggtggcagtgccgccggcgggaatcgatggcacgtcaacggaacccaactcgttgggggtggggatgggggcgttgttctcggcccaattctgaatatcggtgcgcgagacaaaggtgaacagcgtattggtggtcaggtgcagtgtgccgcttgacgtggccgtgctgtccgtattgctgatgaccgcggtgacatggtagcccgatttggaggtgacgatgggggtgctttgcgtgatggcaatgctctgcttgggctgattctcggtctgattgcccgttgcgtccgtcgtatcggatgaatcagtcgtgtccgtcgtatcgttcgcgtagacggtcaatggagcggccagcatcgccacaacggcgacgccagccgccagtgcgtgtgccagacgtgtgcaatgtcgtaagactccgggtaggttcactcgtttgcctgcctgttcttcttcctggcgtagagccacgcgattttgcgttcgttgggatagctcaacacgtcatccaaatcttcaaaacgtacccagatggcgtcttccgcctcatgatccgggtctccttccaccgtcagttcgccgccggtctgtttgagcgcgaagtgatggaccagcttatgcacgcgctgcgtggtgccggtgaaccagtagtcgatggtggcgatggaatcgatcacctcgcccaggatgccggtctcttcatgcacttcgcgcacagcggtctgctgcggggtctcgcctttttcgatatgccccttcggcaagcaccattcgagatggccggagcgggaatgacgggcgataatggccacgcgattctggtcatcgaaaatcagaccgcctgccgaatattcgcgtacgaccggcagttcctgggcatccagtgaagcgaatgtggtcggaccgtccgacgtacggcgttgcggcatcatggccggagtcgggctggatggcgtcaccggttctactggcactgccggttccggcgaggcaacatccgcggacggatgccggccgaagaccgtggccggcgtgggatgcgctgacgttgcgggcctcactggtgctgcagacggcgctgagaccggcatggtgaccggcgttgcggccggtgcggtacgtgccgcaggcggcatcagcacgtcgcgcggagtcggtatcgctgcggtatgcgcggcggcggccttggcgaccgcaacggcagtatctacggccgcgtgggcggtcgccgcggaatcgttcgtgacgatggttacggacgtttgtgccgtggcgataatcggctcgaccttggcaatcgtctcggcaccggcctcgccggcgataccatcggcctgcccctcgatagtgccgctggtagtggcgatggtgacggtggcatgcatgccgaagacggtggccggtgtgggcatcatcggcttcggtgtgggcatgtcgctggcggcgtccgatatttcggattcggatggtgcgggtgtggcgggcgttgcgggtgtgccgggtacaccggaatgttgcgtagtcggtactgcgtctacttcgtcttgatgaacggcctgattggtggagtggctcgcggtgccgccggcatcgggagaatcgcccgaatcggcggaatgatgcggagtttcggacgtatacagcaggtggtcttgggtatggctatccgccgaatctggtgtttgccccagtatgcgggcaaggtcggcgggcgtaatcatattctccaccttactcaaccccgtgtgcaggtggggtaacggtatgctggtagggcagaaaaacgtcgcacgcgggaaggtgcccattgaatttcgaagtatggcccgaagccatcgaacttggtcgactgttcgccgaacagggttacgagctggcattggtcggcggcccggtcagggatttgctgctccatagaaagagccacgatttggacttctgctcatccgcacggcctgagcagttcgagccgatactgcgccggtgggggcatgacggcttctgggacatggggcgcaagttcggcacgctgggtgccatgcgccgccgcccggacggcaccgaggtcaaggtggaggtcaccacctatcgctccgacatgtacgatccggactcgcgtaagcccgaggtcaattatggcgacacgcttgagggcgacctgtctcgccgcgacttcaccgtcaacgcgatggccctgcgcgtgcccgacctgcaattcgtggacccgttcggtggtgccagcgatctgtccaagggcgtgttgcgcacgccggtggacccgcgacagtcctttgacgacgatccgttgcgtatgatgcgcgccgtgcgattcgtggcccagctgggcttccgtatcgcgccggacgcggccgaggcgattacctcgatgcgcgaccgcatcgacatcgtatccgccgagcgcgtgcgcgacgaactgaccaagctgctgctctccgaccgtccgcgcgccggccttgaggcgttggtcgaatccggtcttgcggacatcgtcttcccggagattccggccctgcaattgcagatcgacgaacaccaccgccacaaggacgtcttcgagcacacgatgattgtgctcgaacgcgcgatcgccctggaaaccggcccggacggcccggtgcccgcccccgacctgacgctgcgcttggccgccgtgatgcacgatatcggcaagccgaagacccgccggttcgagccgggcggcaaagtgagcttccaccaccatgacgcggtgggtgccaaaatgacccgcaagcgtttgaaggcgctgcgttttgaccaccatctggtcgaggacgtctcggaactggtgaatatgcacctgcgcttccacggctatgtggacgagccgtggaccgactcggccgtacgccggtatgtcaaggatgccgggcacctgtacgagcggctgaacaggctcacgcgcgcggacgccaccacacaaaacaagcgcaaggcgatgatcttctcccaggccatggatgagatggaggagcgcgtccgcgaactcaagaagaaagaggacttcgacgcgatccgcccggatctggacggcaacgaaattatggagttgctgggcctggagcccggcccgatgatcggccgcgcctacaagcacatgctggaataccgcttggataacggtccggtggaccacgatgtggccgtcgaagaactcaagcgctggtacgccgagattcagtagtccgatactagtccgataccaaaaaaccgtacgctgaatacgtgtcagcgtacggtttttcgcgaagatgaagctgtatgcgccttactccgccgtgtatgcgtcgtgtttggtgtcggcgggcagcttggtcatgctatcggcggccttgcaaccctcgatattggtgatggtcttaccggattgtggggaggatttggtgtcctgcagatcgttgaacgtggcgccgatgaccacatcaatgagttgatcctcgcgagccgtcatgatcatggtggcgtcggtgaaattgccgatcagcgtatacgcctgattaatggcgttcttgccgaagtagatggtggtgcgttcaacgccggtgctggaatagttatcgattttctgcacgctgaatccacgattggccaaagcctcacccacggccttggcgaattggccgtgagaggtgccgttcatcacgcggatgccgaccgaagcgttggacacgtattgcgctttgccgctgctgtccttgaccgcgcacggtgccgcgttgccgtaattcggctggcgggccggagtctccacttcgccgaggccgaaaacgtggaaattgaacagtagggctatgaccagcactactgccaataccgcgccgctgatggaaaagacgatggtctggcggtggcgcacgtacgccttgcgggcttcacgttcatcaacctgatacgtcatcggtggacttctttcatgggtcgggtggctggttgctaccttagcgtcactgtctgacgccgatattggggtgtgcgggagatttggctcgaataatgcgatcgaccacagccgtatcgcgccacacatcgataatgcgttgtgccgctgcctcgtcggcggcgaaagcgaccactgaggggccggatccggagacgaatgcatggctggcacccgcctgcgtggcggcgtcgatggcctgcccgctgcggggatgcaggctgattgccgcagcctgcagatgattgcggtcgccttctgcggctcccacgaggtcaaaggtgtggtagacctcaggagtgctgagttgcgactggtacgcgccgaccaatacttcgccgctgaatccctgttctatcagcgccagctcatcgcggctgccgggggcgatatccgtgatgcgttcgccgaaaccggtgccgtatgcaaggccaccggtcaggcagaacggcatatccgcgcccaacgtggcggcaatggtgcgcaggcgctctataggccagttcagatcccagagacgattgaccgccagcatggtcgccgcggcgtcggctgaaccgccgcctagtccggcacccacgggaatgcgcttggtgatggtcaacgccacatccggctcgcgctcggccgcctgggccatggcgaagagggccagtaccgcatggttgcggcgcatgtcgctgtgtgaggaggccaagtcgcccaaataagcgccttcgagctccagagagaatcccgctccgggttgcttggcggttgcggtgacggtgtcgtatacgccgattgcacagtaggtggtgtccagttcgtggcgtccgccccattcgtcgtgagcaggtcccacttccaaggtgagattggttttcgccgggcaatccaccgtaatggtgatgggggagagctcatcgaactgatgtcgggcagcggctgggcgtggatgtgagattaccggactcattgtgcctcatctccatctccacacgattcgatggccttggccagagcggtgaattcggcgatggtgagcgtctctcctcgacgggtcggatcgatgccggcgatggagaatgcctcggagggcgcaatggtcttcaatgccgcgtgcagggtcttgcgacgctgaccgaacgccgcatcaatcagacgaaatacgagttcccgttgtgcgccgccgtcggccgtgctgttcgaggcttccggggcggccgggtcatcggcctgataccgggtgaatctgacgagcgcggaatccacattgggagccggccagaacacattgcggccgatggtgcccacccgttcggcggtgccataccaggcgagcttcacgctcggcgtgccgtagatcttggaaccgggcttggcggcgagtctgtcggccacctctttttgcaccatcaccaagaacgagccgaggttgtcgaaacgctccaacagcgtgagcagaatcggcgtggccacgttgtacggcagattggcgaccagcgtaaacgatgcgtcatcgctgaaatcaggcacgttctccggggtgacggttaaggcatcccgattgacgacggtgagtcgtgacgtggcttcgggcatgaattcggcgactgtgcccggcagtcgttcggccaacggcggatcgatttcgactgcggtcatggtggcgccggtttccagaatcgccaatgtcaacgatcccaggccggggccgacttccatgacatgatcggcagcggtcactcccgcctctcgtacgatacgacggaccgtgccggggtcgatgacgaagttctgcccgaatttcttggtggggctgatgccggcatcggccgcgatacgacggatatcggcggcgcctaacaggtgaccggtggcgggaatggtgtcgttcataagcgtgtgttccttgtgggcttcgtaaccgatcagtaccaaccgatttgttcggaatgttgccatgccttggacgggctgccgtaggcttgtgcgatgtaccacagaccccaatcgatctgtacggcggcatcgtcacggtaattggcgccgaacgcagccattttgtctgctggtcgcgactgaggaatgccgtaggcaccggagctcgcgttttcggcataccacagccatctggactcgcggttccatagtttgaccaggcaatcccagtcgttgcctgtccacccgcgctgcgcggcggcaccggcggcataggcctgagcctgggctacggtggcgtgccagagtcggccggagggcgtggtggttgttcctgaatcggagccggaagagccggaattgttattcgtaccgccgccggtgttaccggaattaccagtgttaccggaattaccagtgttaccggaattaccagtgttaccggaattaccagtgttaccggaattaccagtgttaccggaattgccggtgttaccggtgttaccggagttgttgcccccggtgttgccggcattgttgttggtatcggtgttcgtgttgttgccagagctgctgttgttcttgtcgcctgtgttgttggcattgttaccggacgactcgtgctgattgttgaaaccggaatcggccttgccgttatcggcggagtcggattttttgtcggaacctttatcggtatcagacttggcggcgcctacggcgatgatctggtcgatggccatcgtggtgacggtttcggatttcagcgtctccgattcggccacgccatcgacatacgtgacgttatacacctgggttttctcgccattgacgccttgctggcggatctccgactggccttcaggcagattggagtcgatgatggtttgtgtggagtatggcactatggctgtgcgtgtttcctcgccatgcgtcacgcgccgtacgcgcaggatagtggtatcgccgtccttttcgacgctcacacggtcctctttgttcagcacgatgcctttggagtcaagaatggaggccgcgggcagtttgccgttgggggccacggaagtcttgccgtccgcaatgacggtgaccgggccatcctgattgatgaccagtccgccggtgagctggttgtacacattgtcgatgtcgacggtgatttttgtggcgttgttctggttttcctcgaaaaatcccagcaactggtcggcactggtggccacggtccagaagggaacggacgtgccgtcgatgttgatagtggtctggtaggcggactgtacggtgaccacggcatgattggcgagttggtcgccggacgaggtagtgacgatatcgtgggtcttgatatccaccccttgttcctccagaagacgggtggccgtcatcgcatatgtggtgacttgggtggtttgcccgttgatgttcagggctacggatttacgcgcggtgaacgcgaatgatccagccagcgcgatactggtcgccgcgatacaggcgattacgcggatgcgacgcagtgtaacaaaccgctgcggggtccaacgccgtgccattgccatactcttcctgctggatgaacgattacgccacccatcgtaacggttgttccggcccgtactgcggtttcaccggccaccgtcaccattcctgctcgtcagattgttctgagctcaaaaaaagaaaagaaaaagggggcgggagagaaggggatgttcccgcccccctgaaggcgcggagctggttgggggacgctccgccctcattccaggaagcccatagttgggggaaggctcctggagtacttacccaaggtaagaattatatgcgtagaaaagtctacgtatcatataatacgccacttttctacgcgtcgagcctcttgtcgggatcgaaccgacgacctgccgcttacaaggcggccgctctggccatctgagctaaagaggcgattgttcttaacgcgtaaatcgttttgaacaaatctctagtataccggtagttctcgagtggtcaattcaggccgagccgcgccggtaattaatcggccagcgaaatcggcttcttgttggcgccgatcgatggcatctggccttccacgcccacctgatcggagtccaagccgatggacttgaggaatccgtccaccatgctggtgtccgccagcgtgagctgcttcagatcccagtattcgccattgatggtgagcgtgggggaggagaacgcgccggagctgttgaacagttcggggcgtaggatcgtgtagttgttggaggcggtgagccacttgacgtattcgttcttaccactgaatgccgcggtggccacatcctcgctcacgccggcattgacggcctgcttctccagcttggcgttgcttaccggctcgtaattggacaattcgcccggctggaaatcctcagcgtagatgttggagaggtagctcatgaggtgatcgggattgtcatcatgctcggcaatgtagatggcaccgttgaacgcgcggttggagtagttgtcggagctcttgttgtcctggaaattgaggaagtgcaaatcgatgttgagctggccggcgttcatcagcttgacgagcgtcgggtcaagctggcggttcaccgaggcgcagccggggcacagcggctccatgtagatggaaacggtgggcgccccttcggccttctgaccgtaccccttgctcgagatcacgaagccggccttgtcatcggcgttggccggctgggtactgactttcttgagcttgctataggcctcgtccacggtcatgttgctttgctggctactgctgctggtgttggacggccgcatagccttgtatacggcgaatccagcgatggccaccagcaccacaataatggccaccacaatgcagccgatgatggtctgctgcttacgttccttagccgcctgctcggcccgtgcctgctgggcggcctcctcggccgctcggcgctcagcgcgtgtggcacgcttggcctgacgcttcggatctgacatagctatccccttgcaatcgcttcaatgtttgggccccatcataatgaccgggcctgaggaggactgcgcccagagctgatctgaggtgaattccctgtaaaagtgtgacggaacgaacgtatcggatacacaacggccatgtgtgcggatggctgatgtgtgagattccgccccgctctaggcgaacggcatccagttgatcggcatgcccagaatcggcatcgcgcacaaggccacggtgatgatggcccatatggtgaacagcacggtgccgcgcccgccgcccttgggcgccggcaccactggagcaggtggagccccacccacttcggtggatggcgcgcccgccgggcgactgtgtttgagcccgcgcagtacgccgccccccagccgaatcatcatcgactgtggggcgaacacagtgaccagccagccgatggccatgaaaccgcccagcgccagcccggaagcggagaacggcacatcattgagcaacggcaccggaataccccaatccgcggtgaaataccaggagatggtgtgaacgggcagtgccagagccgcggtggccacggcggttcccgccatatagatgatgactagcagcagtatgcggggaatggccagcagcagggctttgaccagatgccagggaaaagtcgccacgcgaatccacgaatcggagtttttgcgctcgccgccgcgtttgccctcgcgctcaagctggggttcggtgttataggccagggtgagcagtagccacaacaacgcagtggccgcgatgatggccacgagcggagcatttgccgccagtgccgccagcggcgccgccagcaggatcaatggcagggtgccgcgccgcagatattcccctcgcttcacgtccaccggattgggcatgggaggattttggaccatggtttcggtgggggccgcttgggcggtttggtcgatgatgcgctgcaatgccgggcgaatggcggggtccaccgctgtgggctggttgcttgcgggatcccagctgctctgggcggtgccggacggggggaatgatgacggctgcggcgtggggagtacggtggtgcgctcggccagcggcgtggtcggggccggagtcgaatcggtgttggtcattggtgtggtggcgccggccattggtgtggtttggtccggcatcggtgtggtcgcgccggtgagtacctgtgtgccggcgtcgtcggtgaaatcggcagcagcgtcgggcaacagttgcgtggcctgctccgcaccggccggcggacgtggcggcatatcggctaagggcagcgtggcggtagcggcgccagccggcgagaatacggcggtttcgccatcgccgttatcgcccttattgccggagaacacggccatggtgggagcctcagcggcttcctcggccgcgcgccagatggttcggggattattgcggtcaacgccgccggccgcgccaaaagggggcatcgcctccgcggcttcggcaacgatcgcagccggttgtccagccacggctcccgcggcgaacggtcccgcctgctcgccctgccaagcgttgggattcaacgcatccaaggcgatggcattcagcaattgatccggcgtgcaacgatccctgcgatccgggtccagtgcagaacggaaggcagccaatgtgccggccggtagtccggaaagattcgcgttgcccgaggcctcgcgctcaagtaccgccatcatcggcttggtgccgaacacaggcgcgccggttgcggcaaaagcgagcacggacgccaccgaccaccaatcggtggcgtcgtcggattcggcaccgtcaataatctcgggtgcgatgaatccgggtgtacccatcactaggccggtgcgggtcacgtgactttcgccctcgcccatcgcgataccgaaatcgaccaataccggtccggcggccgacaccatcacattggtgggtttgatgtcgcgatggacgatgccggccgcatgtacggctttggtggcttcgatgagcttgcgggccaagcgttccagatcgtcgcccacataccggccattggcggccacatcatccttaagattcttgccctcgatgagttcagtgacgatgaacgccaacgtatcgtcgagttccatatccacgatgccgcacacacccggatgattgaccttcttcaaggccatggcctcgcgccgcaggcgctcgcgcggcgtgacatcgggcttgaggttggggtcgtgcagggccgtggacgcagagccggagcctgccactgactcgtcggtcagggagtcgcgcagaatcttcatggcataggtggtgccgccgtcgtcgcgcacccgccacaccgaccccatagctcctgagccgagccgggagatcagcgtatacccaccaaccacttcgccgggctcaagattcaacgcgttcaaatcgctcatgccctccatcctaatgccttgccggtgcattattctggctctctcctgggaggccgagcttgatatttcttggctcccctctcagagaggggagccaagaataaatgccgtttacgtattgagaagtgccgtttacgccattaaggtcgattgccctgaccggatgtggtagcaaattatgcgctcgaaatgacaggataggtgcgtgggcaggtgcgccagtcgtgaatttgcgactctataaccatcggcatcaaggatgtgtcggcggtgacccaaaggtgagccagccgggcacattcaacagtggcacagcgatgcaagggcagtatcgtgagccgctgatcgaatcgataacgatatcagattcgaatgccgcgacttcgccggtcgtaccttcgaatacttctccgaagacggctacctgttcggcgtgatggcctcccagcaggtcgctggcgctcaggccaaggcctgaggtgtgtctccgataactgaatagctaaatagaatggacggcctgctgagtgctactcaacaggccgtccattgtgtatctgaatgcgaaaagtcattatatggaacggaatatatcgatactgtgcattgtgccgattactgattccgacgcaagtattcgcgcaggaagggcacggcaaaatcgacttcgcctcgttctgtttcgcggataacgaaggcgtcaaggaggcgtttgcggtaggtggcggcatagttaggcgttttgcccatgcgctgtgcaacattcacggtgggagagggaccatctgacgctgccatggcttcgagatactcacggtcgtttttggataagccttgcaactccgggatgcacacggcgttatcaaggtcaatacgtgcttcctcgatacctgccgtaacatcagcgtcgatgatggtatccgagtcccgcatgtctgcggcatcccagatatggtagccaaccagttgaatcatataggggtatccggctgtcacattggctgcagtgcttaattgagcgtcggtgatggacatgccggaggcgcggaatgttgtggcgaaagcatcgcgcacttcatcaagaggaatatctgtgagcatgttcgttttcgcgcgacgtaggaacgtgatgacttcgtcattgaacaaatcagaaatcatctgtgggagaccggcgaacacgatggcgatattgcgtcgttccctgatttgatgctgtatggcagtggcgatggcaatcatgtcggatcgctcagccgcttgagtctcatcaatggtgataagcaacccagcatggcgcttctcaagcgcatccaaccgtccggcaatggcacttctcaacgtttcgggcatacgcttcggggatagttcggcttctccgaggccgatgcccgctccagcaaaagtcaacgatggtcggatagtgaggtggtcaagggcccctcgcccggttcgtaaggcatcaacaaggcgttcgcatagtccggcagaggccgtttcttcgatgacatcccatctgcgcgctttggcccggtctccgaacatagtgagcatcacggtttttccggttccacgagcgccggtgacgagcataatgcgccctggggcaccgactccgttatcgagacctttctcgaaatcgcggataactttgcctcgtccgatgagcaggggcggttcccctcctgccgttggcttgaatgggttttcctttgccttcatgtggaccgcctcctcgctgaatcaacctaaaataaaaattatcaaaagtatcaaaaaaataaaaattatcaaaagttgggttgagccgactgaagaaaacagccgtggcgacaatgattctgccgcaatccgcggtgacaacaactgacgcggaccttcttggcagaatcgttgtttgtcccgcttcgccaatcaacgtcgctcaagttcggtgcgcagaccggctaccgtagcggtcagctcacgcacttcctcgcgcaataggtcgatttcgggattggctgatgttgcaatagcctcttgcgcggcttccttggccacttccttctcccgagcgtcctcgcgccgatccgtctccagattgacctgatccacgatccacgaagccagcgtggccgtcacaataccgatcaacgcgatgccggtgaacatcagcaccaccgcaatgatcttgccttggaaggtgaccggcgagaagtcgccatatcccacggtggtcacggtcacgaacgcccaccacaacgccgtgccgaagtcggtgatcgtggatccggacgccccgcgctccacggaatacacggccagcgcgcccacgtacatgagcattcccaccgcgccgaccgcgtatacggtgatgcgcccgcgcaccgccatgccggaggtgcggttcagcacgtgcagcacggtcagcaaacgcaacagtcgcaagggccggagcatcggcagcgcgatggtcagcagcgtgaacaggttgtgcttgaaccaccgccagcgatcgtcggccaaccacagcgagaccacataatcgacgacgaacaccacccagatcacgttgatgacggtttcacacagcgcgatatgcgtgcgggagagaatttcccacgaatacaccaccagaaacaccacggacagcaccatcagcggccagtccgtccacttcttccacgtcttcagtcccatattccgattgtagtggcgcgtccgctgcgccactgcggagcatgactccggacatcagtgttgtatacgttcgtatacatttcacgttgtgtacgaacgtatacagcggtatttttcatctcgtatttcccttatgactatcaccacagtgatataatcaagaatatgtaaggagagagaaggagccggccaatggagaccgcatcgatcgaactgtggcatggctcttcgcatgtcatcaagcatcctgaatacgggctggtcaagccgaacaacgattatggccgcggattctattgcacgcgcagcgtcgagctggccaaggaatgggcgtgcgcgggaatggatgacggtttcgcgaatcggtacacgttgaccacggacgggctcctcttcctggacctgtcccagccgccctacaccatcctgaactggctggccatgctggtcgaaaaccgtcgtttccagccgaccaccgccgtcgccgcgcaaggcatcgaatatctgaaacaagtgtttctgccggatgccagtcaggctgacgtcatcgtcggatatcgtgccgacgattcgtatttctcgttcgcccgcgcttttgtcaataacgcgatttccatcgaccaactcgctgaggcgatgcggttgggcgagctcggcaagcagatcgtactcgccagtcctcaggcattcgcggcactgcggttccaaggctgcgaaatcgcccgcgcttcgacctaccacggattgcgtaacgagcgcgaccgcacagctcgcgaagcctaccgccgcaaaagtgcagaagccgatctcgacggcctgttcatgcgcgacatcatccgcgagaaagtgaccaacgatgatccccgcctatgatgggacatacttgccggacgccatggccaacttggccggcgccttcgattatgcgctgaacgattgcgggttgccggtcggcctattcatggacttcttcgccacctccgaggcggccgcgcttttcgggcgaggcacgcccaaatacgtgtgtggcatgtccggcgaggagctggtggccgaaatcatgcggcaaaccggttgggcgcgcattctcgatatgccgccagccgcactgcgcgccggctcaacacccgaatactgggccggatgggtactcgcatactgccaatggaccaggggagtgcggttctcggacattctcgatgtgctgtcgctcgacgatatcgtgcgactgtacccgactctgcacgaagccgacgaaagccgattcgtcgacgtgtacgacgagcgggccgcccataatcgcaccgagggcgactcccggctgcacacgatccgcgtgcgcgccggactcagccaatccgggctggcccgccgctccggcgttaccctgcgctccatccaaatgtacgagcagcgccgcaaagaccttggcaaagctgccgtctccaccgtgctcgctttggcccgcacgcttggctgccgcatcgaagatctgttggagccgtaaagacgcggagtagtatcgcgccgcatcgattctgataactgaacaactacttttaaggcccggccggatgctcgtttggacatccggccgggccttctggctccacacggggtgccgaggtatccgttctccgcttcgaggggctgatttggccttccgtagaggtttactcccgtttcgaggggctggtggcccgctagaacacgggtataaacggcttcgccccaccgtcattccgccattttggggatgcgcttacttgagtaccagcccctcgaaacggagatagatctccggaaagggtcaaaacagcccctcgaaactcaagatggcggttgcagggcggttgaggatcagtcgaagagcggttcaaacgcaaatgtgaacaatgccacatgtgattgggcgggtcgctgcacgccgattttcgggggtgcatgggaatggcggaatatcaacgaaaaaccctatatctaggtttgttatgtgacacgcgccactacatatagtgccttgatttcaaatcacaccgctgtaatatggccttcgcttcactgttcatcagaaccacatcaaggggagtcgccatgaccgtcaccgtgttcaccaagccgcattgcccgcagtgcgatgccaccaagcgccagctcaccaagctgggtgtgccgtttgaaaccgtggacctgacgcagaacccctccacccttgagcagctgcaggccgccggtttccagcaggctccggtggtcatcacgccggacaactcctggaccggctaccgccccgacctgattcgcgaagtcgcccagcaggtggccgccgacaaccgcgccgccgccacggtgtccgcgtgagtctgagccagcccgaattcgcggccgaaggcaagacgatcggcgcattggtctacttctcgtcggcctccgaaaacaccgcacggttcgtggccggatgccgtttgcaggacgaaggtatcaacgtctaccgcatcccgttgcgggccgccgacccggcgctaaacatccgcgaaccgtacgtcatcatggtgcccacctatggcggcggcgtggtcaagaaagcagtgccgattcaggtcaaacgcttcctcaacgatccagccaaccgcgagtggattcgcggcgtcatcgcctcaggcaacaccaatttcggtgaggcctactgtgccgccggagacatcatcgccgccaaatgcaaggtgccctacctctaccgttacgaactcatgggcaccccggaagacactgccgccgtgcgaaacggcctcgtccgcttcttcaccgaacagtaaatcttgaccccctcgaggtattggctcccctctccgaggggagctgtcaacgaagttgactgaggggagcaactgtctgagtaaacacacttctgccatattccaaggatttccaatgactgacctcaccgccaccggcctgccgctcgacaatactgccgacaccgcagcggaacagtacgacccggcgcacgattaccacgcgctcaacgcgatgctcaacctctatgacgccgacggcaagatccagttcgacaaagacaaggccgccgaacgcgaatacgtgacagggcacgtggccaccaacagcaagcggttcgcctccaccgccgagcgtctcgaatacctgatcagcaaccagtactacaaccctgcggtcttcaaccagtactccgctgaattcctcgaccgcatctacgagcacgtggaatccgccggctttgagttcggcactttccttggtgcgttcaagttctacacgtcctacgcgctcaagacgttcgatggtcgcctctatcttgaggacttcccgcagcgttgcgccgctgtggccctggagctcgccgccggcaatgagcagcaggccatcgaatacgccgacgaaatgcttgccggccgcttccagcccgccaccccgaccttcctgaacctcggcaaggcccagcgtggcgaaccggtcagctgcttcctggtgcgcatcgaagacaacatggagtcgatttcgcgcggcatcaacgcggccctccagctctccaagcgcggcggtggcgtggccctgctgctgagcaacctgcgcgagctcggcgccccgatcaagcacatcgagaaccagtccagcggcgtgattccggtcatgaagctgctggaggactccttctcctatgccaaccagctcggcgcgcgtcagggcgcgggcgcggtgtacctcaacgcccaccaccctgatatcctgcgcttcctggataccaagcgagagaacgcggacgagaagatccgcatcaagtcgctggctcttggcgtggtgattccggacatcacgttcgaactggccaaacagaaggcccagatggccctgttcagcccgtacgacgtggagcgcgtgtacggcaagccgttcgccgacatctccgttaccgagcattatgacgagatggtggccgacgaccgcatcaagaagacctacatcgacgcccgtaagttcttcaccaccatcgccgaactgcagttcgaatccggctacccgtacatcgtgttcgaggacacggtcaaccgcgcgaacccgatcgaaggtcgcgtgaccatgtccaacctgtgctcggaaatcctgcaggttcaggagccgagcgcatacaacgaggacctcacgtatgcgcatgtcggccgcgacatctcctgcaatctggcttcgctcaacatcgccaaggcgatggatggcggcttgggccacacggtggagacggcgatccgcgcactcacctcggtggccgagcacaccagcatcaacgcggtgccttcgattcgccgcgccaatgaggagggccacgccatcggtctcggccagatgaacctgcacggcttcctggcccgcgaaggcatccagtacggttctgaagagggcctcgacttcaccgacatgtacttcatgaccgtggcctaccacgcctaccgtgcctcgcacgcgctcgccgtggagcatggccgcacgttcgccagcttcgctacgagcgactacgccaagccggccggccagggcaactacttcgacaagtacaccgatggtcgtcgttcgctcactccgcgcaccgaacgggtccgtgcgctgttcgaacagtacggcatcgcgatcccgactgcggccgactgggaggccctgcgcgacgcgattctgaaggacggcatctacaaccagaacctgcaggccgtgccgcccaccggctcgatctcgtacatcaaccattccacgagctcgattcacccgatcgcctccaagatcgagattcgcaaggaaggcaagatcgggcgcgtgtactacccggccgcctacatgaccaacgacaacctcgggtactacaaggacgcctacgagatcggctggaaggccatcgtcgacacgtacgccgaggccacccagcacgtggatcagggactgtcgctgacgctgttcttcccggacaccgccaccacccgcgacctcaataaggcccagatctacgcctggcgcaagggcatcaaaaccctctactacatccgcatccgccagcaagccctggaaggcactgaagtccaaggctgcgtctcctgcatgctctgatcgttcgagggagcgtataccgcctttcttcggcactcgacgtaccttcgtacgccttcggcctcagacggcggtctccgcacgcattgaacaaccagagagccgttgttactcccctcactcggctaacgccgacagctcccctcagagaggggagctggccgcgaagcggactgaggggggctccaccatctaaggaaccaacaatgtcacgaaccatctatagggcactgctccggctgaccgcgccggaggagttcgaaaacaaatccaacgacgataacgacaacgacaacgagtaataaggaacactcatggcaccgatttccattccgcgcaaaccgctgaaactcatcgaccgcgtctccgcaatcaactggaaccgcctcgaagatgagaaagaccttgaggtctgggaccgcttgaccggcaacttctggctgcccgaaaaagttcccgtctccaacgacatccccagctggcagaagatgaccgaggacgagcacacgctcaccatgcgcgtcttcaccggcctgaccctgcttgacaccatccagggcacggtcggcgccgtctccctgattccggacgcgctcaccccgcacgaggaggccgtgtacaccaacatcgccttcatggaatccgtgcacgccaaaagctactcgtccatcttctccaccctgtgctccaccgaacagatcgatgccgcattcgactggagcgagaacaacgagtttctgcagaagaaggcggaaatcgtgctcgactactacgagggcgacaacccgtacaagcgcaaggtggcctccaccctgctcgaatccttcctcttctactccggcttctatctgccgatgtacttctccgcgcacgccaagctgacgaacaccgccgacgtgattcgtctgatcatccgcgatgaggccgtccacggctactacatcggctacaagtaccagaagggcatcgcccagctgagcgatgccgagcgtctggatctgcaggactacacgtacgacctgctcaacgagctgtacgacaacgaagtggagtacacccagtcgctgtacgaccgcgtgggcctgaccgatgacgtcgagaagttcctgcggtacaacggtaacaaggcgctgatgaacctcggctacccggctttgttcccggctgagatttgcgatgtgaaccccgcgatcctggccgccctgagcccgaacgccgacgaaaaccacgacttcttctccggctccggctcctcctacgtgatgggcaaagccgaagaaaccgatgacgacgactgggacttctgattcacctcggcagcagcaccgtcagcacaaaccagtggtcctcggtgcgaatcgtcacttcgccgccgtactgcatggcgatgtgccggattgacttcacgccgaacccgtgccgcgacgaatcacgcttggtggtgcgcagcgcgccggtcgaatccttcttgagcgcggaatcgtagtagttttccacgcgaatcaccgtgaactgcccctgcccgtacagcgcgagccgaatcagccgctgctgcgggtcgggcagtttgctggtcgcctcgatcgcgttgtccagcgcgttgccgaacagcgaggcgatatccatcgacgacatgccctccagcagcttgccgtccgccacggcggtcagcgtaatgccgcgatccgcgcacgtgcgcattttggtggtcagaatcacgtccagcaccggattgccggaatgctgctgggcgctgacctgcgccaccgaagcctccagctgctcgaagccggccgccgcatgctccgggtccacctccgcgcgcaacgccgcaatctgatgcttcagatcatgcgcaagccgcccgatcgactcgatattctccttggacgccagatactcctgatgctggctttccagctgagcgttgatggacgtcagctcggcgctcgcctccatgcgccgcgcctgctcctgctgcgcgtacagaatcgcgaacccgcagaaatccaccaacgtgcggatatagaacacctcctggcccactgtgccggagaacggcgtattggtggacacaaagctcaggttgctcatggcgaacgtcacgatggtgatggctcccgtaccgattgccagctgcgctgtggcgacggtcggcgcatcattggcaaaattgccgcgttcgattagccacgccaccgtgaagcagacggcgtacgtgaccgccagtaacagcagtgagaacaactgcgcccgctcgaggttctcgcccaagttcaggaacatcaccaactgccagtgcaacgaggcgaccagttcggccagcacgaacgcgcgcgccgcaatatacatgccctcgcgcttgccggtgcccgcgccgaacaagataatcgcccacatgccggcgaacgcaagcagcataccgatgacccagaaccagatgggcatcacgccgtcgaaatactggatagcgatcatcgccggcagtccgataagcccgaccgcaatcgtgcgccgcagcggcacgcgccggtagatgaccagcagatagaccacgcaggccagccattcgcagatgccggtgtacaggcgcgggatgtccggcagcgcattggtgatggtggtgctcatcacgccgcgcccatgtagttcgccagcgcggtcaggaacgccttcttgcgcggccggctcacccgcagcagctcctcgttcgacatcacgcagtcctgcccctcgacgcccaccacatgccgcagattcaccagatagcaggagttggaacggaagaagtcctgatcggccagtcgctcctcgaaatccttgagcgtgccggacaccgagagtttgccgctcaacgtatgcacgatgatcgtgtgccgaatcgactcgagatacagcacatccgccagctccacgcgcatctgccgcccgccggcctcgatgagcagcgactcgctgccacgccgacgcaccatatcgatcgaccgtttcagctcctggcggaatgcgaagtacggcaccggcttgagcagataggagagcgcctgcacttcgtacccgttgatcgcgtactgcggggcggcggtgatgaacacgataaccacagtgttgtcgcgctcgcggatgcgccgggccgccgccatgccgtccatgtgctgcatctcgatgtccagaaacagaatgtcgtacatcggcgtatatttctcgacgatttgctcaccatcgtcgaatacggaaatcgtgaattccgtaccggtttcgctgcggtactgattgagatagtcaagcacccgtttgcaggaggcgggatcgtcctcgaccactccaaccctgatatcgcgcatgaccgcaccttcctgtcgcgtcttctccaagcatcttatcctgatgtccctgatatcggccggattccagccgcgttcgcacggcggcgctacgctggagatatggaacaggatccgttggtcagcatcattattccggtgtataaggtcgagaagttcctcgacgaatgcgtggcgtccgttgccgcgcagacgtacgccaatctggagattctgctggtcgacgacggctcgcccgacaattgcccggccatgtgcgacgcctgggccgcccgcgacccgcgtatacgcgtgattcacaagcccaacggcggcctgtccgacgcccgcaacaccggcatcgccggggccaccggtgcgtacatatacttcgccgattccgacgacaccgtggcccccacgttggtggaggactgcctgaacgccatgcgtgaatacgatgccgatctggtgatgttccagttcgacaccatctccgagaacaacaagccgctgctgtccaactatcgccacaacgacttcaccgaggtgcagatcctgaccccggtcgaggccatcaaaaagcaagtcaaggctgagattgacggctatttctgggccttcctggcacccgcctccacctatcagggcaccggattctccttcccggtggggcgcaaaatcgaggatctctcccgtatctgcaacgtgatcggcgaggccacgcgcgtggtccgtctgcccaaggcgctgtaccactaccgcatgcgcgagggatcgattaccgccaactgggatccgcagctcacccgcgactggacccgcgccgccgacgaccgcgaggaatacatcgtccaccgattccccgagctcaagggcttcatgacgctgcaacagctgaatttctttgccaacctcgattacgagaccatgcgccagtcgctgatcgccgggctcaagatcgatcccgaggacgccgacgcgcttcgtcgtcgcatcgagggcctgaccaagtccgccgatgagggcgatgagccagtaccggaaacgttgcgtgagttgctcggactgctcaagctgggcatcaccaaggtggccgatggcacgttcggtaaggccgatggcagcggtactgatgacgatgccgagaacgatgacgtaacgctggccgaccgtttccgcgacatgcgcgaggactggcgccagctgcgcatccagcgcatcgaaaacgccgaggagcgcaaggccgagcgcaaagccgcccgcaacggcgtcaccttcgagtctgtgttgcattagtcggcgactgatggaatccgtcagttcgggaagagcaggcctgctctacgccgggcgtgccggttcgcacgttcgagaaacaggcgtgtcatgggccgaaccacacaacacccccagaaacgcccataaagttaactacattttcagacacgccacttgccttggtccacggtccgtgtatagtagttctcggctcaacgaagagaaccttcactgaaccggaaaaaagtaaacgctgaagcttgcagtttccgaaagcaaagttgtacgtcggtggcgagggcggaagcgcagtaaagaacaaatccctttacaacggatcgtgaggcacgtacctgcctctgaaaggattagtaattatggcagaagtcgttttcgaccacgtcactcgtatctacccgggcaacgataagccctccgtggatgatctgaatcttgatatcaaggatggcgagttcctcgtcctcgttggcccttctggctgtggtaagtctacgacccttcgtatgctcgccggcctggaagaggtcaacaagggccgcatcctcattggtggcaaggatgtcaccacgatgcagccgaaggaccgcgacatcgcaatggtgttccagaactacgccctgtacccgcacatgaccgtggccgacactatgggcttcgctctgaagatcgccggcactccgaaggaagagatccgcaagcgcgtcgagaaggccgctgagatcctcgacctgaccgagtacctcgaccgcaagccgaaggctctgtccggtggtcagcgtcagcgtgtggccatgggtcgtgcaatcgtccgtgagccgaaggtcttcctcatggatgagccgctgtccaacctcgacgccaagctccgtgtccagacccgtacccagatcgctgccctgcagcgccagctgggtgtcaccaccctgtacgtgacccacgatcagaccgaggctctgacgatgggcgatcgcatcgccgtcatcaagctcggtatcctgcagcaggtcggtgctccgaccgagctgtatgatcgcccggccaacgtcttcgtcgccggcttcatcggctccccgtcgatgaacctgaacacccacccggtggtcaacggcaaggcgaagatcggtgaggacaccgtggacctgccggctgaggccgtcaacaagctcaccgccgaagacaacggccagatcgtggtcggcttccgtcctgaggacgctggcctggccccggctgacgacccgaacgccttctccctgaaggttgtgaacgtcgaggatctgggctccgatggctacatctacggcaacatcgtcaccgatggctccgccgctgaggcttcccaggtcatgtccgaccagaacaagctcaccacgattcgtgtgaatccgcgtgcgctgccgaaggttggcgcgaccgtcaagatcaagatcgacccggccaagatgcacctgttcgctccgtcgactgagctgcgtctgaactaatagatacttggcgaggtctaatcgcttcgtcaaccattaaacgaggttattctcttcctctcttatgacctcgttggaaaagccctgcatagctgcggggcttttcttttgccttctagacggtctgagggagagaccaaacggtgttttcccgtaaacataacgcgccgaagtcgtggccaaggagcacacatcgcgaacgacacgtaaaatcgaacacatggagttgaacgaattgccccagatggatccgcgtgcgctgaaggccacgtctgtcaaagccgaagacgaacacgccgattcagcggaaccgcaagcactgaaaatcaccgccgccagctcgaacccaaagatgttcacgctgccctggcacaagcccttggccacctggcctgaggacctgctggccaacctgccgcgaggcatctcccgccacgtcgtgcgattcgtgcacgtgggcgacgaggtgtacgccatgaaggagatcacgcgccaggtggccgagcgagagtacgagatcctgcgtcgactgcagaagctcgaactgccaactgtgaccccgatcgccgtggtcaccggccgtcacacccgtgaaggggagccgctggaggcgattctggtcacccggcacttgaagttctcactgccgtaccgtgcgctgttcgcccgcaacctgcgcccggacaccgccgaacgactgatcgacgccctcgccgtgctgctggtgcgcctgcatctggccggcttctactggggcgatgtgtctctgtcgaacgtcctgttcctgcgcgacgccgacgctttctccgccttcctggtggacgccgagaccggtgacctgcaagtccagctcaccgacggccagcgcgaatacgatatcgacttggcccgcaccaacatcatcggcgaacttatggatttggcgtccggcaagctactgcccggcgacgtggatgagatcgaggtgggcaaccgcctagtcgaccgctaccactcgctgtggagcgctctgaccgacaccgacaagttcaacccggacgaaatgtggaagatcgagcagcgcgtcaacaagctcaacgagctgggcttcgacgtggacgagctggaaatgaagaccgccgaggacggcaagcgtgtgctggtccgcccgcgcgtggtggacgccggctacgccaaccgcaagttgctgcgcctcaccggccttgacgtgcaggagaaccaggcccgtcgtctgctcaacgaccttgacgcctaccgtgcctccacgtggcgtgagggcgaggatctggaaatcgtggccaccgattggatgcgcgaggtgttcgagccgaccgtgcgtatgattccgcgcgaatatcgctcccagatcgagcctgctcagttcttccaggaggtgcttgaccatcgctggttcctggcggagaaggccggccacgacgtgccgatgggcgaggccgtgaccagctacatcgacaacgttctgccgagctacaaccttgattccaaggcactcgccgaacttaacgaagaggccgattccggcgtcattgacgacgaatccacctacagcgacccggacgacgacggctacaaccccgatgacgatccggatgcggcagtgtggagtcattaagcggacaatccggtggactgtctgtaggtgagcccatcacacaaagaagcccctcaaatagaggggcttctttgtgtgtacaacctattacggcctcaagcgacaatcactccgccgcagccttgcgccgtgcgttggacaccgcgtacaggctgatacccgccgccactgaagcgttcagcgactcaacagacgagctgatcgggatgccggcaatcgcgtcgcaggtttcgcgcaccagtcggcccaaaccgctgccttccgaaccgagcactacaacgagcggatcggattcaaagccagtctcgccgacgagcttatcgccgccaccgtcaaggccgacaacgtagtatccacgctccttcaagccctcaagtgccttagtcaggttcaccacgcgcgccaccggcatatgcgcggccgcaccggcagacaccttccaagcggcggcgttcactgaagcggaacggcgttccggcagaatcacaccattggcgccgaatgcggccgccgaacgaatcacggcacccaggttctgcggatcggtcacgccgtccaatgcaatgaacagcggtcgcgcagcaatacgggcggccgccgaattcgcggcctccattgccttggccttcttctcagcacgatcggccagctcgttcagcgaggagtactggaacggatcgaccttcagaatcacgccctgatggttgccggagcgggcgatacgatccatctccagacgatcggcctccagcatgtgcaggccgttcataccagcgattttcacgatttcgcgagtacgatcgtcatgttcaatacgagacatgatgtacagcgtggaagaaggtacgcctacgcgcagtgcttccagcacggaattacggccgtacaccagatccgaagtatccgccgaagcgaacttgtccactcgacggcgggctgccagacgcgggtcggccatctgccgacgttcggccgctttcttggccttatacgccttgtgatagacgcggtcctcggctttgggagtggggccgtaacccttcagtttgttgcgatgcttgccacccgaccccttggtcggtccttttttgatagccataggtgctattgtcccagcaccccgcgccaaaacgcggctattccgccgtcggtagccggtaaggtattgagagtgaagaagcagcgcatgatattcggactgtccctgctgtattggggattatggttggcgattctgattctgtggatgggtcgcttcgtgacctcattcttgtcgatatatttggtttccgcgctgcgcctcgatgagggtgtggtgggcacagtcgtggccatgtacggcttcggcgcaatcatcggctgcctgttcggcggtaccttgtccgacagattcggccgccaatccatgattatcatcggcgaaatcggcgcagcggctgccctgctggtcgtttccgtgctcactgaccccgtggctttaggcgcggccctgtttgtctatggtgcgttcgcctcactgcccagcccggtcatcgccgcgtatatcgcggatgtggtgcccgccgaacgtcagcaacgtgcgtacgtactgcaatcgtgggcgattaattttgggtacgcgattgggccgattgtggccaaccagctggtcaagatctcgtattcgctgatgttctacgttgaagcggcggtgatgatagccgtcacgatattgctgattgcgttcttccgcgaggtgcggcatttggggattactgtatcggtgccaagtgcggtgcgccatgaagacgaacgcagtgttacgcatgcggaattcgccggcgtcgaggggccgaatcactcggatgccgcaccggctgccagtgccaagggctccatgtctcgcaattggcggcgcgtgctcactgatacgccattcctcggcttctccctgctgatgttcggctacttccttgtgtacttccaaagcacctccggcctgcccattgccatgacggaccttggtctagggctgggcgagtattcggtgctgctcaccatcaatggcggtatgttgtgcctgctgcagattcccgcgatgaaactgttctcgcgcatgggcaattcacgcgtgctggtgatgggcctcgccgtaaccgtcatcggctatgcggtgcaggccgcggcccattcctggggcggattcgcgcttgccgtagtgctgtggacgctgggtgagctgggcacattccctatcgccaccactacggttgccgccatggcacccgcgtcggcacgcggcacgtaccagggcgtctacaacgtagtgtggtcggtatcgattgcgctggcgccgctgattggtggctggaccatcagcaacttcggcggtcgaacgctgtggatcgcctgcacgatagtcctgatcgccgtaaccctcggtctcaagctcaccaaaggcttgcgcgaccgcgccatggccgccaacctgcgcaatgcctcacagtaaataattcccgtcaagaaaagtgtgaggcatccgaacttttccgcacaattaaacatggtccgcaacggcgggatctcactgatatgacgctctgcatgtgcgattgaggcatcgtaatcctcacgcttttcttattgagaatcattctctgcgatacgttctagaatcatcacaagcaatgcgccatatacaacggcagatataggcggtctccttcaacgcgcattggtctaggatgcagcacatattgcatgccgacccggctgtcgaatttattcttgaacttatcgagcgatgaggttttgtatctctttgtcgatttgacctccacggggcagaccctggccttcatggcggcatttgaatactccccgataaggagaaaatcaatttccatgcggtccttcgcctgacgggaatatcgggaatagaagaacaggcgatggcctgaggcccggagctgctgcgcaacgacattctccaccagcatgccttcattcacttccagcttgccgaacaggatatcgcggtacaactcattcgacgtgtatgcgcggtcggcaaacacttgcgttactaacaagccggtgtctcccatatagcatttcatcgtggagtcctcttggtgtaggcgcaggcccacatgcggatccgtggcattcatgcagcggttgatcaggaacgattcatccaaccagaagaaagcattgccatattcacgttcgcgtgcgttttcgcctaaagacgacagtgtgaacttcttttcatgcttggaaagttgccctggaatttcatcgaagatacgtttgacccgttctttcgaatctccgccgtatttctctatgtcctgagcgtacaggtgcaaaatttggcgtttcactcgatcgacattgcccatatcggatgttcccagataacgctctacggcctgcggcatacctcccaccagcatgtattcacggaacaggcgttccgccttgttgtccagcagcggagacattgctcgcctgtccgcaaaagattgccgtatcgcatcggcgagtagttcttctcctctggcccatagaaattcctcaaaatccatgggaaacatgctcaccgattcttcctcggagggaatcaagatgttttcgacattcttcttaatggagatcagggagccagtctccatgaagtcatatcgaccatccgcaacgagttgtttaaccgcgctgcgggcaaaggggaagagctgtacttcgtcgaaaataaagagggtgtcacgctcatgcaggcgtacgccgtaatagacggaaaggtccatgaacagcgtgtccaaatgatccagattgttgcggaacgagtctcgtaccgcctgcggagccttctgccagtcgataaggatgtatgagcggtattcgttcttcgcgaattcctcggcgacggtgcttttgccgacgcggcgggctccttcaatcattaacgcagtagtacccttgctcgctgctttccatcgccgtagatggtcgtatacttttctcttatacatgttaagctcatattcctagtattttcaaggatttatgagctattatatcacgattcctaagttatataatgccgtaaaactcactattcctaggttatgaattgctttgattctcacgattcttaagttatatgtcgagctgtcgaatgctctgtaacggtagtgcggcatacgttcttcacgattcgctgtaagcgttattcggtttggagatacgggcaagaccgcatatggtgagtggttcttatcgagaactattctctgcgcgtatgatgtatggcatgcaataatccaacaaaccatcgctggcattgacggcaacgaggcgcgattctttggctatgtggccgacaacagcgaggagatggaaccggaccgcatacgcccggccatcctgattttgcctggtggcggctacgccatgacctccgaccgcgaagccgagcccgtggagaatacgctaatgctcatccaggcctgccgggccgccggcgtgagcatcgaagcacacctgttccccgaaggcagccacggcctgtccctggccaatgcggaaaccgctggcaacggcttctatgcgcacatcgtcgaatgcgtgcagtgttggcctgatttggctgaagcctggttgcgtcgcctgttctaggcaaaacgctattacgctgtgcgccaaatgcgccacgcagttatggaataatagcaatcgtatgcatcggcagcagttgcgccgatgtccataaccgcgcagtcctgtgcgtccagccgggagagaaaacccggcagcggccgcaaggctgactactccgcggcaataccaaggagaacattatggatgatctcaaagatcaatccgcagtgtccgcgaccgcaacgaacgaggtcgtggaatcggaagaagtgcgcgcgcaggaagcgctattgggggaagctgatccaagtctgaccagtgccgacgacgtggccaaagccctgaatgtcgacccatcccagggcctgagcgaggaagaagccaagcgtcgactggccaaattcggcccgaatgagctcgccaccgccccgcccgtaccgaaatggaagaaattcctggcccagttccaggacccgctggtctacctgctgatcgcggccaccatcatctcggtgatcgcatggttcatcgaaaaggccaatgcgcagcccggcgcggaaggcggtgaagtgctgccgttcgacgccatcgtgatcattttgattctgatcgtcaatgccgtgctcggctacatgcaggaggccaaggcggaggccgcggtcgaggcgctcgcccaaatgacggccccgcagacctcggtgctgcgcggcggcaaagtcatgcgcatcaacaccgccgacgtggtccccggcgacatcatcgtccttgcggaaggcgactcagtctccgccgatggccgactggtcaacgcggccagcctgcgcatcgccgaggcctccctgaccggcgaatccgtgccggtcggtaagaagcctgacacactcaccgaagccaaggcgctgggcgaccgtgccaacatgatcttcaacggcacttccgtgacgcaaggcaccggccgcgcaatcgtgaccggcaccggtatgaacacgcaggtcggcaagatcgccgacatgctctccgccaccgaagatgagaaaaccccgctgcaaaaggagatggattacgtctccaagatcctcggcatcgcggtgtgcgtcatcgctgtcgtggtgctggtggcgctcgccgtgctggaaggcttcgacgacgtccatgacgtgattgattccttgctgttggccgtctcgcttgccgtggccgccgtgccggaaggcttggccgccatcctgaccgtggtgctggcgcttggtgtgcagcgtatggccgcgcacaacgccatcgtcaagaaactgcattcggtggagaccctgggatccgcttccgtgatctgctcggataagaccggtacgctgacccgcaacgagatgaccgtggagcgcgtggtcaccccgtccggcgcagtgcagatcaccggcaccggttacgcgccggaaggccgcatggttatgaccggtggcgtcagtcctgaatccgagcaggcccagattgtggccgatgaagtcgtcgccacgcttgtggccggcacgctcgcgaacgacggcgaactacgcgaggagaacggccgctgggagatcgtgggcgaccccaccgaagtctcgctgatcgtggccgcacgcaaggtcaaggccgatcgcaagatcacgcgatacacgcgcgttggcgagattccgttcacctccgaacgcaagcgcatgtctatcatcgccaaggacagcaccgattcagacaagctcaccgtgttcgccaagggcgcgcccgacgtgctgttgagctactgcacgcgcatccgcgtgggtggtcaggtccgtaagctcaccgaaggcgatcgccagtcgattctcgccaccgtcgaacgtctctcctccgaggcctaccgtacgcttggcgaggcctgccgtccgctggaaaccagttctttggctgatgtgcccggtgtaagcgtcaacgccgcaggccaggtgtccgacatcgccgatcaggccgaagccatcgaaaccgatctcatctggaatggcatggtcggcattatcgatccgccgcgtaccgaggtgcgcgactccgtgaccgaggcccatcgtgccggcatccgcacggtgatgatcaccggcgaccacccgctgaccgccgcccgcatcgcctccgaccttggcatcatcgccaaggacggcaaggccctgaccggcgaccagctcgaccagctgcccgatgaggccgcactcgacaaggccacgtccgaagtgtccgtgtacgcgcgcgtggcccccgagcacaagctcaagatcgtcgaatccttgcagcgtcaaggcaacatcgtggccatgaccggcgacggtgtgaacgacgccccggcagtcaagtccgcggacatcggcgtggccatgggcatcaccggcaccgaagtgaccaagcagagcgccaagatgattctggcggacgacaacttctccaccattgtggccgccgtacgcgagggtcgcgtgatcttcgacaacatccgcaagttcctgcgctacctgctgagttccaatgtgggtgaggtgttcaccgtgttcctcggtgtggtgtttgctggcttcctcggcatccgccagccggaaaccgtgggcgtcaccgtgccgctgctcgccacacagttgctgtggatcaacctgctgaccgatgccgcgccggcgttggctatgggcgtggacccgcagaccgacgatgtgatgggtcgtaaaccgcgtaaggtgacggaccgcgtgattgacgcctccatgtggggcgacatcatcttcgtcggcgtcattatggccatcgtcacgctgattggtatggacatgcacctatccggcggcttgttcaccgaccgctcggtggatgccatcggccatgaagcgcagatgaccgaggcccgtacgatgggcttcacgattctggtgtttgcccagctgttcaacgcgctggcctcccgttcgcatctgcagtccgcattcgtgggtctgttctccaacaagtggctatggggtgcgattggtttgtccgtggcgctgcagctcgtggtgatttacgtgccgttccttaacggtccgttcggcaccgtggcattgagcccgatggcttgggtggaatgcatctgcctggccgcaatcgtgctgattgcctccgagctacgcaagattgtgctacgtgcgatagccaagcgttaagccatcgcaatagccctgattgtgggcatatagcagttggccgggctctggtattcagggcccggcccactgctatatccaaacggctcctcatggggcggtaattatcccatggggcggtaatttcctcatggggcggtcgctgaaaacggcgttattccgcgaaaaaggaaaatgtgctaaccgccccatggggaagttaccgccccatgggaaacgggagaacgctgcagacctcagttgttgctgccgtcggtgccgtcagtagaggtggacccgtcttgagacttctgctgcgcctgctgcttggccttctgctgtgcctcttggtcggccttccgctgagcctcttcctgagcttgcttggcggcatctgcctgctgcttggcctgcatcgaggcggtgatgtcggactcggccttctgcagtctagaaatcgcattgttgacgtcggattcggacggactggtcccgttcatcaccgtattggcctcggtgatggcgttttgcagcgcggtgcgggtgttttcatcggccacactgcccgcggaattatccagtgtgccctgcgcctgcgaaatagccgagctcaggttcgatttcagtgtgtcggtatcggccgtcgcctttgaagtattaacggccttgatcgcattgttgatggcatccgtcttgtcagccatgtcgctggcatcattctgcagctctttagtgtgagacttcagctcagtggcgttgaggctggaatcgcacttggcggtgtcggtcggattgtcggcgtcttgcaacgcctgattcagcgtggtgagcgtattggcatcggccacatcgctggtggatgtttgcgcgctggtttggccattggatatggcggtggtgagcttcttctgagcattcgtgtactgcttggccgctaccttgcactcggccaatgccacggcttggctcgccttgctgctgttggaatgccaccagagcaggccggcgacaaccagcgctatcacggcgactactgctacggcaatgccgacgattttgcgggtgttctttttgccgctaccgccgtgacgaggctcggcgccatcggaatcgtcctcatcggagacctgattcaacggaatggagggaggcatcacagcaggctgagcctgtgccgaagcagccagggcggccggttggaacacctgtgtggctgcagcatcatcggcagacgctacttgcgttgccggcatggcaacggtctcaccggatacggtggatgatgcgccgtatgcctgtgtggccacagctgaattaggctggaatgcctgtgtggccgcggtttcggcattcggcatggcctgagcttcgaaaagctgtgttgccatgacctgatcaggccggaatgcttgtgttgcctcggcatctaccgcaggctgctcggcctgactgggctggaacgcttgtgtcgcggcgtttgaagctgccgaaacaggcgatgtcgccggtgccgctggtgcggctggtgtcaccggcgctgtcggttccaccgggcggaagctttgcgtcgtctgatcccaaacgtattgctgctggccgggcgcagcggcgattggtgtttcggatactactggctgcgtggctgccgccggctgtggtgcttgtgcggcaaccgcagccgggaattgcggcgagaacggttgcgtcatggccggatcgatgggctgtgtgggctgtgcaaactgcgtcggctgtgctgcctgcacagattgcgggaactgcagagccggtgtggcttgtgtcgctggctgcgcgccatatgctgccgtctcttgcccgggaatcggaggaaccgttggcctgaccggcttttcgtgctgctggaagtcgaactggaacccaccatcgctgttggtcatgacatctccttgggattaagcaaatggccggcatccgccggccgaatggtacgtcgcaacgctcagtcgtcgatgtgcgcgcggtagaaattctcgtaggaacggctcggcgtcggaccccgctggccctgataatgcgagccggtgcccttggagccataagggtgctcagcgggcgagctcagctggaagaagcacatctggccgattttcatgccaggccatagtttgaccggcagcgtcgacacattagacaactcaagcgtaatatgcccctcgaaaccggggtcaatgaagcccgcagtcgaatgggtcagaatacccaatcgacccagtgagctcttgccttccagacgggcggcaatggacgggtccaacttgacgtattcccacgtggaacccagtgcgaactcgccggggtgcaaaatccacggttcgtcgggatccacctcgaactgttcggtgagcgcgccctggttttccgccggatcgacataggtgtaggcgtggttattgaacaaacggaagtaccgatccaatcgcacgtcgatggaagcgggctgcaccatttcgggggtccacggatcaagtgagatatgacctgcggactgtgcggcgagaatatcgcgatcggacagcagcatgtgaaaaactccttgggcaaataaatactgccttcaagtctagcgccttgggcggaaacgtgagaggctcctcacgcttccgcggtccatcaatcgcaagtattctcaggtttttctcagagaaacttagaggtagacccagaaagcagtggttatataaatgatgtcagcggaaagctgatcaggagccgcagcagttcccgacaattgaaccccctttcttcttctctctcctttctctccccggcgggcaaccgccggggttcttttttgccctgaatcattcccccgaatgaccgccattcccaagccatagcggtacactggctgtgtaatcggcaggaaggggggcaccgatggcccgcaacgatgaggactacgatttcttcggcgatggtcagtatgacgattcgcgcagctcacgtcgtgcacagaatcgacgcccatccaggcggaatgccggccggcgattcgccgctacaaaagccagcagcccaacgtcgatattgtgccgcagacttgccgttgtcagcggactgctagccgtcgtggtatcggccacctcggcggttcatgaaatcgcgccttacgccatttcctttatgacggcagtgccaggacgatacattgcgttgacggcggcggtgcttatcagcatcaccctgattctggtcatcgctgcgcgagccaccatgcctcggtacgccactcacgggggagtgggcgcgggcggcatcatcgcactggtgtgcgccatagtttgcttggttatcggcgtggccatgggcgtattgttcccggaaggactgattcagcagtcgaacgacaaggcacccgtcgaagataccgcacagatggagcaaggcatagaacaagctgccggcgcgtgcaaagaaggatggcaggggcttgatacgggcggtttgccaggcatcaccaccgtacaaatgtgcactgatccgagagtggccttcgtgtcctttgaatcggaatcgtccgcagccatcagccgggcacctatcgaaagcaagatttccgaactgctgagccaatacgctgataatgagcaaacgaaaggcgattggcgattgctgaacggcaaacgctggatggtgttcggcgagggcagcaagatgaccgcactgcagcagcagtggggcggcgaacttgagacaatcaccgcagccgcagacaccgcagccgcaaacagcggtaatgcctgacagattgccggtatcccctggaaagtcccaaggcgattcggcgcggattacccaatgtgactgaaatcatggtccatcgttttccgcacagcgcgcaagacctctatattggattggtatgagcaaagaagcgaatgccagccagcctctgatcggccgcgaatccaccactgtgcctggacgttttggcgagccactcaccgtggaacacagcgtcacctcgcgcggcggcttcgaccagcatgccacgcatccgctgttcctgtgcctgcatggatggggatccagcgaagaagacatggcggccatcatgcgcctcatcgctccatataacgacttcgtggcattgcgcgggccgctgacacttgcgccggcccgtgaaggcagtcccgaccccggcaactacgcgtggttccacgatgccctgcctatcggcgatgatcgtgactacgacgcgtatgccgccgccacagcagtcgaccgatgggtggccgacaacattcccgccgaccgtgacgtggtgccgcttgggttttcgcaaggtggactggtcgccgtgcatttgttgcgcatcaaccccgagcggtaccgggccgtcgtctccctgtccggcttcaacacacccggtcaggtgcccggcacggcccccgccgactctcgcctggccgattacgatatccccgtgttctatacgtacggcaagaacgatggcgtaatcccgaaatacgaactgttcgccaccgccgcttggttggaagagcatacgtggctgaaaaccaagagctaccacggtctggatcacaatgtgagtcttgaggagttcgccgatttgcgccagtggctgctcgacaacgacattacctctggcgtgctgtagtcagccgccatcactggaattggcgcggccgtcacagcaatcggacatcgagggcgcttgtggccggcgcggtcatagactgttctcccatgagcgaagtgagcactgcaagcactactgcacatactgaagagaatcatacggaaatagcaatccccaacttggctcccctcagagaagggagccaaggaaactagatgccggaatcggcatcgacctgcataacgtagatgttgcgcctcagggagcgggcttgggctcggttgatgtcgccggcttcgtacatgtcctgaatcacaccgagttcgataccgtagctctcgcgctttacgtcctcgacctgcgtgatggcttccgtagtgccgctcatattcggacgtgcctgcaatgaagcctcagcgcgacgataatccagcaacagcgccgaacaatgctcggtgttgtacgtatcctggcccatctcgtcaataagccggccgataacatgatgaatcgcctcgacctgcagttcgcgggtgcgcgcgaaaatctgatcctcgctcaccaatggtgtggtatggcgaatcttggacaccgtgcgtttggcgtaattgctcatctgccgctgaaacatgcgtaagcgaccgcgaatctgcgataccgcatgccccgaagtcggatcagtggaagtgtgacgcagcgtattcataatctggtcaagcatgcgctcgcaggcttcgacgttcagctcttgcgtggccgtatccgccgccggatgcgccttggtgtcggcaagtcggtcgcgcacgaattccttttcccaatgcagcgcttcgatctgcaattgctcgaatccctgaggatcggtatcgccgatgcgctgctgcaatcgtccgatgcgcttggtgtattggtcgattaccatcagaatcgcacggcgattctctggcgtgatgcgtccggtcaattcctccaccgtggcgcgtaacacatcgatggtcaccggaatcatttccgcgctgggatccttgccacggttcggggccaatagcggtaacaggaagttggccagcagcaaggtcacgataatcacgcctgacgcaatgaaaatcagctcgtcacgcatcgggaacggcgcaccgccggcaatgtaatacgggatggtaaacatcaatgacagcgtgatggttcccttggggccgccaaaggtcatcactgcggccgagcgccagcgttcgggtgtcattttgcggcgctggccggtgattgtatctcgcgcaacgcgcagcatggccgcaatccagaagaatcgaagcgcgattaccaccagagtgaccagcagaataatgccgatcagcacggtattgctgatatacgggtcagaccagctggccctcatggcgcgcggcagctgcatgcccagaagaatgaacaccgcaccgttgagcgagaaactcagcacaccccatactgaagtggaaacgatattcgtacgtgccacattcggccccacgccggtacggtcgaatcggatgaacaggccagcggccaccaccgacagaatgccggacacattgaattcctccgcgcccaaatacagcaggaagggcaggaacagttccatcagaatacgtgtggtggtggtttcccaaccgagggatcgcacggtctcgaatagccagttggccgctgctgctatcaccaggccaaataaggtgccgccaaagaaggagatcacgaattcgccggcggcctgccccacggcgaattcgccagtgaaggcggcggccagagcgaactggaagccgacgatgccggaagcgtcattgaagagtgattcgcctttcagcacgctgcgctgacgctgcgtcagcgaggcttctttacctagggagctgacggccaccgcatcggtcgggccgagtgccgcgccgagtgctaaggctgaggctaaggtgatggacggccagacggcatgcaaagtgaatccgaccgccgccatcgtgacgatagccagtccgatagccagcgataggctcagatccagcgttttcagcaacgccgacttatcgatttcgtgcgcttccagatacagcagcggcgcgataaacagcaccatgaacagttccgggtcgagctttgcatccgggaaaaacggcagatacgtaaccagcacgcccagcacaatctggaccagcggtgtggaaaccttcggtacgaagcgactggcaaacgagctcaccaccaccgccgcaatgatgcataggatgagctcaaataccgccatgttgccgccttctcgtattttttctccaccaaaagtatatgggaaccatgaagaaaacgttaagattgcggccgattatgcacatcatgagacgatatgagaaaaaggcatacactcgttggtatggaatatgacgaggcgatgcgctgcgcactggaactggccggtcaggccgcagccgctggtgacgtaccggttggtgcggtggtgctggatgcggccggccagattgtcgggcgcggatacaacacgcgtgaggctgatggcgacccgcttgcccacgccgaaatcatcgccatgcgtcaggcggcccaagccttgggcgcttggaatctcgccgattgcacgctggccgtcacacttgagccgtgcccgatgtgcgcgggtgcctgcatccagacccatatcggcaccatcgcgttcggtgcctgggatcccaagctcggtgcatgcggttcgatttgggatattccgcgcgatccgcatatcggccatagtcctgaagtgcacggcggcgtgctggaaggcgagtgtcagtccatcctgactgatttcttcgcccagcggcgatagacacggacgcattacttacctcacgcaaccaacacgcggcaccaaggcaacatattccatttcttctaccatcgaaaccagtagtgcaatgcaaatccacacacgtcgaaggagacaatatggccgagaacacctccactttcaccggcgccgccgctgacggcaccgcactcaccgccgtctacctgacccagcccgccgccaatgtggcgatcggtctggtgtttgccggcagcgacctgccgcacatcgtccactggggccgcccgctggccaagcccgacaccctgctggccgcctatgacgccctgaagccgcagcgcgtgtccggcgcgctcgacgacaccgcctggccgtctatcctgcccacccaggccgaaagctggatcggcgagcagcgcgtggtgctgcgccgcgccggcgtcgagctcttccccaagttcactgtgaccaatatcgaggccggcggcgtgctggaagccaccctcgatgccgtgtccggcgaaagctacaccgatgtggccggccatgcccacgccaccggcccggcccgcgtgcccggcgtcatagtcaccgcgcgcgatgaggagcagggcgtggaagtcgagtggcacctcgaactgctccccggcggcctggtccgtcagaaggccaccgtaaccaacctgttcggtgcagacgccggagccccgctcgagctcggcaagatcgagctcggcttcccgctgcccgaatccgccggcgaaatcctcaccaccaccggtcaccatctacgtgaacgcagtccgcagcgccagccgctgaccgtcggccgtttcgaaaagccgcagctcgccggccgccctgacttcgacgcatccctgctcctgaccgccggcgtgcccggtttcggcttcgagcatggcgacgcctattcggtgcacgtgggctggagcggcaactccgtgctgtccgccgaacgtctgccctacacaaccggcgtgatcggcggcggcgaactcctgttcggcggcgaagtgacgctcgctggccctggcgaaggccagaactcctacgacaccccgtggctgttcggctcctatggcgatggtctcaacgagatcgccgcccgcttccactcctacgtgcgctccctgcacccgcgcctgttctcgcacggccgtccggtgatcctcaacacatgggaagccgtgtacttcgaccacaacttcgatacgctgaaggcgctcgccgacaaggccgccgactccggcgtggaacgattcgtggtggacgacggctggttcggctcccgccgcgacgacacctccggcctcggtgactggcagattgcgcaggacgtctggcccgatggtccgaagtccctgaaggcgctcgccgactacgtgcacgccaagggtatggaattcggcttgtggttcgagccggaaatggtcaaccccgattccgacgtggcccgcaaccaccccgattggattctttcgcccaccaccggccgactgccgctgcagggccgcactcagcaggtgctcgatctgaccaatccggatgcgttcgactacatctacggctgcatggaccagcttgtcggcgagcttggtatcgactacatcaagtgggaccacaacaagctcgtcaccgagcccggttcccgccgctccggccgtccggccgtgcacgcgcagaccctcgccgtctacaacatcttcaagggcctcaagaccgcacatccgggccttgagatcgaaagctgctcctccggcggtggccgcgtggacctcggcatcctagagcacgctgaccgtatctgggtctccgactgcgtggacccggtcgagcgcgcggacatccagcgctacacctcgctgctggtgccgccggcgatgatgggcgagcacgtgggtgccagtcccgcgcactccacccagcgtgccaccagccaggaactgcgcatggccatggcgttcttcggccacatgggcatcgaatggaacctgttgaaggagccggacgaggcgctcgccaagctggccgtgtgggtggccgaattcaagaagcaccgcgactggttcgccatcgacacctgcgtgcacgccgactccaacgatccggccgtgcgcttggatggcatggtgatgccgaaccgcggcgccgccatctaccgcttcacccagctgaccaccagccagacctatccggccgcgcccgtgcacctgcccggacttgaccccgagcgcacctaccgcgtcagcccgctcgacccgagcttggatttgaccggtctggccaacggccagagcactctcggctggtggaacgaggaaggcgtagtcctgaccggcgaagccctgcagcgttacggcatccgtcccccgtccctccacccccagcaggcagtattgctcaaggctgtggcgttaagctgacagcctagtaggctgtcagtagccacggcctgagcgaagcgacagctgagcgaaggtgggattgagccttgccgataggcaagtccgtaattgctggtcgtggcggagtaactgtggcgaagcaacgttcttgacttccctctctgaggggagccaagaacggcctacccaatatgcttcacgattacgcgactggcggcggctttggcccagagctgccagtcgtggtccataatcgtgaacttgaccggctgggtctggctgtgacggtagaaacgaatgccatcgcgcagcgaatcggtgccgagcttggccaaaaacgcggactccccggcaatcatcacatgtccgggcatcgcgatgttcgccaccgtagccaccagcgaacccaaccggaaacacgtccggttcaccaactgcgtggcctgcggcacacgtcccttggcatcgcgcgcaaagtcctcaaaactgaccgcgcgacccacaatcgcagagtactgttcggcgatcgaatcgtcagtcaagcattgtgaacagccgatatgtccgctggtgcagcgcggcccctccggatcgataagcacgtggcccaccagaccatagctcttatccgggtactgcactggcttgccgttcacggccagcgaataaccaacacccacgccgatggtcaccacggcgaacatatccacgccgacacccggcccgaaccaggaggcatccaccagcagagaatcgatatcattgaacaccccgcacggcaggccggtcgcctctgtgaccatcgtccccaagtccgtggccccgtcccaatgcaggaacggcgcgaacgtcacaatcgaatcgtcgaccacatgcccacctaccgcaacgcccaccgcagtgggggagggcagtccggaagaggcgatatcggcggaacattcgcgcaccagccgcgtgatggccgacaccacatactcagccgactgatccgccccgatcggcacctcgtgccggccggacaccacctcgccatgcgcgttcaccgcagcggccacaatcgacatcccatgaaccttgacaccaatgaaggtgcgtgcgttcgaacacaacaccagcgaagtctgcgggcgtccgcgacgatccgaactttcccttggcgtgaatcgctcgggcagcttgcctgacgggccggcctcggccggaagctcctcgatcaccccggcgtagatcagatcgctggtgatgcgggacaaggccccttggctcagtcccagcatctgtgccaacgtagtgcgggctatcggcccgtattgggcaattgccgccgccacgcgatgcgtatgctcggatccggaaaaccactgtggaatcgcgttgacatcagacatgcaagcccccttcgctgtatttattgcgttaatcacaaaataccgcgctttttgttgcttgcgcaagtgggctcgctggcgctgggaatgaaatggccgaaccgttaccttggaaagtggaagaaccgccggcaccgaagccggaggaaaagaaagataaaggagtcaacaattatgctgtccgattccccacatgcaacgcctagactgaagcgtctggccgtgcgcaccgccgccgtgatgtgcgcgatcgccgtcgggttcggcctggcaggctgcggctccagcaccgcaggcaccgtcacgctggatttcttccagttcaagtccgaggccgccgaccagttcaagtccatggtcgccgactttgagaagcagaacccgaccatcaaggtcaacatcaacaactccgccaacgcccagaccgatctgcgcacccgtttcgtcaagaatcgtgtgccggacgtgatcaccttcaacggcgacatcagcttcggcaacttcgccgcctccggtgtgttctacgacttcaccgatgaacccattgtggacaccctcaaccccggcatggtgcagatcgccaagaatctggtgcagaccaccgattcctccaagaagcgcctgtatggcctgcccttcgcgggtaacgcctccggctacatctacaacaaggctctgttccgcaaggttggccttgacccggagaatccgccgaccacctggagcgagttcaccgatatgctcaacaccttcaaggacgccggcatcaacccgctgcagggttccgtggccgacgcctggaccacccaggcaccgctcgcctccctggccggcacgctggttcccgaatcgaagtacaccgagctcaagcaaggcaagaccacgttccaggaactgtggaagaccgcagtcgagaaggaatccgagctcttcacctactccactgcggacaccggcgtcacctaccagcagggcacacagaacttcgcccaaggcaaggccgcgatcatcccgctcggcacctacgccatcccgcagatcctgctgatcaaccccgatatcgaacttggtttcgcccagatgccggccaccgatgacgccagcgagcagatcctcaccgccggcgacgacgtgatgctcaccatcggtgcgaacaccaagcaccccaaggaagcgatgaagctcgtcgagttcctcatgcagaaggatcagcttgacgcctacgccgacgcccagtccgccatcacgccgctgaaggacacctacttcggcaacgatgcgctggaaaccgtgcgcccgttcttcgaggaaaaccgactggccgacttctgcgaccactacattccttcgtccatcaacatcggcggctacctgcagaccatggtgacctccggcaacaccgaccgcttcctgaaccagatgcagaccgaatgggacaaggtccaagccaggaccttcgagtgatcggtaggagaggagaacatcatgtcacacgcaaccgcaaccaagaccgctgccaagaaaccggccaagaagaaggtctccgccttctccacccgcaaggtggaccccgcctactactggatggtggttccggcggctatcattttcgccttcttcctgtacctgccatttcttgacggcgtaaagtattccttcaccaactcgcagggctacggcgattacaagttcatcggcctgaagaactacatcgccctcttccaagacaaccgcgtgggccacgcctacctgttcacgttcctcatcgccattctcatcacggtgctgattaatgtgatcgccctgttcctgtcggtgctgctgaactcgaagatcgccttcaagaatggcttccgagccgtcttcttcatcccctacaccctctccgtgctggtcatcggctacgtgttcaagtacatcttcatgaacccgctgcccgagctcggcaaggcgctgggcatcaagtggctgtccacctcgctgttgaccaatgagcaactcagctggatcccaatcgtcttcctcgccgtctggcagggcatcgcctactcggtactcatctacctcgccggcctgcagaccatcgacgacgaaatctacgaggccgccgccatcgacggcgtcaacgcctggcagaagttctggaagatcacattcccgctgatcggaccgttcttcaccatcaacctcgtgctgtccatgaagaacgcgctcggcaccttcgatcaggtcgtcgccttgaccgagggcggtccgaactcctccaccgaaaccgtcacctacctcatctggaagggtggcctgaccggtggcgagtacgcctaccagaccgcaaacgccgtgctcttcttcatcgtgctggcgatcatcgccttcgtacagctgcgcatctcccgcagccaggaacagatctgatttaggggaggataagaaatgactactgcaacagttaccccgtccaagtccggcaagcccgccaagttccgcagggaccacaagatcaactggtggctgaccgccgccgtggccgtgctgagcctgaccattctgatcccgctctacttcaccatcgtcaccgcgctgaagactccggccgaagccggcaccttcgccctgcccacctcgtggcagtggcacaacttcgccgacgcctccgccaaggtcaactacccgaaggccgcgctcaactccgcgatcatcacggtggccgccgtggtgctcaccttgctgaccaacaccttcgtggcctacgctgtggcccgcaacatggataagcgcttcttccgcttcctgtactacttcttcatcgccgccatgttcgtgccgttcccggtcgtcatgctgccgattgcgaagcagatgggctccctgcacctggacaaccaggtcggcctgatcatcctgtacacggtgctcggcctgggcacgaacctgttcatcgccactggcttcatccgttcgattccggtttcgctggaagaggcggcccgaatcgatggcgcatccacgtggcgcattttctggaccatcatcttcccgctgatgagcccgattaacgccaccatcgccatcctgaccgcactgtgggcctggaacgacttcctcctgccgttgatcatcctgaccgaccagtcgaaccagaccatcccgctcgcccagtacgtcttcagctcgcagttcgccaccaactacccgatggc

SEQ ID NO: 3710 - DNA, 7870 bp, Unknown
  R150_10m  MAG No. k141_7997
cgagatgagcatgggcccgctggacgagtcccgcccgtggaacacgcgcaacgtggtcggcggcatgcgcttccagcagcgactgtggcgcaacgtggtcgacgagacctccggcgaggcgcacgtgaccgaggacaccccggatgtcaagaccctgaagctgctcaacaacacgatcgccgaggtgaccgtggagatggagggcatgcgtccgaacaccgccattgccaagctcatcgtgctcaacaaccatctgacaggtctgaaggccgtgccgcgtgccgcagtggagccgttggtcctgatgctcgccccgatcgccccgcatatctgcgaggagatgtggagcaagctgggccaccccgagtccctgtccgccgagccgtggccggtggccgacgagcgttacgtgggccacgacaccgtgaccgccgtggtgcagatcaagggcaaggtgcgcgccaagctcgaagtgccggtcgacatcgatccggccgacctcgaacggcaggcgctggccgccgtcgccgaccgtctcggcggcaaggagccgcgcaaggtgatcgtcaaggccccgaagatcgtctccatcgtccccgcggagtgacttgttgcgggttaggctcccctctttgaggggagccgctcgcgtcgcgagactgaggggagcgtcaaccgccccacctcaattgtggataacttcataagctagaaccacataccccgtttcagctggacaaacgcccatgaatccatcagcgtggatgcatgggcgtttctcataaccatcgcgcagaccatgccgccaaccgtttgcgcgcattcagcaggcagagcgaagccatgccccaaccgcgagtggaacggcccacgacgcctccgccgcctcccggccatgcacggattcgtccggccggccacccgccccaaagggcgcagagcggcctgcggcaggcgacccgtgacaaacgtgcgttatcggatctgattggcgtacgttccgccgatgccgtcggagaatcagccagactcacccgggatcagccgcgattgtcgttcaccattgggcatgccttggccgtgatattgctgctgatcgtcgcccttggcatcagcttggcattgctggtccagcagtcgatgaatatggccatgctgtctcaaccgaccgccatgcagaccacgggcggctccgctggagatcagacgatgccatcgcagaacaccacggacgagaaacgcacggatccgcagcagtcggagcattccgatgccacagcgaaccccgaatcggataccacgcaatctccgcacatgcagacggacggcagcgatgccggcgcttccacgcatggtctcatcaacctcaacacggccaccgttgaggaattgcaatccatcaaaggtattgggccggttaccgctcagcggatcatcgatcatcgcacggcgattggcgggtatgcatcagtcgatcagctgctggatgtcaaaggcatcggctccaagacgttggagaccatgcgagggcaggtgacggtcggatgagcagggatcggatactgcgcgagcaggggagccgcgattggaggatgctgccgatcgccatagtgatgtgggcggcgagtctgggagcgcacgcattattcgcatggaggatgtctgatggactcggcacaggtcaggcaaaggccgatgccggagctggcattgacgccaccataatcggcatggaatggcctgtcacacgaatattgcctataacagtggcgtcatgtgctgccgtggcggcgatgatcgtggtgtctttccgcctgcggatcaggtggacgggaacattgaccgtatgcgttgcggtggcgtgcatcggcagtatggcggcaatcgcgtcggacaccattgcctggcatgatcctgcctccgcacaagctcgccaatccagttcataccacgaagtcatggccacggtgacgacgcccgtgatcgcttcggaccaacgcacatacgattgtcagacggacatacggctgagcggcatcactgtggatggcgcggacgtacgttccacggtcgccgtgcgcgtatacgccgatgaatcgtattgtgggcagttgcgtcgaggcgcggtctatctgttgacgggcgtattgcagcaagcgcgatatggacgcataccgctatggctgctcttggaaggaaaacagccggtagcgcaggtgcgggctccgccgtggcatctcgccgcgatcgcacatatgcaggaggcgtttttcaccgtgaccggacaattgtccgatcaggggcgtgtgttggtgccgggattgacgatgggtgtgcttggccaggattatatcggcggcgatgccggtccgatgccggtcaacagcacgtatgcgcaaacgttggaaaatcagttccgccggtccggcatcatgcacctcatggccgtatccggcggccacttcgtactggtggcaggactggtgcgtcggttatgcatgtggatgctgcttgatcggcggctgacggcgttgctggtctctggagtatatgcgctgctggcattggcgatgttccccagtgattcggtcacccgcgcgttcatcatgggattgataggtgcgttggcgtatgcgatgggacggcgtacgcaagcgttgagcgccctgtgctggacgataatcggtgtattggcggtgaacccggatatgtcggccagctacggattcgccttgtcttcggccgccgtactgggtatcgtgctgtttgcggggcggctggccggtgtctttgagcgagcgatgccgcacagcatcgccgaaatgatggcgatgaccgtggccgcgcaattgttcaccctgccgattcaggtgttgatggaaccggaattgccgttgctgtccgtgccggcgaacctgctggtgtcaccgttcgtgggattggccacgatggcgggattgatggcactggcctgcgcatggtgcacgccatggctggccggcgtattcgcgtggatatcgtcatggggcacgctggtgatggaacgggtggcgttgtggctgggcggcagcacgatggccgtcatcccatggaaagacggcgttacgggcgccgtgctgattgtggcggcggaaatcggtatcggcatgctactggtgttcgtcagccgttgcctccagcatgtccgtcgttatgaggccggaatgtctggcgtgcgcttcggttccgcttggcgcgtccgcctcagtctctggtgtgaggagacgagacgcctctttacgcggcggcaagccgaatagccaatgcggtattcggtgcagcaaccatcgcaatcccagccgaataccactatctcgacggcaccggcaaaatcgtgatgccggcaggtcattgtccaacctgtgtggcgagatggtggcatggcgaaaacagcagcgaatgcaccggtaaccgtggtgcccggaggcgactcgtatttgaacgacgcgcgcaccaaggcactgtgcgcgcaggcgttgaaggcgcggcccgacgccgacctcatcgaactcgacgccacatcggccgaccagtatgccttcgatgaagccgtcagcccatcgttgctttccgacgttgccgtggtcaaactcgtcaacctgcagaatgccgacgacaagctcgccgaagctctggtggcgtacaccaagcaggccgccaaggatccgaacggctccagcgtggtgatctgccagcacgagggcggcgtcaaagggcgcaaaatcatcgaccaactggtgaaagccggcgctcgcaaagaggacgtgccggatttgaagaaaccggatgcacagctcaatttcgtgctcggagaattcgagaaacgtggtcgtagagtcgaaccgatggccgcacagcagctggtatccgtactcggcggcaaaaccggcgaactcgccgccatgtgcgagcaactgtgtttcgactttgacgataatccgatgggcctcgaccgtgtcaaccagtatttgaccgccaatccgcaggtcaccggttttgccgtggcagacaaggccgtggaaggcaaaaccgcagaagccatcgtcatgatgcgtgcagctgtggaacaagggaccgatcccatcgcgctgatcggcgcgttggccatgaagctccgtaccattgccaaagcctcggcggtacgggccggcacgatttcccaggccgaagcgaaaaccaatccgtgggtgctgaagaatgcgatgcgccaacttggcggctggacttcggcaggactcgcgcattgcatccgtatgctcgcctgggcggatgagcaaagcaaaacaaacggtggcgacccggtatatgcgctggaacgctgcattgaagacatcagtcataaaggtcggtaaaagtcgataaaggggtatttatgagcgaacacactattgcggctcccaccagcgaggccatgcaggagctcggccgtcgtgtggccggaatggtacacggcggcgatgtattgctgctctcaggccctcttggtgccggcaaaaccacattcgcccagggcttcggggcggggctgggcattaccgaacccatcgtgtctcctacattcaccattgcccgcgaactcgacgggcatttcgccgacggcactccgtctcatctggtgcatgtggatgcctaccgtctgggcggctcagcctatgcgccggggcaggacgccatcgggcgtttgttggacgagctggaatcgctgggattggacgaagaacttgaagaccccggcgagaacacggtggtgcttatggagtggggcgaacaaatggccaccgccttggcgccagaacgacttgaaatccatatcgatcgacctctcgattcctccgatgccgcatccgctggatcagacggcgaactcaccagcaacggcactcgtaccgtcgcattcgtcccagtcggcaagcgatgggccgcgttcgatctgcagtaagccatgcgcctatagactcctcgatgtacactctctagaggctttacgactaggaggattcatgggttgcacgttggtgattgacacctcattcggctcgacggtcggcattgtggggcgcgatcccattgtagagaccgattcgcgcacccatgtggagaaactgcaggtcaatatcgcgcgcgcggtcgaggaggccgggttcccagcatctgacattgcaacagtcattgtgggtaccggtccagccccctttactggtctgcgtgccggtatcgttacggccaaggcactggctttcgcaacgggagcgacgcttatcggccataatgttcttgagtctcaggtgcaatggaatctcattcgccgtggcaaagccggcactctcggcgatactcataaatgccatgtgctcactcttgccgtaaacgacgcacgccgcaagcaactctattttgcgttgtactcggacccgctcgttggcgatcccgatggcgaaaccgtggcgacggctctgattgacatggatatcgattaccctgcatccatcgcgcagcgcgtgaatgatgccgttcatacgtaccgcgacggacttatgccagaagacagcaatgtggatgtggtcgtggatgttgtgggtcatggggcccgcaaatatgcggatgcgctgggtgcaatcgagcagcttggcgacatcaccgatgaatccgtattggaccaaggggagcaaggtctcgctatctttgccactgatgcggaactggttgccaaccgtaatcccgatacgccggtcgaaccgttgtacctgcgccggccggacgccgaagtgccgaacccgctgaagcacgtgctcggccatgccggcgccgataaggcgtgagacgggttgattcgatgattgttgacatcactgccgtaagtcgtgatcttgcggtttgctccatcgcacagttggaaggcgaactgttcggcctcggcgcatggaatgcgaacatggtgcgagaggaactggacgcaccggcccgcacgtatctgctggatgtgctgggagaggtggaacaggcggttgtccgcggctacgccggcttctggtatgacggcgaggacgccgagctcatgaccatcggcgtgggcaaggcataccagcggcaaggcatcgccgctgcgttgcttcaggcactggtcgacgaggcgaagcgtcagggcgcctcgcgcatgctgctcgaagtgcgtgtggataacgaccctgcgctggccctgtatcaccggttcggattcgaacgcatgggattgcgcaaacgctactaccagcccgaaggcatcgacgcatacaccatgagcttggacctgaaacctagggtcgtgggctttgccgccccgcagacggcatcggcggacactgaagacatcactggcaagcaaacggagaagaacggagaagcacgatgagcgaaccggttgtactgggcattgaatccacctgcgacgaaaccgcggccgccatcgtacgcggccacgaactgctctccaacgtcgtggcctcatccatggaggaacacgcgcgatacggcggcgtgatccccgaaatcgcctcccgtgcgcacgctgaggccttcgtgccatgcgtgtccaaggcgctcgccgacgcgaccatgacgttggcggatgtggacgccatcgccgtgtccgccggtcctggactggccggttgcctggccgtgggcgtgtccggcgccaaggcgctggcctgggctgcgaacaagccgatttacggcatcaaccatgtgatcgggcacatcgccgtcactcagctgcagttcggcccgttccccaaggacacgctggctctgattgtctccggcggccacacctcgctgctgcatgtggaggacatgccgcgcaagatcgatgtggtgggcaccacgctggatgacgcggcgggggagtgcttcgacaaagtcgcccgtctgctcggcttcccgtatccgggcggcccgcacatcgaccgccacggacagaacggcgacccgcacgccatcaaggtgccgatgggtctgacccaaggcaaggccggtgccgcgcacccgtatgatttcagtttctccggtgtcaagaccgccgtggcccgttgggtggaaagcgagcaggccgccggccatgagattccggtggacgacgtgtgcgcatccctggccgactccgtggccaccgtgctagcccgtaaggccatgcgcggctgccggcagtacgattccaacacgctgatcgtgggcggcggcttctccgccaactcgcagctacgcgccaaactgctcgaattcggcgagaactacggcgtcgacgtccgtatcccgcaaatcaagctctgcaccgacaacggtgccatggtcgccatgctcggcgtgaacctggtcgaagccggcgtggcccccagcgcccccgacttcccgatcgactccgccatgcccctgaccaaggtctcgatgtaagatttgcacggtattcccaaactgatactgggaatactgtgcctctcatcggtgaattgacagtgacctgtctgcctgatgtgagtagtggtgaggtcttcgccatggatttcccggttgatgatggggtgtcgtgtctggtcaccaatgcgatgaaaataaaaaagcctcggagaaccgaggctttcgatggctcctgcgactgggcttgaaccagtgaccgtccgattaacagtcggatgctctgccaactgagctacgcaggaatattcaattttcatcccgtctggagttacccgttcaggtgagctcctgcgactgggcttgaaccagtgaccgtccgattaacagtcggatgctctgccaactgagctacgcaggaatattcaattttcatcccgtc

SEQ ID NO: 3711 - DNA, 32952 bp, Unknown
  R150_10m  MAG No. k141_8031
cgccacctccggcttccaagtcaacctcgaagtctattccggtccgttcgatgccttgctcggcatgatcgccaacaacaaactcgagctgaccgaagtttccctctcctcgatcaccgaggaattcctgacatacgtgcgtgggctcgatttcacgaaaaacatggatgaggccagcgcctttctcgatatcgcctctattctggtcgaggccaaaagcgtggcgattctgcccggcagcgaagacagccagcacgacgagcaaagccttgaagcactgcgcgaacgcgatctgctgttcgcccgactcctccaataccgcgcctacaagcaggccgcaggtgacttccgggcgcgtatcgccgccaactccggccgattcccgcacccggcggccatggacgaggccgttgccgccatgctgcctgagctggtatggacgctgaccccgctcgaactcgcccaactggccgcccaggtcatcgccaacgcgcccgcctccgaagtatcgattcaccagctgcacgtgcctctggtcgatctgcgggcccaatcgctggtggtgcgtgaccggctgatcgcggcactggaattcaagggagaccagtcgatgtcgttcagcgaattgacccgggactgcacttctcgtattgaggtggtggctcggttcatggccgtgctcgtgttcttcaaacaaggtgtgctgcagtatcagcaagatggtccgtttgccgaactgcatctgaggtgggtgcccggcgtagacgaaacgatgagcgacgtgaacatttccgaaggcgattttgcgtaaggacggcgactggtgactgagcggattgacgcaacgaatgcaaccgaacacatggcggatacggaatcgacggctggatccgcaaaggccgcggtgaggggagtggaggagacgcgccccgaatacgtggatttcacggtagacgtttttcccggcgggctgcccgcatgtctggaagcgattctgatggtctccgaccagccgcagaccgccaccgagctggcccgcattttggcattggaccgcaacacagtcgaaggggcattgcaagccctgcacgatgactatgagggcgatgaatcccgtggcatccgcccgcgcggcttcgaactgcgccgcaccgctcgtggctggcagttcgccagtcgcgccgcgttcgagccggtcgtctcattattcgtcaccgacggccagactgcgagactcagtcaggccgcactggaggcgcttgccatcgtggcctatcgtcagcccgtcacccgagcccaagtggccgcgatccgcggtgtcaactccgatggcgtgattcgctcgctcacggtacgcggccttatcaaggaagacggcgtggaccccgaatcccgcgcggcccttttggtcacctccgagttcttcctcgaccaaatgggcctgaagagtctcgacgaactaccctccctagcgccgttcctcccgcccgtcgccgaaatgacacagtcgaaatcggaagacacggacgtgatttcgtagcgattggggcccgctacctgaccgatattcgtgcgctagaccatccaatatgtgatttatggtcattgtgactataagtagtgctatgctctcaatgcagggagaacaaccggtatggaaagaggcatggcatgggattcggcaatgtgtccgagcgccgcagcgcaccgccacaggtcggcgtgtcagtggtgattctggcactcggcccgaaaggcgataccggcaacagtgccgccgattccggcaacgccgcgaactcggcccattcccgtctctggttgcccttggtcaagcgcgtccgtcagccgttcctgggctgctgggcattgcccggcggcgacctgcgctccgaccggtcgttggaacagtctgcctacgcggccctcgaatcgaccacagacctgcacccgcgatacctcgaacagctgtacacctttggaggcccgacccggtctcatggcggattgcccatggtatccgtcgtgtactgggcgctcgtcggccagaccgaggccgcgggcttcgaggatggtgacaacgtacgatggttccccgaaggcgaactgcccgagctggcgttcgaccatcgccagatcatcgactatgcgctgctccgcctgcgctccaaaatcgaatactccgacgtggccacccgactgctcggccccacgttcaccctgcgccaactgcacggcgtctatgaggcgattggcggcgaaaccctcgacttggcgaacttccgccgcaaaatgcttgcctcgggagatcttgaagacaccggggagaaggtgcgcgaaggccgccaacgaccggccaccgtctaccgctacatccccaaacgacttgtcgagaacggtacgccccacgaatccgatggcgacgacatcgtggaactgtccagacaaggcgagcgtgaagacgctctcgacgcgctgattccatccgcgcgcatctgatttttcccgccgacccgcttcgggccggcatcacagacgtatataggaaaggaaccgctatgaccgcactatccactgcgccgtctgttgacgagatcatcgccaagctgggcgcgcaaagcacctgcgatgcaggactgacccaggacccatggcacttcgacaccaccacacccagctacggtcccggtgcctcgatgctcgaccgtctgcccgccaacgcgccgcgccagcaggtgctgccggacgaataccgcaaggcctccgacgaggagctgcagcagcgcatcaccgacgccaagcagcgtcttggctccaaactgttgattctgggccacttctaccagcgtgacgagatcatcaagcacgccgatttcgtgggcgactccttccagctggccaagaacgccaccgaacgcccggacgccgaccacatcgtgttctgcggcgtgcacttcatggccgaaaccgccgacatcctctccacgcccgaacagagcgtgaccctgcccaacctgtccgccggctgctcgatggccgatatggccaacatcgaccaggtccaggaatgctgggaccagctcggcgagatctgcggcacccagcccgacgccgatggcttgcagcagatcatcccggtcacctacatgaactcatccgccgcgctgaaggcgttctgcggacgcaacggcggcatcgtatgcacctcgtccaatgcgcacgccgtgctggaatgggcgttcgcccgcggcaagcgcgtgctgttcttcccggaccagcatctgggccgcaataccgcccgcgcgatgggcattccgctgagcgagatgccgctgtgggacccgttcaaggcacagggcggcgccgccgatccggccgactacgcccgcgccaagatgattctgtggaagggcttctgctccgtgcaccagcgtttcaccgtcgaacaggtcgaacgtgcccgtaaggcatacccgggcgtcaaggtgatcgtgcaccccgagtgctcgatgcaggtggtcgacgccgccgacggtactggctccaccgcgtacatcgtcaaggagatcgccaacgcacccgccggatccgccatcgccgtgggcaccgaaatcaacctggtgaaccgtctggccgcgcagtacccggacaagaccgtgttctgcctggacccggtggtctgcccctgctccacgatgtaccgcatccacccggcttacctggcttgggctttggagaacctcgaagccggcaacgtggtcaatcgcatcaccgtggacgaagacaccgcccgcgaagccaaggtggcactggagcgcatgctgcgcgttcacccgtgatccgtccctggcgcccctcgtacatgaggggagctgtcaccgtaggtgactgaggggggggcagatgacgcaaaaacagaggaaagcaacacaatgagcaacactgaaatcgtcgtcgtgggcgcaggcgtcgccggactgtccgcggcactggccgtggccggcaccggacacgacgtgaccttggtaaccaaggccggactggtggaatcgaacacctatcatgcgcagggcggcatcgctgcggccatcttctccgacgacgacccgaagctgcacgccgccgacaccatggccgcgggccatggcctgtgcgacccgaaggccgtggacatcctcacccgtgagggtgcggagcgcgtccgcgagttcgccgcggccggcgtccacttcgaccgcgacgcgcagggacacatgctgcgcggcctggaagcggctcattcgcgcgcccgcgtggtgcatgccgggggagatgccaccggcaaagtgcttgaactggacgtctccgccatggtgcgcaagaacccgcgcatccacatcatcgagaacgccttcctcaaagatctcatcgtgcgggacggccacatcgccggcgtccgcctgctgatcgacgggcaggacaaggatctggccgccggccgggtgatcttggccaccggtggcgcgggtcgtatgtacccgtacaccaccaatccgccggtcgccaccgcggacggtctcgccgccgcatggcgtgcgggcgcccaggtcgccgatctggagttctaccagttccatcccaccgccatggccgtgggcgagcacttcctcgtctccgaagccgtgcgcggcgaaggcgcggtgctgctggacgaacacggccaccggtacatgaaggacatcgatccgcgcgccgaactcgcaccgcgcgacgtcgtggcccgcgagaacttccgcgtgatgcaggcgcaaggcggcaagcccgtgatgctcgacgtctcgccgatgacccgcgagaaccccgacctggccagcttcctggcccaccgattcccgaccatcgatgcctatacgcgttcgcttggcttcgactggagcaaggagccgatcccggtggcgcccgccgcgcactactacatgggaggcattcgcaccgatctgaacgcccggacctccatccccggcctgtacgtggccggcgaatgcgcccgcaccggtgtcatgggctccaaccgccttgcctccaactcgctgctcgaaggacttgtctacggacgccgcgccggtcttgccgccgtcgcggacggtgacgacgcggtctgggcacccgaaccgttcctgaactccgccaccggtgccgtgttcgaccatgcgccgatcgcgctggccgctcctgccgctacggctgctgctgacgataccgccgccgacaaggtgtgggaccgtacccgcatccagaacaccatgtggcatggcgtcggcgtgctgcgcgacgaggccggactgaaaaccgccatcgccgaactcggccaaggcctcgccgccgcaaacgcccaggctgatataaacgccgatggcgctgcaagtagcgttgaggctttggagaaccgcaacatgctcaccgtaggctatgtggccgccaccgccgcgctcgcccgcaccgagtcgagaggcgcccacgcccgcaccgactacagcgagccagtcgacaactgggcccactccgtcgcctacatcaaggactgacccatgctcacatcacacatcatccgcaccgccgtcgaagcggcgctcgccgaagacgcgccctacggcgacatcacctgcgagaccaccatccccgcggacgaaaccggctcggcccacctcaccgcgcgcgaaaacggtgtgatgagcggcatcgacgtgttcgccgcagccttcgccgcacagaacccggccgtcaccgtcaccgtcaccgtcaaggacggtgagcgattccagcgcggccagatactcgccaccgtggaaggcccggtacgcgacctgctcaccgccgagcgcatcgccctcaacttcacccagcgcatgagcggcatcgccaccatgaccgccgctttcgtggacgcggtgaacgccatctacggcgacgactatgacggacccgtcacccggccgcgccgctacgagcgcacccgcatcgtcgatacgcgcaaaaccacgcccggcctgcgcccgttcgagaaatacgccgtggtctgcggcggtggccacaaccatcgctacggactgtccgacgcggtcatgatgaaggacaaccatctggcggcgctcgccgcgcgcggcatcgacctggccggcgcgatccgccacgtgcgcgaacaggtgggccacaccacgcatatcgaagtggaagtcgaccgccttgaccagattcccgccgtgctcgccggcggagcggacaccatcatgctggacaatttctcgctcgacgacacccgtcgcggcgtggagctcatcgacggcaaggccatcgtggaagccagcggcaacatgagcctggagcgagtgccagccgtggccgccaccggcgtggacgtgatttccgtgggcgcgctcacccactcggtgcgcagcatcgaccttggattggattggaactagtcatggccgatacccccaacgcatccggtgaacccggcgaactgtacctggacgccgccgccaccgaaccagtgagcccggcagtcatcgaggccatgaccccgttcctgactgaggcctacgccaatccggccagtgtgcaccagcctggcaaaaccgcggcccgcgcgctggacgcggcccgcgcatcattcgccgcggcattgggcgcccggccggatgacgtgatcttcacctcaggcggcaccgaatcggacaatctggccatcaaaggcatcgccatggcgcgcatgcgcaaactgggcctgcggccggtctgcggattcgccgaagccgatggcaaacaactggcaagcagccgcccgcgcattatcatttccgctatcgagcacccggccgtggcccaatcggcggcatggctgcacgaatggttcggtttcgaagtcgtgcgcattcccgtggatgcgcaagcacatctcgatctcgacgcgctcgaacgcgagcttgacggcgaggccggcgaacgtaccacgctggtctccaccatgctggccaacaacgaggtcggcaccgtggaacccgtggaggaactggtccgcatcgcccacgcgcacggcgtgcccatccatgtggacgccgtacaggccgccggccagattccgattcgttttcgtgactgggatgtggacgccctgtccgtatccggacacaaattcggcacgcccaaaggactgggcgcactgctggtacgcggccgcacacccatcgaaccggtgctgtccggcggagggcaggaacgcggcctgcgctccggcacacagaacgtggccggtgccgtggcgcttgccatcggactcaacgaatcgaatgcgcgcatgcaggtgcagtgccgtgagttggtcgcgtcccgagacacgctcatcgacgcggttcgccgggtcgcgcctcgcgccgacctgaccggcgaccccgaacgccgtctgcccggtcacgcctccttcatcttccccggcgtcaccggggaagcgctgctcgtcgacctggacgcgcgtggcatcgctgcctcatccggctcggcctgcgccatcgggcgccacgagattcctgccacgttgctggcgatgggcctcgaaccgtccgtcgccaaatcggcattacgcatgaccttccgcaagccgctgacccgcgaacaagtcgaacgcatcagcttggccatcgaagagtcctacaccgacctgacccgacactaaatctgacgccacttaccagaaaggaaacgacgtgagcaccaccactccagcgcaacccgcgcagctcacccgcaacgagcgcctcgaccggctgcccttcaacaaggcgcaccgtaaactcctcgtcgcctccggcatcggctgggcattcgacgccatggacgtcggcctcgtttccttcgtggtcgccgccatcgcagccgacccgcacttcaacctcaccccgaccgaaaagtcgtgggtgctgtccatcggcttcgtcggcatggccatcggcgcggcggtgggcggcttcatcgccgaccgcgtgggccgcaaaaccgtgttcaccgccacgctgatcatcttcggcatcgccaacggcgccatggcgctgtcctggtcgctcggcatgctgctcggcgcccgactgatcatcggactgggcttgggcgcggaactaccggtcgcctccacgctggtctccgagttttcgccgaccaaacagcgcggccgcatgaccgtgctgctggaatcgttctgggccgtcggctggatcatcgccgccataatcggctacttcgtgatcccgaacaccggtgactggggctggcgctgggcgctggccatcggcgcgctgccactgctctacgcgattgtcacccgtgtacacatcccagaatccgtgcgattcctcgaagccaagggtcgcgaagacgaagccgaaaaggccgtgcgctacttcgaggaagccgggggagtggccccggtaacctctcccaagggcaagccgctgccgaagatcaagacgcgcgagctgttcggctccaagtacctggcccgcaccatcgccatctgggccacgtggttcttcgtgaacttctcctactacggcgcgttcacatggatgccgtcgctgctcgccgaccagttcggctccctgaccaagtcattcggctacacgctcgccatctccatcgcccagctgcccggttacttcctggccgcctggctggtggaggtctggggccgccgcaagacgctgagcatcttcctggccgtctccgccgtggccgccttcgcgttctcgcaggccggatcagcggccctcgtgctcgtgttcggcatgctgctgtccgcctccaacctcggtgcgtggggcgtgttgtacgccgtgaccccggaaatctacccgacccgcctgcgtggcgtggccgccggtgccgccgccgcggtgggccgcatcgccgccatcatcgcgccgctcctcatgccgtggttcctgaccctgtccggcggcaacaaggccgtggccttcatcatcttcgccgccgccttcatcctcgcctgcatagcagccctctgcttgcccgagcgcaaaggcctcaatctcgaagactgattacacttcagccttcgctactaaagtggcccacaccaatgtgtgggccactttttgtcttatagctcccgaatgacacggcaagggttgccgtatgtcactgatcaatcgagggaacgacgggtgagattgcgcggtggttttgtgaccagccacgccaccagcagtccggttaccactacgccgaatgccagcgccgcctgcaatccccagatcggcacggtttccagccaatgaccgtccacaccgatcctgcggttccatgccacatgcagccatcccaacgccacgccggataccacgcccactggcgcgccggccagcagaatcaccgcagcctgcgtcaggccgtaacgtctgaggaatcggggtggcgcgcccacggcgaccatcgtggccatgtcgcgctgggcctgcgtgcgggccagcagcagtgaaacgagcgtggccatcagtgccagcaatgccaacaggccaatgggcaccaatgccatattgtcaccccacggcaggcgattcccgtcagtgctcgtggatgccagcggcagattttcgattgcataagctgaggccttctttacggtaacgggggagttgccaccggcgaagtctagatactcacccagatactgcaattgtttgatgccgagcgcctgtgctgttgccgggctcatcaccagcgggtacgcgccgcgcacgtagatggccttgcgcttctcgatatgtgtggcctgagattcgtttgcaattgccggattcggcgaaatggccacacgcaccatacctcccgcgtcgattgtgccggcatcgccgaccaccacaccgcccgcatcaagcacctgtgccgcctcatccgcgttcgggaagccggacaaacgcatcgcattgccatccataatgagattcacgccgcggaaactcggcagtatattcgaatacgttggctgatgggatcggtctatcggcacacaacgtatcggaacgtttggatacagggccgaagcggcatcctggcccacccatgtggacgtgtccggttgctcttggatcgttgggttatcacaagtgtgaccggccgggagcaatgcagcggcatacatgtagccgtgttcggcgttcaacttgtcggaatcgacttcggtcgtatcattgagctttgaccatcgcttgacatcctcggtgtacaccgggtaatgagcgcgtatcggcgtctctttgccaagccggtgtatcgcatccgacaccacagcacggtcgaactcattgctgacatgcacgtcggccccaatggccatccccgacggtccatacgtcatcgtcatcgtggaatttcgctggtccgccaccatggagccggtgattaccagtgtgtacgaggcgatgcacatggtaatcagcaccgcgcatgccgccggaacgaaccgtcgatgatgctcggctgcatccctgagtgccaggcgtgcgccgatgttcagttgggaacccgttttgccgcaccaccgtgcaaaagtgcgaatcgacaacgcaagccctatgacagccaacaaaatcgtggcaacaagcagagccatatgcgtttcggttccggccggaaccgcgcccggattgtgatcggccagcgtgggtaatggcaatgtcagactgagcgcggcgcatacgatggagaccaagaccagaatcggaccaaccgcaacacggagcagtctcaaaggattacggcgaagcttcgtatccacgccattcgcggattcaccgtagccgatttcctctcttgtcgggcaatccttcaacgcatcgactggatgcatacgcgccacatgccgagccggcgcaatcgtcgtggcaaatccaatgatgattgccgtgacaatacccatcggcagcgagccccacgagaatccgtgcaggatctccagcggcgtggatccacgcaatgcgcctatcgcagggccggccgccaaggtaagcgcgaatcccaatgccgagcccagcacgccaccgatggcgccgataacgagaccttgcgaggaaatgattcgactgaggtcacgtggtgcagcaccggatgcggccgcgagcccaagcacacgacgtgactgatctgccgacaccgtaaacgcgggcgtgaccagaaacagtaccagcaacatacccaccagcatggtgatgaccacagtgaccatgtggttcaacatggtagccgcatcgatctgcatcgggtagagctgcgatgcgggcggatagccgtcagtcagcacatggcgggaaatgacgatggcctgcaacaggttcatgctgcgggtgtgcgcccacgtgaccggctctggaccgaccaccaaataatggccatccacaccgacgccatcagattccaatatggctgacatccagccttccaagccccatgccgcggcttcggattcatcggtcagcccgctgactgtccaagcacgctgagtgtcggccaccgcctcgccgatgcgcccgtccaggctcatccagccatcgaacggcggagcgacgaacgtcaccgtgctaccgagagaagcgccgagattatccgccaatgtgcggctgatgacaatctgcgtattattctgcggcgccgaacccttgaccagcttcggcaacattcgttgcaatgcctcaggtgaagcctcggtcatggtcgcggtggaggccgcgttcagatcaatgtcgttcccgcttttcacgtcgatcccagccttggtctgttcgccgggttgcaacgcggtgccggtgatggcgatgagttcgggcgactgccaatacgggagcagccgatcctgttgcggcagaatcttcgcaagctcggcggccgaggccggctgctgggagggatcgtcctgccacgtgccgccgctttcgggtgactgccggaacggttggccggtgcggggcctggcggtggcggtgatgaccgcctgcgtatcagccgggattgtcgccagcgcacgcgatctggtgggcggtatggtggtggtcataccgatggaggccaccattgcggcgattgacagcattaccagcagcaaggacagtagggtgtgggccttgtgccgtagtgcgtcgcgccagccgagtcgcagcgcggcccgataccggttgcaacgtgcgccaaggcttggcctagcggcatggggaatttgggcagagcgaccgacggtggcattggcaagattattgagggctgcgcgtgccatcatgctcccctttcctcaaggttgagcaaatcatccatattgctggagccggtttcatcgatgatacagccgtccttcaaaaacaccgtgcggtcggcccaggcggcgaagcgaggctcatgagtgaccagcagtacggccgcgccgcgatctgcgcgggtgcgcaacacttcgagaatcgtaatgccggcattggaatccagagctccggtcggctcgtcggccagtagtagacggcgtgggccgaccagtgcgcgggcaatcgccacacgttgcgcctgaccgccggacatatcttcaggtcggcgatcagccatatcggctacccccacttcattgagggattgcatcgcggcctcacgtgccttgcgaggattccagccatccaattccaaggggaacgacacgttctcggttgcgctcagggaaggcagcagattgaaatcctgaaacacgtaacctatcgatttgcggcggatggccgcgcgttcggccactgacagtgtggccagatcgcggccttcgaccagcacgtgcccctgcgtgggcacatcgagcccgcccgcaagattgagcaaagtggatttgccggaaccactggggcccatgatggccacgaattcacccgggcgaagcgtgagattggcgtgactgagcgcggtgacacgacgtgcatctttgccgtgaacgcgagtgacgtcgtgtaattccagcgcgcatggggaagattgcgggagagaagaaagaacgggagaagtcatgatgtgctcctatgcactattgaatggtggcggtgagtgcggctgagcttgccgtgagaggtgccgaaacggggtgctgcgccagttgtgctcgcagctgggtctcatccacggtatcgagccagcgcaattccgcttcagtgatgaaaatgtggtggtcgagtactagacgtgtggcgagttcggtgggcggtgtttgccggcgcagtcgggtgatgtcgtgcagcagttgctgcaaagcgtggcgttggtgttggatgagttcggaaacatcgaggccgggtatttccacggcgacggccagcttcatcaccagttcgtcgcgtccgcgttgttccggggtaatgggggagcgccaccatcggtcaagctcttgggcgccggaattggtcaatcgccataatggtgcggccgctgcggtgccgacatcattggatccgctagtagtcggcgcggtctcttcaatcagtccgtcgcggttcaaccgctgcagcgtagtggaaacttgccccatattgagcggccaagtcagaccgatggtgcggtcgaagtccttcttaagctgataggcgctggccgggcctcgctccaacagtgctaatagcgcttctctgattgccataccgcatccccttttgcatagacggtttgccttgggcgaaggttactgagtaactatcgttggatatcaggttactcagtaactacccatgacggtgctgtactcagggatgattcaggggagattcaggggatacacttggcgcccctcagttgcccacggcgacagctcccctcagggaggggagtcgagagtgtggaatacaacaagtctcgcaagccagatgacatgtgactaattctcagaaagccgggcccgttgtgtgtcaaggtgtgccagtaacatcgtgacggtttgtgtgtaggtacaggttgatatccaagagcaagtactcgagaacgcaagtaccgaacgattacgcaagaaaatcagtattaagagaggtttcgatggcggttcgtggagatatccgtaatgtggcgattgtggctcacgtcgatcacggcaagaccaccctggtcaatgccatgcttcagcagtcgcacgtgttttccgagcgtgaggaagtgccggatcgtgtgatggattccaacgatctggaacgcgagaagggtatcaccatcctcgccaagaacacggccgtggaatacaccggtccgctggccgccaagtacggccacccggagggcatcaccctcaacatcatcgatacccccggccacgccgacttcggcggcgaggtcgagcgcggcatctccatggtcgacggcgtcgtgctgctcgtggacgcctccgaaggcccgctgccgcagacccgattcgtgctgcgcaaggccctggaggccaagctgccggtcatcctgtgcgtgaacaaggtcgaccgccccgacgcccgtatcgaagaggtcgtcggcgaaacctccgacctgctgctcggcctggccgacgacgtgcagcacgagggcgtcgacctgaacctcgaccagctgctggagatgccggtcatctactgcgccgccaaggccggctacgcctccgtgaaccagcccgccgacggtggcctgccggacaacgacaacctcgagccgctgttcgaggccatcatctccaccatcccggcccccgaatacgaggaaggcgccccgctgcaggctcacgtggccaacatcgactcctccgacttcctcggccgactcggtttggtccgtatctacaacggcacccttgagaagggcaagacctacggcctgtcccgtgtggacggctccctcgagaacttccgcgtctccgaactgctgcgcacgcagggcctcgagcgcaccccggtcgagtccgcgggccccggcgacatcgtggccgtcgccggcgtcaacgacatcatgatcggcgagaccatcgtcgaccccaacgacccgaagccgctgccgctcatccacgtggacgatccggccatctccatgaccttcggcaccaacgactccccgctggccggcaccgagggcaaggaccacaagctcaccgcccgcatgatcaaggatcgtctggaccgcgagctcatcggtaacgtgtccatcaaggtgctgcccaccgaccgccccgacgcctgggaggtccagggccgtggcgagctggcgctggccgtgctcgccgagcagatgcgccgcgaaggctacgagctgaccgtcggccgcccgcaggtggtcaccaagaagatcgacggtgtggtcaacgagccgatggaaaataccaccatcgacgtgccggaagagtacatgggtaccgtcacccagctcatggccgaccgtaagggccgtatggacggcatgaccaaccacggctccggctgggttcgtctgcagttcaccgtgccgtcccgtggtctgatcggcttccgcactgctctgctgtccgccactcgcggcaccggcatttcctcctccatctccgctggctatgctccgtgggctggtgccatcaccattcgtcagaacggttccatggtttccgatcgtcagggtgtggccactccgtatgccatgcagcgtctgcaggcccgtggcaacttcttcgtcgaaccgcagtccccggtgtacgagggtcaggtcgtgggcgtgaacaacaagcccgacgagctggatgtgaacatcacgctggccaagcacatgaccaacatgcgttcctccaccgctgacgtgctcgaaaccctgaccccgccgatcaagatgagccttgaggagtccctggacttcgccaactaggacgagtgcgtggaagtcaccccggagtccatccgcgtgcgcaagatcatcctcggccgtgaggactggtacaagtggcgcgccaagcagcgccgccagaacgccgcccagcagggtaagtgatctggtgcgactgtagccgaccattctctctggctcccctctctgaggggagccaagtttattcctcgccaagtcatatccccacctatactgaaacgcatgactgtgaagagcactactgaactgcgtccgtggtcgtatcgccagaacgcgctggtcaaatcgttgatcacgattgcggcgggcgtggcttccgcctttgtgggcacgttcgcccaccgtatgggtgcagaactgagtattccgtatggtctggtgctggcatttctgctgatcggcctatcgacatggtgcgcccgttcgcgcatgggagcggtcggactggccctgcacctcatcgcctcctcgctgaccgcatggggcatggcactgaccaccacatccggcaaagcgctcatcgtcgccggattccaaggcgacatgccgttcttctcccagcatgccggctacatctggctgtacggcctgatactggtccaagtcgtcctgctcattcttcccgcccgctggttcgttattcccactcattctgaatcgcgcgcgtaactatatatggcggcacatttccgggaatgcgtcgcgtatcggcgggcgtaggggattacggccgctaccatagaaccttatggcacacatgaaactgttttacttgggcccggaaggcaccttcacccatcaggcggcaatgacggccgccgaccagttcgccacactcggcgacttcgacctcaccgccctgcccgacgtgcccgcgatcatgcaggccgtacagtcgcgccaaggctggggcgtcatcgcatgggaaaacaacgtcgaaggctatgtggtcccgaatctcgatgcgctgatcgacgcccccgacgcggccggcttcgcccggatcagtgtggacgtggccttcaacgccttcaccgtgcgcggccacagcatctgcgactgcaccggcaaccccgtcagcgcccacccgcacggcctggcccaatgcacccggttcatcaccgaacaccatttgcagcccgaacccgcatcctccaacgccgccgcctgccgcgacctgaagcccggccgcgtggcgctcggccccagcatctgcggcgaactctacgatctcgacaccctcgccgaacatgtgcaggatttcgatggcgcgcacaccgaattccttgtcatcgccccgcgtgatgtggtccaggaattcaacgcccgcgcccaccgcaatgacgccggcgacttcgaaaccatcatcaccttcatcccgctggtcaccggccccggcgtgctcgccgacctgctggacgtcctgcgtgatgcggggctgaacatgaccagcttcatctcgcgcccgatcaaaggccacgacggaacctacagcttcatcgccacccttgacgccgccccctgggagccaagattccgcaccgcactggaagagatcgccggacacggcgactgggcaaaaaccctggccgtctacccacgccgcgaacgcccgaacccgccggtcgacgcctggatgctgcccgagggcggcgtccacatcaccaatcgcgcgtcggaaggctggcagtacgccgagggagcaaggaaggaactgctgtggtagacacagtcggaatcgtcggactcggattgattggcggctcgctcgcacgccgcctgaccgagcgcggcgtacgcgtcatcgcgtggaaccatcgctcgcacccctacgcccaggccgaagccgatggcattttctgcaagagcacgctctccgaactcatggatgccgagccggatgtggtcgtgctgtgcaatccgctcaaggcgatgccctcaatcctcgccgccctagccccgcttatgggcgaccatccgaacaccacgctcaccgacgtgggctcagtcaagggcatggtccgcgatcaggtcaaggctgccgcgctggggaagtgctatgtcggcgcccatccgatggccggcaacgaactgtccggctggcaggccgccgacccgcatctgtacgacggtgccctatgggccatcaccgtggacgagtccacggactaccgccgcttcctcgacgtcgccgcgatgatcaccaaggacgtcggcaaccgcgtcatcgtcgtggacgacgaaacgcatgacaaggccgcggcgatgatctcccacatgccgcatgtggtgtccaccgcgctgatcaacgaactggtcgccaacccggaccgcaacatcgccgccgcgctggctgccggctgctggagggacatgacccgcgtgtccctgaccgacccggaccgcacgcgcgcgatggtcgaggaagactcgctgaacgtcgaagtgctgctgcgccgcatggcggcacgtctgaccgatatggccgaccaactgcacgctggtgccgacggcgagcaggatgtgatgggattcttcgccgaaggcgaccccttccgccggtacaaggccgccgtgacgcgagccggcatcaccgctgcacaagctggtacggccaccgcgcagcaagccggcacaactgccgccggattcccggaacgcgagctcgccgtccccgaagccggctggcagcagaccttgctgttctccgcacgccggggagaagccatcaccggtttcatccatccgcgtcaggccatcgtccaactgcgccccgccatgtaactgcgccccgccatgcagcccgtgtgcaggttcccctcgccgcctgtcacgaagaaggctgcgcgagggggatgaagttcccgcttgttttcgtgagaagaccgtgtggctccgctgttcgaaagacccaaaggagtaaggtagtctgtaccgtttttcgggaaacgcatcgaagtgaatgcggcggatggttaaggggatgatgacgtatgacgttaccaaggcagattccggccggtgcccgcgtggtggtgcgcatcaccgacggcattgacccggtcgaccaccgtatgaagttccgcgactatgtggggcatgtggtttcctgggatggatacacgttggagatggtgcgtgacgccgccgccaatggttcgcgcccggcccagaacgtgaccatccatcaggaacagattgccacattgaaacccgtgccggagcggcgcaacacgccaccccggccgtaacccaaggccataaagaattcggaggagaacgagagtgtcatctacgcagctcgacggcgatatcgacttcttcgtctcctatctgaagtccaaccgcggcctgtcagcgaatacgctcaaagcgtatcgcgcggatctcacggcatgcctgcatctgttcgagctgcgcggcgtgaccgatctgaacgagatcacgctggatgatctgcgcagctggatggcggtggaatcgcgcgatcacgcccgcagcagcatggcccgcaaaaccgtggccgtgcgcgggttcttcgcgtgggcctatgagcatgggctgaccaccaccgacccggccgccacactgatgactccctcgattcccagcacgctgcccgcggtgctcaccgaatcccaggccgagcaattattggatgtcgctgaacatgccgttgcaacaaaccagtacaaggacgatgggggagcggcagccgcgtccggcagcggcaaggcagctggcaaggcagctgataagtcggccgataccgtaaaccgcagtgaggcacccgcccgtgcagacaagcgcgacaacgcccgagtcaccgccgaatcgcagcgcaacgccgcgattctcgaactgctgtatgccaccggcatccgtgtcgccgaactggtgtcgatggatatcgccgacatcgacttctccaatcgcaccatcaaagtcaccggcaaaggcaacaagcaacgcgtggtgccgttcggactacccgcccagcgtgcgctggagacttggctggaacaggggcggccggtactggcccgtacggcaacggatgcagtcaagtcccgtgctgccaacgccctgttcctcggcgcacgaggcggccgtatcgaccaacgcatagcccgtgacatcgtgcacagagcggcccgagaggccggcgtgccggacatcagcccccatgcgttgcgtcattcggcagccacgcacatgttggatgggggagctgatttgagggaggtgcaggagatgcttgggcattcctccttgaaaactacacaacgctatacgcacgtctccatcgagcagctcaagaaccgttacggacaggcctttccgcgggcatgaccactatgtggacattggttaacaaactcagcaaagactgaacctagccggcaagaacccctgaattttacatgggtgtaacaaaaaatacactgcttgtctcccaagtgcgcaaaaatgacaggtaatcagcaacggggttggattgttcgagacatcgtgagatgcaagtctcacggtgacggggaatccagccccgtttgcatgaggcgaggctgcaacgccccgcaacctaatgaataggagaaatcatatgaagaagaaagctcttgctttcgctgccatggcttgctccgtggccatgctgctgagcgcctgcggcggctctaacagcaacgctgcctccggtaacaccgctggctccaacatcatcactgcgtacaactccgaaccgcagaacccgctgatcccgggcagcaccaacgaaaccggcggcggcaagccggtcgacctgctgttctcccgtctggtctccttcgacaaggacggcaaggcttccaacgaagtggccgagtccatcaccccgaacgatgacgccacccagtacaccatcaagatcaagtctggctggaagttcaccgacggcactccggtgaccgctgagtccttcaccaaggcctggtcctacgtggccaacgccaagaacgcccagaagtgctcctccttcttctccaccatcgccggctatgacgatctgcagaaggatggcctcaagggtgacgagcagctctccggcctcaaggtcgtggacgacaccaccttcaccgtcgacctgaaccagtccgactccgtgttcccgattaaggtcggctactcggccttcgccccgctgcccgagtccttctacaaggacccgaaggccttcggccagaagccgatcggcaacggcccgtacaagctggaccactgggatcacaacaaggaaatcgccctcgtcaagaaccctgactataagggtaacgagcagcccaagaacgacggcgtgaccttcaagatctacaccgacgactccgccgcctaccgtgacattcaggccggcaacctcgacgtgatggaatccgtcccggccgccttcaccaagaccttcaagaccgacaagaaggtccaggcttactccgaggccggctccgtcatccagaccttcaccatcccgtcctcccttgatcacttcaagaacgacgaggaaggtcagctgcgtcgtcaggccatctccatggccatcaaccgtgaccagctcatcgacaaggtgctcaacggtaacgccgccgccgccaccgagttcacctccccgaagaccccgggctactccgactccctcaagggtgccgacaacctgaagttcaacgcctccaaggccaaggaactgtgggccaaggctgacgccatctccaagtacgacggccagctcaccttctcctacaacgccgatggtggtgccaagccgctttacgacgccgtcgtgaaccagctcaagaacaacttgggcatcgacgcggccaccaacccgatcccgaccttccaggaattccgtgacgcggtcaccaaccgtcagatgaagggcgccttccgtaccggctggcagcctgactacccgtccgccgagaactacctgtggcagctgtactccaccgctgctgctgatggcaacggctccaacgatggtgactacaagaacccggccttcgatgacctgtgcaagcaggctgctgccgcttccagcaccgatgacgccaacaagctgtaccagcaggctgaggaaatcctcctcaacgaccttccggccatcccgctgtactactccaacgcctccggcgcggccgccctcaccgtgaagtccggctacgccttcgattggcagaacctcccgacctacaccgagatgtccaagaagtgagtctgactcactgaacggataccgttaggtagttcggaaataaagggcgaggatcgcaagatccccgccctttttgttgtgtgaggggtgcttgctcacgccatcgggaaccaagttaaagtatccactatccgaccgcaaccatggacatatccaccagcattgcccaacctcaaaccttgcgttaacgcaaatttacatatcacagtccgggcatgcggtaaactgtcggagtatttatcgaccggcgggggcgtactataccctttctggccggtctaggaaataaggagcaaccgtatgggtaagtatcttctgcgacgcattctgcagatgattcccgtggttctcggtacgactcttctggtatatgcccttgtattcgccctgccgggcgaccccgtcaaggccatgttaggagacaagcctgtcaatgaggccgtcgcagcccagatccgcgcagaataccatctcgaccagccgttcatcgttcagtacttcatctacctgaagaatgcactgaccctgaacttcggcgataccttcgccggccagcccgttctcgacgaaatcacccgcgccttcccggtcaccatcaggctcggcttgatggcgttcgtgttcgaggcgattttcggtgtggtcttcggcattatctcgggcctcaagaagggcaagtggtacgacaccgttatcctgatcgtctccctgctgcttatttccgtgccgaccttcgtcaccggcttcgtcatgcaatatgtctttggtattcagtgggcgatattgccggtgacggcaggcgccgaccccggcttcctcgacctgctcatgccggccatggtgctcggatcggggtcgatggcctacatcatccgactgacccgctccgaaatctcctccaacatcgccgaggattacgtgcgcaccgcacgggccaaaggtatgtcgaacggtcaggtcatgctgcgccacgtgctgcgcaactccctgattccagtcgtcacttacctcggccaggacatcggcgccctgatgggtggtgccatgatcaccgagcagatcttcaacatccacggcatcggcttcctcacctaccagtccattctgaagggcgaggcaaacctggtggtgtccatcgtcacgttgctcatgctgattttcgtagtgtgcaacctcgttgtcgacatgctgtacgcggccctcgatccgcgtatccgttacgcgtgatagggaggagtgagtcacatggcaaacgaaaccactgaaaacgagctcaaccagaccggcgagccaggaaccgaatacttcatggaaaccctgcccggtcaggaccgttacgtagctcctctcgacgagaccccgttgcaggacgtcgattccgtcgacgaatccgcaccggccaccagcatgtgggccgacgcatggcgaaccctgcgccgcaacccgctgttcatcatctccggcttgctgatcctgttcatcatcgtggtggccatcgcccccggtctgttcaccaagcaggatccgaacgcctgcgatctgggcaactccttgagccccgcctccgccggacaccccttcggctacgacctgcagggctgtgacgtgtacacccgcgtggtctacggcacccgtacctcactgtccgtcggcgtgctctccacgctactggtcgtgatcgtcggtaccctgatcggtgccgtcgccggcttcttcggcggttgggtcgacgcggtgctgagccgtatcaccgacatcttcttcgcgctgcctatgctgcttggcgccatcgtggtgcttcagatgttcaagacctccaagtccatctggaagatcgtgctggtgctgacgctcttcggctgggtcggcgtatgccgtatcgcccgaagcgccgtgctggaatcgaagaacctcgaattcaacaccgcttccacggccctcggctccacgcctgccagaaacctgttccgtcacatcctgccgaactccctggccccgatcatcgtcatcgccaccacctcgctggcctcctacatcgtggccgaagccacgctgagcttcctcggcgtcggcctgcccaccaccacggtgagctggggcggcgacatctccagcgcgcagaccaacctgcagaccgatccgatggtgctgttctacccgtccgccgcactggccatcaccgtgctcgcgttcatcatgatgggcgacgccgtcaaggacgccctcgatccgaagagccgtacggcctgagcgaggggagtggagaatcattatgactgacaacaccaacgccaagatgctggctatgcagaaagagcatggtccgctgctcgaggtcaaggatctggccatcgacttcaccactgacaccggcaagccggtgcatgcggtgcgcgatgccaacttcaccgtctaccccggccagtgggtggccatcgtgggcgaatccggctccggcaagtccacctccgccatggctgtgctgggcctgctgcccggcaccggtcacgtggtcaacggttccatcaagcttgacggcgaggaaatcgccggcgccaagcagagcgagttcgacaagctgcgcggtaccaagatgggtctcgtgcctcaggacccgatgagcaacctcaacccggtgtggcgtatcggctcccaggtcaaggaggcgctgaaggccaacaacatggacgtggcccacgagaagcgctccgccctcgccaaggctctggccggcgacgaggtcgaagtcaagggcaacgacgacgagaccttcctcggcaccaaggaactgcccgagctcatgaccgaggccaagaaggccctgaccgaagccggcgtgtccggcgaggccttcgacaaggccgtcgcccgcttcaccaacgaatgggttccgggctccgaaacccgttggcgcgtggccgacgacctcatcaaggccggcgtggccgacgatcaggcctggtacctcgccaagaagtacgtcatcggctccacaatggatgaccgcatcgcgggtctgctgtccgaggccggtctgcccgacgcggccacgcgcgcccgtcagttcccgcacgagttctccggtggtatgcgccagcgtgcgctcatcgccatcggtctggcttgccgccctgacctgctgatcgccgacgagccgacctccgccctggacgtgaccgtgcagaagcgcatcctcgaccacctgcacatgctcactgactcgctgggcaccgccgtgctgttcatcacccacgatctgggtcttgccgccgagcgcgcccagcacatcgtcgtgatgtacaagggtcaggtcgtcgaatccggtccgtccctcgaggtgctgcagcacccgcagcacccgtacaccaagcgactcgtggccgccgccccgtcgctggcctcccagcgcatcatctccgccaaggagcgcggtgagaacgcggacgccctgcttgaccaccacatcgccggcgaaagcacgcttgagaaaagcgagcacatcatcaccgtcgaccacctgaccaaggaattcaagctgccccgcaagaaggagatgttcaaggccgtcgacgacgtgtccttctccgtcaagcgtggcaccaccctggccatcgtgggcgaatccggttccggcaagtccaccgtggcgaacatggtgcttcacctgctggatcccacttccggcaaggtgttctacgaaggccgcgacacctccacgttcaaggccaaggatctgctcggtttccgccgccacgtgcagccggtgttccagaacccctacggttcgctcgacccgatgtactccatcttccgttccatcgaggagccgctgcgcatccacaagattggcgataagaagtcgcgtgccaatcgtgtcaaggaactgctggacatggtcgagatgccggcttccgtgatgggtcgttacccgaacgagctctccggcggccagcgtcagcgcatcgccatcgcacgagccatggctctggatccggacgtcatcgtgtgcgatgaggccgtctccgccttggacgtgctggtgcaggatcaggtgctgcgtctgctcaacgacctgcaggccgagaagggcctgagctatctgttcatcacccacgatctggccgtggttcgccagatcgccgacgaggtcgtggtgatgcagcacggcaagctcgtggagcacgccaccaccgatgaggtcttcgaccacccgcagaagcagtacacccgagacctgctcgacgccatccccggcggcaagctccaactcggtctggactgataatctgcgtttgagcgcattgtattgggttctttccatccgtggaaagaacccaatattcgtatgtgcaggtttgcattatggttcgcgtgggacgaaaacgcaaaaattggtgttttcccgatgttgtcccacaatttgtgggacaacatcaacatcaatcgatagacatgagtgttgtcccacagcagatttctcacgaagcccggaattacgccattcttagtgtggttgataattactcatgctgtggggcgtgggacgacccgcgaaaatcgtcgattttcggatgttgtcccacggaatacgtcatacctcgtatgtgatcgtgagtggggcgtgatcggaccagcgtttgtcatacgtgggagccttgtcgatgacgaatccgcgtgcggtctccgccaactcgggcgtggcgaactggtagtcgattctccagccgacattgttgtcgaaagcgcgccctcgctggctccaccaggtgtatggcccctgaatgtcgccggccaacgaacgcatcacatccacgaactcgtattcgtccagccatttgtccacgtaggcacgttcttcgggcagaaatccggcgtgcttctcattggccttggcgttcttgatatcgagcggcgtgtgtgcgatgttgaaatcgccgcataatacagcctgcttgccgccatgtgcggcttcatcacgaagcgcgcccatgcgggccagcatagtgtccagaaaacgatacttctgttccattttggtcggatcatcggtgttgccggcatgtatgtacacggatgccacggtgatcgtatagccctcaggcgttttgagatcggtttcgatccaacgccccgaatccacatcctcgctcagacctggcagaccatatcgcttgtcaagcacttccaagtcggtgagcagcccgactcccgcgcggcctttcacccggcagacctcgttcatggtatggaggtcggccggcgcgtcgattttgccggcggtggcgtattcaaaaccaaattcatcgaaaatagaatcgacatcgttctgaggcgcgcgaacctcctgtatgcaccagacatccggcgcatgcttgccggcccaatcctcgatgcccttgcgcttggccgcacgaatgccgttgacgttagacgtggtaatggtgatggtcatgcggccatactattgtggcctccctacgaatcgaaccggacaccggcggccgcgatgctcagctttctctaagcctgagtgctagtgttagcaaggttgcaaccgttacatgaaacgaggaattatgggactgttcggattcggcaagaagaagagcaagaaggaagccgagccggccgttgagcctgtcgatgaggacaaggtggccgccgcagaagcgaacgctgccgcaaaggccgagagcgcggagaccgtgctcgccgagccggccagcgaataccagggccgcggcgaagagcgaggcccgtgggatgtcaacgatgaggacgtgcccgattatgacgattatctggatctcggcgcctactacctgcccttcctccagggcatccagctgcgcatcaaggccaaccgcgccacccagcaagtgcttggttccaccatcaccttcggctcctccagcctggagatcgaagcctttgccgcacccaagaccctgggactgtgggatgacgttcgcggtgacctgcttgaagccaacaaggccgcttctgaagtggacggtgtgttcggcaccgaactgaagctgccggtcaatgtcaagggcggcaaaaccgtgaacacgcgcatcgttggtgtggacggcccgcgctggatgctgcgtggcatcttctccggcaaagctgctatcgatccggacagcccggagaccgaggcgctgaacaagttcttcgccgacatcgtcgtcgagcgtggcgaggagcctttggcgccgcgcgatctgatgccgatgcatccgccggtcgcccccgctgagcgtaaggccgccaaggccgcggccgaagccggcgaggagaacggcaaggaacacttcaaggacattccggacaacaagccgaagggtccgctgagccaggaccagcagaccgaagtgaagaccacgctgtctcgcggcccgatgttctccgaagttcgctgatttataggaagagacttggcagacaacaaacgcaccggcctgtccgctctagccgacgccggcaatgaaggcgaggatttctccgtcatcgacgccatcggtggcccgcgtggcgtcatcgaatccatgctgcctggcgtggtgttcgtcgtactgttcgtggccacgagcaatctgaatctcaccattgcggtttcggccgtgttggcggtattgcaggttattgtgcgactgattcagcgccagtcggtaatgggcgcggtctctggtctggtggcggtaggcatctgcctgatttgggcatggcagactcatgaggcccgcaattactacatcttcggattcattaccaatgccggctatgccgcgttgcttgccgtgtcgctgattgcgcgcgtgcccggactgggtttggtcgtcgaattcatccgtagcctgcccaccgagcatttcaaggcatggttccatgactggatggacgacaaggccctgaaacgcgcctatatgattgtcaccggcctgtgggtcggtctgttcctgctgcggctggtggtgcaggtgccgctgtatctgaccaaccatgtagctgcactcggcgtgacccgcctgctcatgggcattccgttctgggcattggcgatttgggtgagttacctcattattgccacgccgatgcaccggcataaggtcgcggctaggaagatacagactgaagtcgctgttgatgccgaactcgaaccgagcgcaaccggaaaggacgatgatgcaagctgaagttcgtatcgaacgatacgccgaccaaggccgctgcgtggcccatatcgacggtcgtgtggtgttcgtccgcttcgccttgcccgacgaactcgtgcgagtcgaacttgacgagccccacgaccgggacgaccggttctggaccggcgaagtcgtcgaggttctcgagccgtccgaagaccgagtcaccccggcatggccacttgccggtcccttggcgatgggcgggggagtgggcggcgcggatctcgtgcacgtctctttgcccggccagctcaagtggaaggccatcaccgtctccgaacagatgagccgactcggccatatcgacgtggccgttcccatcgagcgcatgcccggcgacaaggcagccggcggcctcaattggcgtacccgcatcgaaatgattgccgacgacaacggcatgccatccatgcgccggcgcggcacacacaaccgcgtggccatcgacaccatgccgcttgccacgcgcacgctgctggacgtcgccaagcgcgaacacgtgtgggaaggcggctttgaacccggctcccagattcgtctttccgtgcccgaaccgcgcggcgagatcgtcgataccgcggcagcaggcgacaattacgccgtacttgtggacggcgaactgcgcgccggctcccagctgctcaccgaacaggtgaccatcaacggcacgaccttcgactatcaggttgacgccaacggtttctggcaagtgcatcgccaagcgccgatcgccctcggtacgcacgtgatcaacctggtcaacgggcagctgcagtcagcggcggacgccgtaatctgggatttgtattccggttccggcctgttcaccctgccgctggccacaatgaccggtgaacgcacccgcatgctcagcgttgaaggcgcgcgtgtggccgtcaagaacgcccagcgcaatctgcgcgccatgaacctgaacgacgtggacgcccgcgcgggtgacgtctcgcgcacgctggaccatgtgccggcgcatctggccaaaccgaatgtcgtagtgcttgatccgccgcgtgccggtgctcgtgccaaggtctgccgccagattgccgcggccggcgcatccagcgtggtctacatcgcctgtgatcccaccagcctcgcacgcgacaccgcgacactcatcggcgaaggctacgagctcaaagacatccgtgccttcgatatctacccgatgacccaccatgttgagacggtggccctgtttacccgctgacaggtgagcatatgacacgacgaattctcggattgctggcctgcatggcggctgtgttgtccctagctgcctgcacgccggccggtagggcggtcggcgatacccaagacagcatgccggaagtcgcccacgattccacacatcccacggatgtcacagtcggctttgtggggtcgactgacaccgccgcagacaagtccgtcatcaatgcgctgtctgatgacaaactcaatgtctactatgcctcgctcgaaacatccgcaagctcggcaaacgcaactgatggtgtatccggtgaaaccgaatcttctgacgccggcactaccagtgaaaacggtgccgatagtatggatgctcatactggcgtcgacaagaatgcggccaccgcacagcagggtgttgccgatttcgtagctcgcgcggtcaaaatcgtggttatcagcggcatcgacgttaccgacgccaaccgggagagctggaaccagacgttgaccaatgcgcgtgaagccggtattccagtcgctctcattgatccaaagcatgcgcccgaagatgaactgctgtacgccgtcatccttcacctcaacaccaacagtgccgattctggcgacactgccgataccaagccaatgactattactgacgccgtgctcaccatcacgcgcgacgaaccccacgaacgcgagatcaaagtcaccgtttcctgagccgaatcaggcccttgaagctgagaaagcaccctgaatcatccctgagccttagcggattgcgaaacaagacgcggtaggctggggaatatgagtgcaacaacagccgtggaaatgcctgaaatcggagcaaccggtcttacctccaaagaagtggtgcagcgtatcgaaagtggccaatcgaatgcggtgaaaacatccacctcgcgttcggttcaagatatcgtgcgagccaacgtattcacgctgttcaacggcatcatcttcgccgcgatggtactggtgctgatcaccggttcctggagggacgcggtgttcggtttcgtcatcatcatcaacacgggcatcggcatcgtcaccgaactcagggccaagcgcacgttggataagctttccatccttgtggcctccgaattcctcgtgcatcgtgacggcagggacgtggaggtgccccacaacgagatcgtgctcgacgacctgctgtggatccgtgccggcgaacaggtgccggccgacgggcagatcatccagacctggggactggagcttgacgaatccatgctcaccggcgaatctcgtaccgtgcgccacaaggtgggggagcaggtgtattccggtgccaccgcggtctccggcatggcattggtcaaggtcaatgcggtcggcagccattcctacgccgccacgctcaccgcgcaggccaaggtatacaagaaaaccgtgtccgacctgaacaagggcatcaacacgattctgaaattcatgaccttcctcgtggtaccgctgtgcattctgctgattctttcgcagattcatacggtcggcggttggggcacggcactctccaccggcgaatggcggcaagccgtggtttccgcggtcgccggcgtagtaggcatgattcccgaaggcttggtgctgctgacttcgctgaacttcgcggtggccgccatgcgtctcgcccgtcacaatacgctggtgcaggagcttgaatccgtggagacactggctcgcgtggacgcgctgaacctcgataaaaccggcacgatcaccgatggcggtatcgccttcaaccggctcgtgatgctcgattccgccagttcggctgcggaacaggcagccacgcaggccctctacgactgctgcaacgaagagcagcccaacggcaccggccaagccgtactcgccgggctcaaggcccaaggatatggggcaggtgcggttgagtctcgtgtcccgttctcttcggcgcgcaaatggagtgcggtgcgtaaatccggcgagacctggtacatgggagcgccggaggtgattatttctgcgcttgagggtgactattcgtcggtgttgcagcaggttaacgagtatgccaatgacggcaaccgtgtgttgcttgttgcgcgatctacagctcccctctccgaggggagctgtcgccaaaagcgactgaggggagcagttgagggagccaatgtctcggacggcccgcaactggatgtgcaggctgagccggtggcgttggtgttgtgctctgagaagattcgcgaggacgccgagcggacgctcgcttggttccgtgagcagggtgtgcgctgtcgtgtgatttccggtgacaatccagtgaccgtgggtgccatc

SEQ ID NO: 3712 - DNA, 6650 bp, Unknown
  R150_10m  MAG No. k141_8077
cgacgagggcgaccacttcggttgcccggtgatgaacttctccgacgctgacgtgccgtacacgcgcgcgatcgagttcaagaacttcaacccggagcgccgcgatgcccagaacccggacaagaccgtggtgtgggaggagtacagccgtttcgccgagcgcggcgacgaaccgtactacccggtgaacacggacgcggacaaggccctgtacgcgcggtacgaggccaaggccgcggccgagccgaacaccgtgttcggcggccgcttgggcacctacaagtactatgacatgcaccaggtgatcgacaccgccctgaccgcctacgaggaacaggtcgcgccgctgctgaagaagtagaccgtcgtttcaccagaggattaacgatttagcttgaaaccgactgaatattgctgaggcaatagccggtttcaggcttctgtgttttttgggaagccaaatttcctggggtacttaaggctcgccatgaggagtacagttgtctgtaacgcacaatgtggcgcgtaagacgaggggcgtatctcgcaagtggggtgcgatgcagttgaaggagtgcatgtcatgactgatccgaatgccaatccgaacggccaggtgccggggcagcaagctgacgccaatccgactgagccgttaaatgcgatgacgggggaagcaggaaccgccgccaacaatgctccaacccaagcactcgcagcgggcgaacagcccactcaggcgttcactcctgttgagcagcctacgcaggcgtttacacctgccgagcagtccacccagcctcttgcgccggtcaatcagccggtaccgcctacgcaggctttgccaccagtgactcctgccgctgcgcccgcgcccacaccggcagcacccgcgcctgcgcccgcactggcagcacccaattcgccctatccggggacggctccggcaggcggatcggttcctccggtctacggcagcgtcagtgctcggtatccgggcggcggggccgtgcctccgcaaacgccctataacccgtatatgcaaggcggccaaccgaacggccagccgggatggtctggttcttacggcagtgtgccgcctgaagcgaaccagaagtacaacggcctggctattgccggttttatctgctcgttccttgtctcactccccggtctgatcctgagcatcgtgggcctcaaccagattaagaaacagggcggcaagggcaagggcttggccatcgccggcatcatcatcagtgcggcgggcatggtgatacaggtaatactggtcatcgcgctgatcgtcggcggtgtctcgtacaccagcaaggctatagatgaggcgaaaaccgattccttctatagtcagtcctcttcgggcaacggtgatagcagcgataagagcaaagctcaagataatcttgacgatgcgctggacgacacgttgggcgaaacccatgacgatctaaccgacggcgattatgggctgtacgattcgattcaggatttcgtcgactattcggaattcaaggactccattgaatccgaagcggatacgtttgcagataccggcatcaccttcaactaccgtgtcgacggtgacaccttggtgtacgagtacgtgctcgacgaccgctatgcctcgctaggcgataccgtcgcttcctcactggatgctatgaacagcacctatcaatccaccgcgaatctgctgggctcgatgtgcaagacctccagcggcaaggcatcgttgcgcgtcatcatgcacacgcaaagcggccagtcgctgtacgacaaaacctggaccgaaaagtagcaatcccagcgaacgtgcgttttggtcgattgaaggccggtctgcttgctccttggacggatgcttctgcggaaggaactgccaaggagtaggcttacaggcatgagactcgcacgtttttctttgaatgattcgccgcgctacgccttcgtgcagaaggacgaaacggacggcaaggactacctcatcgaacttgacggtcatccgctggccggcgaccaggtcaagcccaccggcaaccggtacccggtcgacggcgacggcatccgcctgctctccccggtcatcccctccaaggtctacggcctggccaagaactatgaggcgcacgcccagttcatgcacgaggccggccactccgaaatcgcccacgcgccggaggacatggtgatcttcaccaagccgtccacctcggtgatcggccccgacgatccgatcgtgtacccggcctgctccaaggacatgaacttcgagccggaagtggccgtggtgatgggacgcatcgccaagaacgtgaccgtcgagaacgcgatggattacgtgctcggcttcacctgcgtgaacgacgtgacgttgcgcgatctgcagggcatcgaccccacgtggacgcgcgccaagggcttcgatacctcctgcccgcttggcccgtggattgtgatgcgtgacgacctcgactggaaggacgccaagatttccttcacgctgaacggcgaggatgtgccgatggcgtctggcaccaccgcgaacctgattcacggcatccccgagcagattgccgcgatttcgtcgttctccacgctgctgcctggtgacgtcatcatgaccggcaccccgaacgcctccggccacctcgacccaggcgacgagaccatcgtgcacgtcgagggcatcggcgatctgcgcaacgtaatcgttcgggcgtgactcgttctggatcccctctctgaggggagccgtccaggcggagaagctgactgaggggaaccaagaacgcgccttacgctcccggcaataccgcgtgcagggcggtcatcaccaccaagctgatgatggccgtcactgtcagcgagaagccggcgagcttggcgttgccggttagcgaatcggtgaacttggttgagaagatcgtgataggggcgaacgagcccaacacgatgatctcgcgaatcctcatgtcgaatggcagtaggaaccaggcggccacggcgataatcgcgccgaataccatgcgccagacaatcaccttgcccaactccaccttgtccttgcgattgttcggaatctccatcatcagtccgatcatggccatcgcgcagaaggcgttcgcattggcgaacggggtgatgagcgtaacgatgggctgcgggatcgtgatgtgcaggaacatgaacaccagcatcagcatgtagatgtcgaaggaaatcgagcttaggaagtccctggcaatattgcgcagacgcaggatgagcggtagcgacttgaaattgtcatccatatgcagcagcgtgcgtgtgatggtcagtgacccggccgtggccacggtggcgttgccgatatcgagcatgatgatcggcagaccggcggacgggcccatgaacgtctgaaccacaggcaggcagaacgcgcccaggttcaggcccgaggcgttgagcatctggaaggcgcggtagttcttctcgtcgccgcgagaaccgaaatacacgatgaacagcggaatcgcgcaggcgaagaagccgaacaacacgatccacagcatgcgcatgtcgtgcttgttcgtggcgaacgacaggataatcgcacaaggaagcgtcagattgaataccagaccctgcacgattttgtaatcacgctcgccgaaaatgtggacatgtttgagtatgtagacaccgatgataacgagcagcagcgaaccggcctgaaaaatcatgttcttctcttatcccacaagcacccgccgcagcaccggcggcggtcaggcgcataacaaaccagccgtgagtataggagcgttcgcgcggcgctggcgcggggcggtgcatattgtggacagtcccgtaacgttgatatgccatgctggcgagatgaatatatccaataccaagtggagctcggcacgatagagaggtaggaaaacatggcagagcagacggtcaccgtaggcgttggggcattgagcatcgaggacgttatcgccgtagcgcgcggcggtgccaaagtggcgatttcggacgaatcgaagcatgagatggcgctaagtcgcgcggttatcgatcatttggccgacgacaccgtgccgcattacggtatctccaccggattcggcgcgctcgcctccacttccatccccaaggaacagcgcgcgcagctgcagaaaagtctgatccgctcacatgccgccggtgccggaccggaagtggagcgtgaggtggtgcgcggcctgctggtgctgcgcctgagcaccctgtgcaccggacgcaccggtgtgcgcccggaaaccgcgcaggtctacgccgatatgctgaacgccggcatcaccccggtggtctacgaatacggttcgctcggatgctccggtgatttggcgccgctcgccgcctgcgctttggtggcgatgggcgaaggcgaggcccgcaacgctgacggccgcaagatcggcggcggcgaagcgctgcgtgcggccggcatcacgcccgtcgatttgaaagagaaggaaggcttggcgctggtcaacggcaccgacggcatgctcggcatgttgtgtatggccatcaccgatctgcgcctgctactcaagacggcggacatcgccgccgcgatgagcgtggaaggcatgctcggcaacgaccgcgtgttcgccgccgacttgcaggcgctgcgtccgcatcgcggccaaggcgattccgccgcgaacatcgtccgcatgctcaagggctccggtctgatcgaggccggccgcccgggctccaccgtgcgtgtgcaggacgcctactcgctgcgctgcaccccgcaggtgcacggcgccgcccgcgacaccgtggaatacgcggcctccgtggcgggcgtggaactcgcctccgccatcgacaacccgtgcgtcacgctggacggccgtgtggagtccaacggcaacttccatggcgcgccgctggcctatgtgctcgatttcctggcgattccgactgccgacgtagcctctatctccgagcgtcgtaccgaccgcttccttgacgtggcgcgcaaccgcggcctgccggcgttcctggctggtgacccgggcgtggactccggtttcatgatcgcccagtacaccgccgccggcatcgtctccgaaatgaagcgcaacgccgtgcccgcctcggtcgattcgattccgagctccgccatgcaggaagatcacgtgtcgatgggctgggccgccgcccgcaagctgcgccggtcgattccggcctttgcgcgcgtgctggccgtggaactgctgtgctcctgccgctccttcgacttccgcaagccgtaccgtccgggtgcggcgggcgccgccgtataccgcgtggtgcgccagtacgccaacgaaatcggccccgacgtacgcgatacctggaccaccccgcaaatcgaaggcgtagccaacgccatcctctccggcgaaatcctatccgccgccgaagctgccgtcggcctcctgaaatagatgtgagctccctcatcagagggggctactgttcaccctccccaccaaaatccaaaacttgagtcacctgcactcaagttttgggaatagaatgggttctaggtcggttgaccatatcagacaacgacaagttgtggtctgcggtggcgcttgcggggctttcgaagcccgcgagccgctccgcgcgggccgcatgatatggaggaatacgatatggaacagaagttcaccactatggcccaggaggccgtcagcgacgcgattcagagtgcgtccgccgcaggaaacgcgcaggttgagaccctgcacgtcatggatgcgttgctgcgtcaggaaaacggcgtggtgcgctccctcatcgaggccgcgggcggagacccacaggccatcggcgccgccgtgcgtaacgctttggtcgcattgccgagcgcatccggctccagcacttcgcagccgcaagccagccgccagctgaccgccgccatcgcccaggctgagaaggaaatgcagcagatgggcgacgactacgtctccaccgagcacctgctcatcggcatcgcggccagcaagccgaaccagtcggccgaaatcctggagaagaacggcgtcaccgcagcctccctgcgcaaggccgtacccggcgtgcgtggcggcgcgaaggtcaccagcccggacgcggaaggctcgtacaaggccctggagaagtactccaccgacctgacggccgccgccaaggaaggcaagctcgatccggtgatcggccgtgatcaggaaatccgccgcgtgattcagatcctctcccgtcgtaccaagaacaacccggtgctgatcggcgagcccggcgtcggcaagaccgccgtcgtggaaggcctggcccagcgtatcgtggcgggcgacgtgcccaccaccctgcaaggcaagaagctcatctcccttgacctaggctccatggtggccggctcgaagtaccgtggcgagttcgaggagcgcctgaagagcgtcctcaacgaaatcaagaacgcggacggccagatcatcaccttcatcgacgagattcacaccatcgtcggcgcgggtgcggccgaaggctcgatggacgccggcaatatgctgaagcctatgctggcccgtggcgagctgcgc

SEQ ID NO: 3713 - DNA, 56770 bp, Unknown
  R150_10m  MAG No. k141_8282
aggatggcgacgccgagcgcgaggtaggccagttcccggatgtctccaaggaagaggcgttggcactgtacgcccgtcgtttcctggatctcaaggccaagctcgatctgctggccacccgtctggcttccccgaacatcaaggcccgtgaaatcgacgagtccgtgaagctgctgggcgaagaaaccgccgaaccggcggtggtgggcgacctcgcggccctcaaggcccgttacgtggaactgaaggccgccggcgaggccaagaagaccgaaatcgccgaggcacgcaaggccgctcaggccaaggccgtcgccgagcgcaccgccattgtcgagaaggctgaagcactggcggcctccctaggcgacaacaccaactggcgctccaccgccgacaagttccgtaacctgttcgacgagtggcagaaccaccagcgcaccaccgtgcgcatcgacaagccggaggccgaggcgctgtggaagcgcttctccgccgcccgcaccaccttcaaccaggctcgccgcaagtgggctcaggctcgcgacaacgagcgtacagccgccaaggaagccaaggaagcgattatcgccgaggccaatgagctcaaggattccaccgcttggggtgaaacttcccgcaagttcaacgatctgatggaccgttggaagaaggccggccgcgctggccgtaacgaggacgacgagctgtgggccaagttccgcgaagccgccgacaccttcttcaacgctcgtcaggctgatcgcgatcagatcaactcctccgagaaggagaatctggctgccaaggaggctctgctggtcaaggccgaggctctggtgccggtgaagaccgacgccgaggccaagaaggcccgccaggagctggccaagattcaggaagagtgggatcagatcggttacgtgccgcgtgacgatatgcgccgcatcgagaaccgtctcgacgccgttgacaagcagatcaaggccatcgaggatgccgcttggaagcagaccgacccggaggccgacgcccgcaagtccagcttcgaggagcagctcaacgcccagctcgccgagctcgacgccaagatcgcggccgaatccgacccgaagaagaaggccaagctcgaagccgagaaggccaccaaggagcagtggctgaacgccatcaagtaagggtctcgtgccaggttcccctctgagggaagccggcagcaaggctgactgaggggagtttacggttataccgcaagctcccctcagtcgcctacggcgacagctcccctcagcgaggggagcttcgtcatatttatgccgttttcttctgccctatactcataacttcaccccatagttcctcagtcacccagcaattggtgtcttacgcctgagttcctaccggtgctgcaacaattgccgtgagcccttgatgtgcggccagatattcatgcaacggctggctgtatggcatattcagctcgccgtaattggttccggcacggaaggcggggtaactgtcgccgccctgaagcagatatgaattggatgcgataatcaccaggtcatcgtccgcaatcggtcgaccgtcaacggcgaggttcacgatacgaaccgccgcatgttcgtcggcagcacactcgtcagcgtcagcgttggtatcagcggcggcatcagtatcagcggcggcatcggcattgccgctcccaccggtcgtaccgcattcggcataccgatacgtcacgttcgaggagatgccgagccagcgccgctccagtcgcccatcgtcacggtggaattgctcggcgagcactctcttcacatcgcgcccggtgagcgtctcatgcgcggccttgaactgcaaggccatgagactatccacctcgcgcacggtgactttgccatcgccattcatatcaagccgtggagtccgcagactgccattattcgaaaatccgattaccggcaaacgatttccggcatacacatgcttcatgattgactcgcggttcgcgtccgccaccagcacaccgaccgtattcccgtgcttatccgaaccttgtttgtcgaaattcacgccggaggccaaggtgccaatcaccgcgttgccggcatgattcgaatatgttgccgccgcctggtaaatatgctgagcgcgcgatacctcatcgttcgcctcagcaccggcagacatccaagcggcttgcgccggatgcgcattaagcccttccacgcccagcacgccgtcaaccgccgtatggctggtgccattgccgaggtccacatcggccactcgcaccgtggcgcgacgcccggcaccggtgatgatcaaatcctgcacggccatattccgcccgaagctgcccgcctcgtaaataggcgcgccaccagcggtcgtaccacgcttgatcgcatgattgtggccggtgtataccacatcaacatctcgcccaatatcggcggcggctgaggcatcggcgtgcagcaaggccaccaccgcatccacctttccggagcgcttgagttcacgggccacgcgattgatcgcgtccaccgcccgttcgtcaagatcggcatcacgcgtaatctgcggagtggctaccgagccgagcgcatcagtaagggcgcccacgaaaccgatccgcttgccgttcaccgttcgaatcgtagagtcacgtacatggctcagcagtccgtcaggcgacttactggcggcagacgtgttggcgcacagccagtcgatgccattgctgggatcagcgatgcgattgttgaaatcggcgacaccgcggtcgaactcatggttgcctaccgccgaaatcgtcaatccccacgctttggccatgtccagcgtgggttggtccttctccaccgccgactcatacggggaacctcccaccaaatcgccggtcgataccgggatcatattgccgggattatggctgtcggccacggtgaaggcggtggcgttgtccgcaccacgttcgatatgcccgtgaaaatcagtgatgtcggcgatggtcaccgtacgggtgccggaagatggattatcgccggaaaaaggaacggctcccgtggttcccgcacaagcataaggaaccaccagagccgtaaggataagcgctactgcaccaaaagcgatccccgatcgcttgccggcccaccgccggttcttcatattcctgctcacaccagtcacgctaggatcgtcgattgaacggccatgcctaggaaggcgactctcaggtgaattcttagcggcgtcttgggatgggaaaggcctgaccccgtactatcagggtcaggcctttgcaacccgtgtcactacgaatgcgtcggcaaggggagattactcggcaaattcctcgacgcagatctcagctaccgcatccacgcacgcctcggcaatcaggcggccgcgttcggcgcttgagccggccggattggcgagtccgccgtgagcgggaacgtcaccttgacgcaccgggtagcgtacataggatttcgccgtggcaccggcttcctcgaccatacggtccatgtgcaccagttccggcgcgtagtggagcatcaacgaagtttcggtgacggccgcatgctccaatgcccaaccggggaacaccaatccatcgaacaccttgtcgataaccgactgcggaaccgggtcccaccaattggtttccacgatggtggccactcccccggtttcgcgggtgaccaggtcgatggcctcgacgatgaacgcctcgttttcaaaatgcgcgttcatgacgacgatcttggtgaagccatcggcgataagttcgctcagcacgtcgtgcatttgggtgatcactgtcacgccgttcatgtcgatagtacccgggaacagcggcccgccaccggagagcggcttggacttgtatccgtagctcagggtgggcagcacggtgccgtcgatgcgttccgccagatcttcggcgacccgcgtggcgagtaccgcgtcggtaccgatgggcagatgctggccgtgctgttcggtcgaaccgatcggcacgatgacgggatgagtcttcacctccttgaattccggccaggtcatgtggtccatacggcggttgctacccattgcagtactcctttgggttggtggtggattggatggtcaatgaatgcgcccggctccctcgggaaaggagccggagctgaggagatcagatgtgattcagatccttgtcggtgttttcatgggaaagaatcatcgcgaccaaggcgatggccgcaacacccaccatgtaccaggccggggcgatggatgaaccggttagggcaatcaggccagtggcgatgaacgaggccgtaccaccgaagatggcattggccagattgaagctgaacgcgaatccggtgaagcgcacggaggtggggaacgtctcggtcaggtagctggacagggtaccgtcgttggcggtcagggtggcgcacattgccagctcaaccagcagcacgggccagaactgggaggtgttgaggatgaggaaggcaggaacggtgaggacgatgaacgccacgcaagcaccgatgagcaccttcttgcggccgaatttgtcggagatgcggcccatgccgaacaccatgaacacgtaggcgaccaagcagatggtggtgatggtgccggactgggtggcgtccatgccgacggtgtcagacagataggtcggcaggtaggtgagcacggtgtagaagccgaccgcattcagcacgcaggctccgaagctgatgatcagggccttgagatggttgtggaagagttcggcgagcggggcgaacatgccgctcttggaaacgacttggccgtcagcggaggcggcgctcttggactcaagagcatcgttcattgactggtacacgggggaatcggagagcttggtacggatgtacagcacaatcaggccgagcgggccggccagcaggaacggcacacgccatccccaaccgaccatcgcgctggagttcatgttggcggtcatcagcgtggccagcgtggagccagcgagcagaccgatggcggtggacgccggaatcagcgagcagtagatgccacgctttgaggtgggtgcatattcgccgaggaatgtggccgcaccggcatattcaccggaagcggagaagccttgcaccatgcgcagcagcagaagcagaatcggcgcgccaacgccgatcaccgagtaagacggcaggcagccaatcaggaagctcgcaccggacatgaacataatcgagtgggccaatgcggctttacggcctttcttatctccgtagctaccccagaacagtgcgccgattggacgcaggatgaaggatagcgcgaacacgccgaaggtctgcagcatggcgacggtgtgattgtcggttgggaagaacaccagggcgatggtggtggcgaagtacgaataggaggcgtagtcgaaccactcgatgaagttgccaaggaaggaagataccgcgactttcctgaccatggcctgttcttcagtttgaggggtgaaattcatcagtcgtgcagatgtagtaatcgttgcggaactcatgatgtcaccgtcctttcaaggatgtgctgttcgtgtgactgaatgggattcaagtgggaattcgtttcgcagcaggtcgaccagcgccgcgatagcctcgactatgcccttgagtatttgctgaaacgtgaatcgtcgattaacccgttcggcgtagaagtggacaggttgcccagtggtgctggcgcattattcaccatgccgttcttgccatgatttcgtgagtttggcggcgaatagcagcatcgaccagttcggtttgtcgttatagtcgacgccgaccatttgtgtcactttgtccagtcggttgtacagggtttgccgtctgatacccaattgctcgcacgcgccggttttgctatcgaggttgtcgaagcagacgcacagtgtgtccagcaacaacggagaggcggcgacctcgaatccgatggtctgcaccacgagcatgcgcatcgccttgtccatatcagaggatgcgacgaaacggtcgacgagtgcggacatggtacttacgattcgcccgtatgccggttcctgattggcgatgtcacgcaataccgcgaacccgtcgaccagcgtcaccgtgtccaatgccactcggccatgcaccacgtacacaccgtcgccttccagtacggcaagcgcatccatgcaatggcgtccgaatgcggccgcaccgtctgaggaatcggtggtggagcaccatccgaccatcaagtcaccttccagcatgcaggagacggcgcatcccgaccgttcttcgaaccgttcgaccatcgtcgatacatggttgatgccttccaccaccgatctgaaccgaaaagcgaatggcatatagatgcatgatccggcaaaacccagcgcgtcgagcatcgcatgcgcttcctgcgcctcaaatgtattgacgtgcacgccgtcggccgggcccatactcagatgatgcatcatgcccatgcgcgcgccgccgtcaatatagagggcggccaccggagacacgatggtggcgatggcccgacgcatcgtggcgtcgaaagtcatggtgcgttgcgtgatctccaatgctcccaccggccgggagcgactttcaagggcgatgacggcgctcgattcgttgccggcatcgaacgcacgacccgctcgagcggccaacagaccgtcaccatcgaaaatggcgacgctttcgccgaacagcgacgcaatggtttcggccacagcctcgatattgccggtacgggacaatccctcacgtaatgaagtggacattgtgtccacctccaattgcaagtgcatctgttcgtgcacgatagcggtattgacactctgacagatatcgacaaaaggtacgcgagatttcagaccaatcaacgtcaacccatgcagcctggccgcagacaccagttcgtccggcatccgcaccacaccctccaccagttcgaccaccagagcggcgacaccagcctgtgccaggcttgctacatattgtcctaacgtgccgtgccaatcggcggcgagcagagcgttaccctcgataatcagcatctcaccgcccgaaaggaaactggagacatcctctcgctcgttggtaaacacccatcgcactggcgtatcgaggtctttgccttcgacctccaccacaggatcggctcgtttgaactgcgtgttatgaagcgcactgcgaatcgatacagtcatacaatctgtccattcccccgcggaacaccggtcgttccggttaacctcaccgcaaagcgtgctgttgacaataacctcagttggttacgcgggcagtcggttcacgtaaccgttcggcaacacaccagttgaaggagcgacgatgactaccacactgttcaccaacgcacatatcgccaccggagaacccggcagcacggctgcaagcaccctgccattgcaggacattctcgtcacggatggcgtgttcaccgcattcggccccggactcgcgcaacaatatgaggctcagggtggtgatctggcggccattgaggtggtcgatctgggcggcaaacttgtctgcccaccgttctgcgatacgcatctgcaccttgattacgtattcacggcccgcaagcccggtgcggtgaatgaaagcggaaccttgtttgagggcatccagcgatggagtgagaccaagtccgacttgacggtcgacgagatcaagcagcgcgcgaaaatcggcattaagaaagaaatgctgcatggcgtgcagctcattcgctcccatgccgatgtgaccgacccgaacctgacctcattaaaggcgctgctggagcttaaggaggaattgaaggatacggtcactctccagatcgtcagcttcccgcaggagggcatgtactcctacgagggcccgcatggcgaatcgggggccgagctggtggaggaaggactcaagatgggtgccgactgcgtgggcggcatcccccatttcgaacagtgccgtgagtttggcgagcattccatgcacacggtagttgagttggcttcgaaatacgacaagctcatcgacgtgcattgcgatgagacggatgatccgaattcccgttacgtggagctgctttcggcgttggcatataaggctggcattggcccgaaggtcaccgccagccacacctgttcgctgggatcggcggacaacgcctacttcttccacctgaccaagctgcttaaggcggcgcatatcaacttcgcctgcgcccccaccgagaacctgtatttgcagggccgtcaggataccttccccaagcgccgtggcatcacgcgagtcaaggagctcactgaggcgggtgtcaatgtgtcattgggccaggattcaatgcaggacccgtggtacccgctgggcaatggcaatatgatgctcattcttgattatgtgctgcatttggcacagatgatgagctttgaagaaatcgacgatgcgttgaagttcctgaccatcaacggtgccactacgttgggcctgcgcgatatgtacggcttggaaacgggcaagccagcaaacttcattgtgctggacgccgatagtgtgttcaacgccgtgtatgagcgctgctcggtattgcgttcggtgcgcgccggccgcacgctgtttacccgcgaggagaccatcgacaccggactcgccctgctgcaataacccgacaacaaacagtagttccccttgacaggggagctatcgccagaggcaactgaggggtagaccaaaaacgtgcacattatgtgtgcgtaggtctacccctcagtcagcttcgctgacagctcccctgtcaaggggagctttgctggtatgcgctagctacgctatcgaaacggactacttctgcggagcgtcaccggaatcggcgggagcggattcggctggttcagtggccggagtggcgtcggctggagtctcgccatcagtggaggcaccggcttcggacgaagtttcggcatcggtggcggcaccgtcttcggcgggcttatcggcggcggccggctcctcgaacttctcccccttgaaggtgaattcgccgaggataccctcgccttccgcatccacaatcacgcgctgaccgtcttcgagatcgcccatcagaatcttctcggagatggcgtcctcgatgtcgcgctgaatcacgcggcgcagcggacgggcacctagcagcgggtcgaagcccttctgcgcgagcaggtccttggcggcgtcggtgagttcgagcgacatgtgacggtcgaacaggcggtcgttgagctgcttgacgtccagatccacgatctggcgcacctgtggctcggtgagctgcttgaagacgatgatgtcgtccagacggttcaggaactccgggcggaactgctgcttcaattcggagctgacctggtccttcatgcgctggtagctggactcgttgttagcacccaggttgaagcccgtgttggcggccttggcgatgtctcgcgtaccgaggttggtggtcaggatgatgatggtgttcttgaagtccaccttgcggccctgaccgtcggtcaggtggccgtcatcgagcacctgcagcagcgtgttgaagatgtccggatgagccttttcgatctcgtcgaacagcaccacggagaacggcttgcggcgcaccttttcggtaagctcgccgccctcctcgtagccgacgtatcccggaggcgcgccgaagagtcgcgaagccgcgtacttctcggagaactcggacatatccacgcgaatcagcgcgtcctcatcgtcgaacaggaattcggcgagcgtcttggccagctcggtcttgcccacgccggtggggccggcgaagatgaacgaaccggacgggcgcttcgggtccttcagacccacgcgagtacggcggatagagcgggacagggcggaaaccgcctcgtcctggccgatgatgcgcttgtgcagttcggcttccatgttgagcagtttcttggactcggcctgagtcagcttgaacaccgggataccggtggtggagctgatgacctcggcgatcacgtcctcgtccacgaccatcttgacgtcggactcgccttcgcgccaggagtcttccttctgcttgcgatcggcttccagcttctcctgcttgtcgcgcagttcggcggccttctcgaagtcctgacccttgatggcctcgtccttgtcggcggcgatcttggcgatcttctcgtcgagttccttgagctcaggcggggcggtcaggcgcttgatgcgcaggcgtgcaccggcctcatcgatcaggtcgatggccttgtcgggcaggttgcggtcctggatgtaccggctggacagctcggcggcggactgcagcgcgccatcggtgatggtcacgtggtggtggttctcgtaacgggaacgcaggcccttcaggatctcgatggtctcggcgatggtcggctcgtgcacctgaatcggctggaaacggcgttccagagccgcatccttttcgatgtacttgcggtactcgtcggtagtggtggcaccgatggtctggagctcgccacgagccagcatcggcttcaacatgtcggaggcacccagcgcgccgtcggcggagccggcgcccacgatggtgtggatctcatcgatgaacagcacgatatcaccacgggtcttgatttccttcagcaccttcttcaggcgctcctcgaaatcaccacggtagcgagaaccggccaccatggaaccgaggtccagcgaatagacctgcttgcccttcagggtttccggcacgtcgccggcctgaatcttctgggccaagccttcgaccacggcggtcttacccacgccgggctcgccgatcagcaccgggttgttcttggtgcggcgggagagcacgaccatgacgcgctcgatctcgttggtgcggccgatgaccgggtccagcttgccttcagcggcttcgacggtcaggttgcggccgaactgatcgagaatggcggaaccggacttgttctgcttgtctgtcacgccgccggcgttggccagatcgcccttgccgtcaccggtgccggtgccggagttgccgcgaatcatatcgatggtcgcgctcctgagctcacccaggtcgacgtccatcttgatgagcacctgggtgcccacgccttcgccttcgcgaatcaggccgagcaggatgtgctcggtgccgatgtagctgtggcccagctgcagggcttcgcgcagcgagaactccaacacctgcttggcgtgcggagtaaaggggatgtgcccgttcggagccgcgttgcccttgccgatcatttcttcaacctgcttgcgagtggcatccagctccacgcccttcgaggcgagtgccttggcggctacaccctcaccttcgcggatcaggccgagcagcaggtgttcggtgccgatgtagttgtgctgaagggtcctcgcctcttcctgcgccaacacgatcacgcgccgtgcacggtcggtaaaccgttcgaacatgcttgtccttcctcaattgacattccgtcttactctaccgattcacgatgacgtttattcatcggattccatgaattgcgccgtaagaggataagaaaacgatatgctggttctagattcacccgtagtcgattacaaggaggctcgaaatgagtgaagcgacaaccaagcccgacatcgttgtcggcgtggatggttccgatgaatcctttgccgcgctgaagtgggcgcttgaggaggcttcgttaaccggtcagagcgtcaacgccgtgtttggctggacgcattcctgggatatggggtccgaaccggacagcgacgaggcctgggccaaagtccgccacgacatcgccaacgagctgcgtgtgtgggtcgacaaggccgctgcaggcatcgacttcgatccggcgaatctgaagctcacctcggtgaaggcctccggcacttcggccctgctgcagatcggccatgatgcgcagcagatcgtggtcggccgccgctcgctgagccgtgtggcccgctggttcatggggtccctgtccgcttcgctggccgaggccgccgaagtgccggtgaccgtggtgcgcatcgccggcagcgaggatgagaccgtgaccgatgccatcgccaatgccctgacgccaggagaccagccggtccactacacgcagccacagcccgtggtcgaggtggctcgccgcccggtggtggttggtgtggatggttccgagacttcccgccgcgcgttcgacttcgcgctggaaaaggcacgactgcacgacgcgccgctgcatgtgatgttctgctggcagctcaaggatttgggcgttattccgggctatgagaacgccgtggcaccggtgaaggtcggtcagcgccgcgccgaggagattctcgccgggctgatggccaaggccgagattcccgatggtgtcaaggtcagcgcgaatgccttccatattcccgcgtccaaggggctgattgcggcatctcggtacgccagccatctggtggtcggttcgcgcggcctgtccggtctggacgcgcacttcctgggatcggtgtcccgtcagatcgtgaacttcgccgaatgcacggtgactgtggtgcactgattcaccgaaatcggcatggagtgctaacgcacgtctcggtgatgggcttgcagggaggaattctttattcctgcaaccgttgtagatgactttgttttagcttgtcgctagagcgaagtcatctgcatggcctcgttgccgaggccagctccaagactcacacggcttacgccgtcgcttggttcgcgtttcacaggatgccgcgttgcccgacgcgatgcgtcggtccgtcttccgcttcctccgcgcgcgtttaacgtctccggggcactcccggcgacttggatgttgatggccgcgttcagatcgcggtcgatgacaagcccgcactcctcgcaatggtagacacgttcggacagggacagtttggctttcaccgtcccgcagttcgagcatgtcttgctgcttggatgccagcggtcgatgacgtggagcctcgcgccggtgcgtgcggtcttgtattcgagctgtcggcggaactccgcgaacgcggcgtcctctaccgagcgggcgagcctatggtttctcaccatgcccgccacgttcaaatcctcgatgctgatgtccgcgtaggtgcgggcgagcatggtggtggtcttgtccagtaggtcgcggcgtaggtccgccacgcgggcgtgcagacgcgcgaccctcgttctcgccttgcgtcggcggttggagcctttccgtttgcggctcagattccgttgggctttcttcaatcgtccgaggttcgatttgagtgcgtgcgggttgtgtattatggtgccgtccgataatgtggcgagttccttcacgcccaagtcgatgccgacgctcccgcctttcggcggcgatggaatcggcaggtcggcgcgttcgacggtcaggctggcctgccagcgtccaccacgcttggatacgctcatgcgcagcaccctcgcgccgtccacgcgcctggacacgttctccatgcagtgcacgcgccctatcctcgggagtcttagcgcgtatgggtcgtggtcgatgaggccgaacgagcccgtcgtgtacgcgaatccgggaaccgccctgtccttggatttgaagcgtgggaagcccatcctgcggcctttccgctgccccttgcgggacttggagaagttcttcagcgcgtcggccaatgattcgaggccgctgttgtacgactccttgctgttctccggccaccacggcttgccggtctccatgctgacggcgagggcgtccttgttggcgttccaccacctgcgcagcgcgtagtacgaccattccggcttctcctgccgttcaagcatgtccttgacgtgcgcgagtcccgcgttgtacgcgaaccgcgccgcaccggcatgggactccaacagtcgttcctgccgtggcgtcgggtcgagcgccaccctgaccgcctcaagcatcacgcgccgccctcaacgccgcgtccgtcttgcgcttggccgcgcgacgcccgtacagccgggcgcagaacgaggtcagcacctcggccatgtcgcgcaccagatcgtcatccggctccgtgtcgtccaccacgatgatccggcgtccctgcgccttcaacgcgctctccaccagccccgcgttcatgcgggcgagcctgtccctgcgctccacgatcagcgtgcccacggtcgggtcggacaacagccggttgagcttgcgccgcttgtcgttcatgcccgaaccggtctccgtgaccacctcgggcttctcgacgcccatgccaagggcgaacgccttcaaccggtcggcctgacgttgcaaatcgtccttttggtcggacgagctgacacgcgcgtaacacaccgtcctgccgttcgccgtgggggcggcgggctggttctcgtatttcgggtcgtggatgataatcgtgcccgtgttcatgcgctcgaacgggacgggcatacggttctcgcgacaccactgccacaccgtctgctcgttgaagccctcacgcctcgcccattccctgacacgcatgacttaattatatcacacgaaaacaaactaaagcaaataatcaatctagcaggttataaccccatcaccatctactttttaggaaacatcttcgctgagacctataagttgatccgagagtacattctgctgttggggagcaggattggcgtttattttattcctcgtccgccctgttctggcgcagctgctcaatgagatcgatgacggtttcgagttcaggagtcacatcgtctgaaggacgaacgttatcctcttcgtcgtccatctcatcatcctcatcatcatcggcaacggtgttgttgaggatgtcttcttcggtggcctcgtcgtcagcatcagacttggactcgtcgctggaatcagctgcatcaacatccacaacggaatcggatgcgttctgtgcaacagactcatcaccggcagactgggattgcgaggtcccgtcgcctgccgcctcctcagcgggctcagtatcgacggcgttcccgtcaacagtcttctgtgcttcgatatcatcaccggcaggctcgcctgtcttgtcggtttcgccttcggcctcgtcctgggcaacctgctcctgcttgcacggacggttggcaaccacgtcgatatgcagatcgtcaaaggctggcttggactgcacccacagctggcttggctcgggaggttcgatttcggaatgctcaccgcagccgtggtccagggagaccacgcggccgtcatccggactccacttgttggcgcacacgccgaacatacggtcgagttcgcccgcgagcggcacgaagaaaccacaggtggagcacaggttgccttcggcggttttggtgctcaacgctttggggcctcgcggaccttcataccagcgcttggcagcctgcgcacgacccaacgaggtcagcacgtgacggcgggtcagtcggaaggtctcgacggcatcgttgacatcctgcagcgaggattcctcgacttcgccttcctcgatgcgctcatcatccggatcggtaccgatcgaatcggtgggagccagatctgtgggctcaaggcgatctttccaaggaatccacttgggcggcatcaacgcgccctcagtggggatcaaggaggattcgttgacggtccaggagtcgatctcctcgtcgtgatacagcgtcaccgaccattgccatccttcgtagccacggatattcgcggcgaagcggaagtcagtgacgtgatcctcaagatcatatgaggtaacgaaatcccccacctgatcgctctcgtcggccacttcgagcagcacggcgcgcgcgatggcgtgagggtccggtgtcacgatggtttcggtggtatcagtcatagatcagatcagtcctgtacatcgaattgatccgccaccgcacgcagcaacgtggccagctttttgctgtcggcagcagatgggtaacggtgacggcgcaacgtattgccggccgcatcaagcatcttgataaggtcctcgcagatggcggccatgtcatccgccttcgggcgggtggccttgaccaagctgggagtggaggcgatcaggcgaacatccatggcctgcggcccacgacggccgtccaccacggaatactccaccttggcccccttgcgcaacgtggtggcgccagtgggtagggcctgagccggcaggaacacgtccttgccttcctcactggtgatgaagccataacccttggctgcgtcaaaccaacgaactcgaccggtgggcattgcgaaccttccttaatcctcaatggaaatagtaaaccgaaggtacagtttacctcacagggcttgacctcacgctttgggctgagtcgcctgagtcttacgctcagagctgaaccaagaagtcttctgtttggcgtccttggttttgccggtgggccgcttgggctcaggagcgacgatctgctcaatcggcagcaccacggtgaaggtcaggcctcccccatcggtgccggtggcgcagataaagccgtgatgtgctttgaccacggattgcgcgatggccatgcccaaaccggtaccacccttttcgcgggcacgggatggatccgcggtgtagaagcgttcgaaaatcttcgagcgcgattcaggcggcacgccggggccatggtccacgaaacgcaatacggcgtatcgatagccggtctgcatcgaggcacctacttcggcggcgtcgatgaaccgccgcattgacgcgtcgctggcgggcatgcgagcgagctgtcttggatcgatggcggccggcatcacaccgagcgcggcctcggcaggcgaatcggcaggcgtgtagcggtggatgttgcccacgatgttggtcaccacctggcgcagtcgagaggcgtcgccgggcagcacgacctcgggccaatcgccttcggcaaggttgaattcggcgggatggttcaaatcgcgcgccggttcgagggaaatctgcatgcggcgaacggcacggtccgggtcgagcgcatgcaagtcgtcgacggcgtcggtgaccagcgacgagagtttcaccgtgccggtcacatcgatgccgcgcccctcatcgagacgggccaaagacagcagatcctcaacaagaacagtcatgcgctggctggaccgttcgatatgttcgatggactcgtccgcacgctccaaggcaccaggcatatcgcgctgcatcttatacagctccgcatagccatggatggcggccaacggggtgcgcagctcatggctggcgtcggagacgaaccgtttcatcttgtcggtggtctcctcctgttcatggaaactggattctattcgggtgagcatggagttcagcgaggcggccagggagccgacctcggtgttttccggcgcggaaggaatacgttggctcaggtcgccggcggcaatctttgcagcggttttctcgatgcgcttcagcggcgtcatcgtgtgctggatgatcagcgtggacagggagccgccgagcagcaccacggcgatgccgaccacaatgcagtatcgggtgagtgtgttgacggtgtcgatctggtcggccagtgacaagccgatgtacaccacggcacggtccttgccgttttgctggaaggtcaccggcagaatacgccatggtgccctcgccgtgacgatggcggcatggttggcattgacagtggggttggccagtaccttggcgatggtgtcagaggaattggagtttccgttggccggatcgttctggctgtccgcactgtcggactgcaccgtgatgatctgcttggccactgcctgcgtagtgaatgcctggccgagcgtgatgccactggtatcaccataggtaggaagaatcggcaccgatacgataccgtcctgcatctgcggcatcagcggggtcacgaccagaggattgccctctttgtctttggtgccgtcggtatattgaatctgcagaaagtacgagttcggccccgatgagtcattttttgacagcagatcgatattgttgaccaccagctggctttgcgagcttaactgggtgtcggttttctgcagcatgtagttgttcaccaacgcgcggatggagaaggaaatcaccgacacgccgataagcagcacggcgatggtgcaggccaccagcttgctgctcaacgagatacggtcgatatgccgcatcagcatgtttttcttacgttcgcgccgctcttggaaatgggcggcgaacggcggcattgcaggcatgggattcgtgttcggggcggcgttcggcgtgctgctcggcggtacgccgcctgactgcttatcggggatactcatgagattgcgatgcgttatggatggggcgactagttcttcggttcgcgaatcatatatccgatgccgcgcttggtttcaatcagcgaagtcaccttgcgcttgccgccttcgccgtcgtcgacctcgatgccgtcgactttcttgcgcaggtaggagatgtacgattcgacgatggctgcgtcgccgccccagtcgtattgccagacatggtcgagaatctgtgccttggacagtactcggccctcattgtccatcaggtagcgaagcagcttgtattcggtggggctcaggtcaaccggctgccctgcacgggtcacatcgtgggagtcctcgttgatttccaagtcggcgacgcgaataatcgggtcgtcttccacctgttcgcgggtacggcgcagaatggcgcggatgcgagccacgacttcctcgaggctgaacggcttggtgacgtaatcgtcaccgccgacggtcaggcccatgatcttgtcttgggtgtcgtcacgagcggtgaggaacagcacaggggcgttaatgccttcctggcggatgcggcgggtgacggtaaatccatcgatgtcaggcagcatgacgtccaacacgatgagatcaggctgcactttttcgataacctcaatggcttcggaaccggaagcggcggtgtttacctcgaatccggcgaagtgtagggaagcgaccagcagttctcggatggacggctcgtcgtcgacaacaacaatcgatgcttcaataggcttactcatgcttcctagagtgtcgcgctcttctgggcgtttcctgaatgtcatcttggagttcggccttggaatccttcttgatctccttgcgccgacgaatcaccaccatgaccacgatgatgatgaccagcgccaccaacaccacacccatgatgattatgcctacggtcaccgtggatgatgaggtggaggcttttttggatttcacgatttgatccatcattgccgttgccgcgccagaccagctcggcgggttttccagtaacggctgctgtgcggcttcggatagcttatcgacggttttgttatcgagaagccacttatcggagttcttggacacgacgaccaccaggttgccgtcattcgaggccacggcaagcatcactgtgttcggcttgggattcatggactccatcacggttgccgcccagtcttccggtttctgttgactattgaaactggaaagatacagcagatgcacgtgtacaccggtttccttctcggttttggcgatggcatccgcgacttcggccgcatgggagcccaggagattttccgtatccgtgatgttctcggtgatggtcacgccgctgtcggtgctgctgctggagctgtcagagctgtcgcccgagttatccccataggcatttgcggttatccacattgcgttcatcgctactgcagcaagggcgcaaatggcacaaacaagccattttcggaccatattcccgaaggccgaacaggacggctccgaagataggaccacaatagttgtttttccgtcttcccgattcgttgttgacatatcctccaccttagcggccggtattggcaagcggccgccatacataccattaaccctctagaaaaggagcaacgatgccccaatatcaggtagattccgagcgaatccaatcatcctcggccgcagtggccacttcgatctcgcagatcaggcaggccgtgggcggcatgtacaccaatctcaatgccttgcaggacgcatggcgaggttcggcggccacccagttcaccgcggtagccgaacagtggcgtgcggcccaacagcagatggaggcctcactcgagtccatccaacgctcgctgacgcaagcctccaccgtgtacgctgacgccgaaatccaagcttcgcgcctgtttgccagctagtttcttggctctcctccctgaggggagctcgatcgcgaagcgaaactgagggagtatccctacaccgcagctccccttagtctcactgcgttcgacagctcccccaaagaggggagccagaatacaaaaaaggggactcccgaaggagtcccctttcagctcaatcagctagcgatcgcttgcggatcagtagcccatgtcggcaccggcggccggggcagcaggcttcggctccggcttgttggcaacgacggcctcggtggtcaggaacagaccagcgatggaggcggcgttctgcagagcggagcgggtcaccttgaccgggtcggtcacaccggcggccagcaggtcttcgtaggtgtcggtggcggcgttgaagccttcgccatcaggcagggaacggacggtgttgatgaccacgtcaccggacacgccggcgttctcggcgatctgcttgatcggggcctcgatggcgcggaacacgatggcggcaccggtagcctcttcgccggtcagggaggcgacggcctcggccttctcggccttggcagcagcctgaacgagggccacgccaccgccgggcagcaggccttcctcaatggcggccttggcgttacgcacggcatcttcgatgcggtgcttgcgctccttggcctcaacctcggtggcagcgccgaccttgatgacagccacgccgccggccagcttggccagacgctcctgcagcttctcacggtcgtaatcggagtcggtgttctcgatctcagcgcggatctgggccacgcgagcgtcgatgtcttccttggagccagcgccctgaacgatggtggtctcgtccttggagacgatgaccttcttggcgtggccgagcacggaggtgtcgacggactcgagcttcaggcccagttcgtcggagacaacctgagcaccggtcaggatggccatatcctgcagcatggccttgcgacggtcgccaaagcccggggccttgacggcgcaggacttgaaggtgccacggatgttgttcaggatcagggtcggcagtgcttcgccgtcgacgtcctcagcgatgatcagcagcggcttgccggtcttcatgaccagctcggccacgtgcacgatgtcctgctgggaggagaccttgccggaggtcagcagaatgtacggatcttcgagcactgcggtctggtcgtcagcgttggtgacgaagtacggggcgatgtagcccttgtcgaaacgcatgccctcggtgaagtcgaggtccaggccgaagcggttgttgtcttcaacggtcacaacgccgtcctggccgaccttgtccagagcctcagcgatcttctcgccgacctcagggtcggcggcggagatggtggcggtagcagcgatctggtccttggtctcgacgtccttggcggcggcgacgagttccttgacgatgacctcggtggccttctcgatgccgcgacgcagggcgatcgggttggagccggcgaccacgttcttcagaccctcgtgaaccagggactgagcaagcacggtcgcagtggtggtgccgtcaccggcgacgtcgtcggtcttcttggcgacttccttgaccagctcggcgccgatgcgctcgtacgggtcttcaaggtcgatttccttggcgatggacacaccatcgttggtgatggtcggagcgccgtaggtcttgtcgagcacgacgttgcggcccttcgggcccaaggtgaccttgacggtgttggcgagcttgtcaaggccctccagcatgccctgacgggcttcctcatcataagagatgatctttgccatggttgcgtattcctccaaatggctaggtataccggttatcactcgcaagcgtcgagtcgtgacgaccagccgtcagctgccgattatcactctcgacctccgagtgctaacccagacattagcactcgcgaccgccgagtgccaacatcatcggcggcgattgcgctttgggcatgaaaaagccccaaccgtcgaaacggtcagggccttcaatgcacatccttgcgtgcgtgttgctcactcggagcgggcttcacccgaagacagcttgacaacatcctttgcctgcgtgcctttgccggacgaagcgggcgtatactccacgcgatcgccctcgtacagcatcttgaacttattggtgctgccgtcgtccttgatttccgcgtagtgcacgaaaacgtcctcgccgccgtcgtccggctggataaacccgaaccccttcttggcaaggaagaacttcacggtaccttgtgccatatctggtctttcctttgttcccttaggcgtcgcgacacaaaacctatagggaacgtaaaaagaacctcatcgcgctccccctacctcgcgactagatgacgattgtacagcgacgagggaacaatcccaaccgcagcggcacattttcggtacgaactattccatagacgcgagaacgcccacggttttcgatgtattccacgccgatatcaggggcgcatcaacaacgctagttgagcagcaccaccgtaatgggaacggcgagtccttgcacctgctccacagccgaaatgccaagcgtggtcgccacatcttcggcggtggctttatcggcttcattctgataccataccacggaagaagccggcaatgtgccgcgcggattggtcgcctcgacgctggtgtaaccggcggtctgcagcacatcggcctgctgacctgcatatccttggattcctgtggcgttgaccacacgcacctgcgtggccttattcacagtcgcggtggctccggactgctgagactgctgatcggagtcttgattctcattcgaggatgtcgtatcactgttggtatcggattttgccgaatccgaagtcgagtccttggacggatcggtcgaagtggacgaggaatcatccttggtgctgtttttggtctcagccttgctggacgaatcggacttggaagcagtcccggacgtggtcgcagtctgggacgatcctcctattgcattcctgtattccccggaaatccatgcccagaccccgacaccgcacagtgcggccaccagaataacgacgatgaacgggcagaggcgggccactgccgaacgagcgccacggtgaactcccaccggtcccttcggaggattgtcgaaggaatccggttcataggattcgtaggtcatcatgtcgcgtgccataattgccctttcttcctgtcaaaactacccatgagtgtaatcggcaaacaactcatcagtccaccacaccacgcctcgtgcaccggatatgcacgtttgactacagtggtgagtcatgatcaaaccattgagcgaactggtagagccggggtgggcccatgccttggccgacgtggagcccgccatccaccatatgggcgattttcttcgtgcggaaaacgccgccgggcgcccgtggctgccggcaagccacaatattctgcgcgcgttcaccatcccgttcgattccatcaaggtgctgattgtcggccaggacccctacccgaccccgggtcacccggtgggtttgagcttctgcgtggcgccgaatgttcacccgctgccgaaaagcctggtcaatatttataaggaattggttgacgaccttggggtgcccatgcccaccaacggcgatctgacaccgtggacggaacgtgaggtgatgttgctcaacagatgtctgaccgtcggcgtcgggcggccgaattcgcatcagggcaaaggctgggaggaagtcaccgaggccgcgattcgtgcgttgaacgcgcgcacggacgccgacggcaagcccaagccgctggtggcgattctctgggggcgtaatgcgcaaagcctcgagccattgctgaccaatgccttcattatcaaatcgcctcatccgagtccgctgtccgcttcccgcggattcttcggctccaaaccattctccagagccaatcaagccctagtcaccatgagtgccgaaccggtggattggactctttagacagaccaacagtcattgtgagtagttacagtgagggcatgactttgttccccacgcaaccgaacataccttcgccgaccaccgccgcacgaccggtcaccgttcccgcgcccggcgtgtcggctccgctgggtgccgatgacgccaaacgcgcacgtatcctggccgacgccattcgggcgaggttcgcccagacactggtgggtcaggataatctacgcgaatcgcttatcgtgaccttggtggccggcgggcatattcttatcgaatccgtgccgggcttggccaagaccacggccgcccagacgctcgccacctgcgtatccggctcgttcaaacgcgtgcagtgcactcctgatctcatgccatccgatctggtgggcacgcaggtctttgattttgcgtcgcagaagttcaccacgcagatcggcccgattcacgccaatttcgtactgctggacgagatcaaccgttcgaatgccaaaacccagtccgccatgcttgaggccatggccgagggtgccacgaccatcggcgggcagcgtatcgccttgcccaagccgttcatggtgatcgccaccgagaatccgattgaggaggagggcacgttcaacctgcccgaagcccagatggatcgtttcatgatgaaggccgtcatgacctatccttcgcccgacgaagaggctcgcatgctggccatgctcacccaccgtggctccgatatgatcggtcccgacaccatcaccggcgaacgcatttccgtgtctgacgttgattttctgcgcaaggcggcacgccgcgtgcatgtttccgacgcgatcatgcgttatgcggtcgatatcaccgccacgtcacgaggtgccggctcccgccccatcaagggactgtcgtccttggtgcgtttgggtgcctcgccgcgcgccaccatcgccttgacccgtatcggccaggcgaaggcgttgctgtccgggcgcgactatgtggtgcccgaggacctcaaggcgttcgctcatgaggtgctgcgccaccgtattatgctgacgttcgaggcactggccgatggcgtggtcagcgatcagatcgtcgacaagatcgtcgaaacggttcctgttccgtgagttccgattccgttcgcaagaaaatcgaggcccttggcactcagctgagcctgcctaccgtaaggaaggctttgggcgtgctggagggcgaacacgcatccgggcgtcgtggcggcagcggcgatgcgatggatgtgcatgcctatgagccaggcgacgaatcccgtcttatcgattggaagaccagcgcccgccaaggccgtcccatggtggtcgagcgcgagcgcctgtcgacgtcacgggtctggttgctgatggacgttggcctggagatgactggcgtatgcccttccggagaacgcgcatggcaggttgccgccaatgcgctgcgtatgttcgccgcactgtcgttgcgccggtcggacgatatttcgctggtgttcggcgatgagtccagcatcacccgcgtgccgttcaacggtgggttcgcgcagttcgaacgcacgctggacaaggcgcttgatcgtgattgggatcatcaccgtaatatcgacgcgctgctggaatatgcgcgccgtatcaaggatcgtgaggcattgatcgtattggccaccgatgagcatgcgatggaggagcggcatatcaccacgatccgtcgtattacccgcacccatccgatggtgctgatcgatgtggcgacgatgaatccgttcaaggccgtctcatcccgccacgctcccgccgacggcttgagtgcacggcgtgtgccggcattcctgcgcaacgccaaggcagcggccgaggtcgatactcatcgcgcgtatatggccgcggctttggaacaggagctcacccgtgccggttcccatatcattcgagccgcatccagcgaatccatgttcgatcgtttcgtcgccctggtgtcccgggcattggcccgcaccacacgcaatagactgggcactgcacccgaactggtcggactgactttggcgggtgatctatgatgcacagcatgttccccatcatcccgctcgccactgatcccggcgatctcaggcccgtggagtcgttggccttgaccactcccctggtgatggccatcgtcgcatgcctgttgctggcggtaggtctgatcgcgttgatcatcatgctggctcgccccgcacgcaaacctcggaacagcgaccgtgcgcgtggcactcatagcaatgccagctccaaggccgagtggcgtgcccgcatcgacgatgtggtggcccgtcatgaatccggagcactgccccggcatgaggctttcgtcgaattggccgtcatcgcccgtgatttcgccggtgccgcatcaggcaaggagcttagttccagtacgctgaccgatttggcgtacctgaatcgcacgcccgcgaatcgccaaggattggacgcattgaagcagaccattagcgcgttgtatccaccggaatttgccgatgatgcccgcaaccgaatcgcccagacgaccagcgtgcagcaggccgccgagtgggtggcgaatctggtggaaaggtggcgttcatgatgctggcatggcattggccttgggccgctctggccggcgtcttggcagcgatggcgattatcgtgctgattgtcgtgttcgcccgccgtaacgccgccgacgacacccctgtgttctcgatggacgacgatctcaataccgagcacgcttcccgtctgttccgtcaatggcgcgctttgggccgtctcgccatcagcgtgctggtgcttgcgctggcgctggccattgtgctggtggctcgccccagccaagtggatgccggtgacgaacgcgcttccagccgagatatcgtcctgtgtctggatgtgtcgggatccacgctcccctatgatcgcgaggtcatcgatacctatttggaactggtcaagcatttcgagggggaacgtatcggtttgagtatcttcaactcgacctcacgcacggtgttcccgctgaccgacgactacgaactggtcaccaaacagttgacctccgccagcaaggcgctgaaaggcgtcgagtcgcaggatgacatcgataagatgtccgatgccgaatatcaggacatcgccaattggctcgaaggcacgcagaaccgcaaggacgccacctccttgattggcgacggcgtggtgtcttgcgcggcgatgctccccggtttcgcttatggcgaagccaatcatgcgaatgccgaccgtcagcgtgcggcatccatcgtgctggccaccgacaacgtcgtgtcaggcaaacccacctattcgctgaccgaagcgttggacttgacccagcagaccaaaatcaccgtggacggcctgtattccgggccgaaagccagtgaatcggaccaaaccacaacggatatgaagtccgcgatcgagtcgcatggaggcatcttcctcacccaatcgaatggcgcgtcgatagatgagctggtacgggatattcagtcgcgtagagatacggatgtggagaacaaggcgaaatcctcaatggtggacgctcccggtctgtggacgcttgctctggccgtgatactcattatctggatcgtatgtgcatggaggttgaggcgatgaacggattcaccttctcccccgccttgggctgggtcgccgacggactgctggcggccgggctcgccgtactggccattctcgaaatcgtattgtttgttcgccgccgtgcttccagtgacgagaccgtgtgggcttgcatacgacgtacgcttatgctgctcatcgtagcggtgatggtactgactcccagcgtggtatcgtctaccacctcacaggtcatcaatgccaccgacgtcatcgtggcggtggataccaccgggtcgatggcggtggctgatgccacatacgggtccgagaagaccattacccgcatcgatgccgcgcgtcaggccgtgcatgatgtgaccgctgcttacccggacgccagtttcgcggcgttacggttcggtgcttcgggaacacttgatgtgccgctgaccccggatgcgccggccatcgataattgggccaacacgttggcggtggaagccacatccgtgtcagcgggatccagtctggatgctccgatcgatcaattgctgctgaccgcgaagtcgattcgtgaagcgcacccggatgatgcgattgtgctgtacctcatcactgacggcgaacagacctcgaatgtgacgcgtcgtacgttctcgtcactgcgacagtatctcaatgatgggtttaccgtgggcgtcggctcgaccgagggcggcaagattcccgtcatcgccgatggcgtcagtgccggcgattccaacaccacggaccactgggtggtcgacccggataccggcgaacccggcatctccaagatggatgagaagaaccttaaagacattgccgacgagatcagtggcacgtatgtggccgtggacgcttcacagactttggcggattcggtttcggccaggtcgtcgaagcagtggcgcatgaccaccacggtcaaggagcgcacacgcaccacgccggtggtatggccgttggccattgcgttggcgatattgcttgccatggaagtcggtgcatggatcgcgacctcaaggaggctgctgtgaggaacagtaacgaaatccacgagaacgatggctcggcgaatattcggatgcgggcgaaatgcccgctttgggcacgtatcgtcctggcttgtggcaccgtattgctgctgctggttgccggcgtggcggcagtaaacctgtccgcttcgattacgttcaatcaggccaccgcatcattgaatgccaatatcaaagcggctcaggatgagtcgactgatatcaccacgctcaaggcgcaacagcagcagaccgatgcgcaattcgccgaggccgggcgaatgcgtacgcttctgttgccgcaagtcaaggacgccatcgacaccaatgcttcgatttcttccgagctgacgaagatcaccctgaaacaggccgaggcgcagaacagcggttccgattccgggcaagcccagtcggcgcagcaatccgagagttcctcagccaatgccaaaaagggcggcgcgttgaccgacgagcagaagaagcaggtcgaggagctgatgaaggccaatcagcaatccaccgatacccagtcgaacaccacccaatccgagcagaaggcgacgcagaacaagggtaccggggccaccaagccgtggtaagcagtcgttcacggttgctctttttctcacatcctcacgggtcatggccttatcgcggctgtttcccggtttcggctgtcggctttggcgtttgtctgatcccgatagcccatggctgatccaaggtgtgcccaaacaggctatttgtggataatcgttacggctatacacaacacttgtgaataacttcgcccaaaatcggcaagctagaaccacattggtcgttccggctggacaagcatgagtcctgtccttttagctggatatatgaatacctacaccagcaccccagcacccatcgatcccgccggcggctttgccggcaatacggtgacgccgttcgattacggcacttgcccttgccatgcggcggtacagcgtagtcgcgacctcgtgtccgtccaacgtgcggccacactggcgcaatcggaccagatggcggtggccgtgaaccgctcccgcaacatcgtgtggaccggtaaagccgccgacctattccgatcgcggctcagtcgcaccgcacagtattcggccagtctcgcgcaagacatggagaccacccaccgattggcttgggggtcatcatgagcgagcacgattactggcaggtggaatcgtccgtttacggcggagtgggatatgcgccagccactcttgaagaatatgccgccatagccaaggctctcgatgacgaggcggcaggatttgcggccatagccacggcttgggaatcggccgcattacagttgcagtcacatcggcatagtgcgccgatgtgcgtcaccttgcagtcgggcgatccgagcgccgttgttcccggccatgtcactgcaccatatgccgcgctgggcaatcggtgttatgaccatgcaacggcatgtcagcggttgagcgatgacctgcgtggcgcggccgatctgctgattcgcgcacactctctgtattctcaggcggagatgacggctcggcgcatgtttaccgaattattgcaggccggtacacaggccaaaccgggatatgccgcggtgggtgttgccgctgtggcggcgggcggctttctggccggctgggctattgacggcaaaccgaacccagcatggatgtccacgttcacctatccgttccaggaaggagtgctcagcggcgcgggcggaatcattggcggcgtacctatcggcaagagcattgcgcacaccgatgaggtcaacaaggctgcggggaaaatcgccaatttctccggcccggcgaaagacgtcgtccaaggcaatcatctgaacgtgcgcgaggtgcaggcgaatgccgacgtcgtccgtgcaagcggatcggtggccgagtcaatggagaatctgcgcaggctcgccgaagaacggctcggcaaaatcgagctgaacagcggactcgaatatgggaccatcgccattcaacgctatgaacgggctgatggaaccaactcctggctggtcaccatcccgggtaccgatggacaacctgactcaccattcggctgggcgcagaacgtggaactgatgagcgccgatcaggagcgccgcaggaaagcggacagcgctcgcacggttgccgaggcgatgcgtcaggctggtatcggcaaggacgagcccgtggcactgatcggccactcccaaggtggcatcgtcgccgccacgcttgcctcggattgggcagaggaatataccatcgagcatgtggtgacagccggatcgccggtggccaatcatccgattccgcaacgcacgtgggtcaccagcgtggaaatcgatgatgaactggtcgccgcgctggatggtgccgccaacccggtcaccgataattggctcaccgtgcaagggcatgtatcgcccgcgcccgcggcaacaccatccacagtgcattcggacgtctcatgcactcccggcgcaacacccatcaacggtctgaccccatatgacgccgcatccgtggctggttcgaccaacggcagggagttgtcgcattggctcaaataccatcaggccgcttatcagaacgccaccgacctcggctcccccgccgtgcagcgccacgaagcgcattttcaggaagtcatcaacggagaactcaaggaaacccgctattaccaaggccgcatgacccagtccacaaccattgctcccggcgagcgcaccaccgagttcagcacgttcggcggttaaaagtaaataccacacttgacagagttgtcaagaaaggagttaacaatataatgacgagtaggagatggctcatcaaactgatgaagcaagcggcgaaacgcaagaatattacgtttgagagtatcaggcaaagagggagtcatgagatattccaactcgatggactcgtgattcccatcccacgccataacgaaatcgacaacgacctcgcgaacatcatttgtaaggaagcagaagccaaactcgggaaaggctggtatcaacagtgaaaacatatcaggtcatcgttcgtcctggcgaaaaatactggattcttgagattcccggtatcggtttcacgcaggcaagaacaacagcagagattgaaagtatggcacgcgaccttatcaccgtcatgacgcaagatgctgatttcgcactcaccatagagacaaaactgccgcaatccgtacaagagcaccttgatgaagctcggcgactgcgcaaggaagaagcggaatgcagatcgaacgcagcgcgggaaactcgcgccgcggcacaagaactacatggcatgggtctcgccctacagcaaataggcgatatactcggggtctcacggcaacgggcacatcaacttgtcaatgctgtcaatgcttagcatcaatcggctaccccccacaatgcaatcaccgcagagacgcggctagcgccactttcccgggattgttgcgctagcatgcccgaaaccccctctatcagcgcaacattcccgggaaagtggcgcgcaaagagtgtcaggcgcgtcgctcgatgagtgcgcggccggatgcgaggcggtcgagcacaccggttttggcgatggccagcatcagataccaggccatcacgccgctgataagcacgccgccggtgacctcggaaatcatgtgcacgatgccacgcgggctgacgaatgacacacccacgtagcgaaacagcatcagatatgtgccgtattccaaggcgaccaacgcaccggatgcaatggaaatcggcagattgaacatgcggtaacgggtcaaagcgaacggaatctcagcgaaaacaccctgcagcagcgccgagataatcacgaagcccaaatcgaactggctaccaatcaccgtttcgaccagcgtgccgataaggttcacgtacagcgccgctccgggtttgcgcagaatcagcaccgccagcgtaccggagaaataccagacggcgtgcacgatgctggcgaaaccgggcagaaccgcaccaaacaccgaagagatcggcatgtacgcgaagttgaatccccagaagatcacgccgcaggccgcgcccagtgtggcaccgaccgcgatgtccaacggctgccatttcagcgacgatacggcgaccgaacgtttcggaagagtatgaatggtggttgcaggcatggtgatctcctagccttaaaggccgcacacagtaatcgaatcacgggcgttccttgacctgtgcggctcgggcgggaacgccacaccacagtatagccgctcggttcacggctggaagtacccttggaggttatgaagcttaccgatatttcccccgcaatcgcattgaccccgctcgacggccgttaccacaaggccaccgccccgctcgtcgaatacatgagcgaacctgccctgaaccgcgaacgcatgcgtgtcgaagtcgaatggatgattcttctggccaacggctttgagggcaacggcaaccagccaatcgttgacggcgtcaagccgttcactgccgaagagcaggccttcctgcgcgccattcccgaggacttcggcgccgaaggcatcaagcagcacgccgctcatgaggccatcacccaccacgatgtgaaggccgtggagtactacatcgatgatcagatcgacaaggctccggccgagctggccaacatcaacgacgagctgaagaccctcgtgcacttcgcctgcacgtccgaagacattaacaacctctccatcgcccgttgcgtcaagaacgcgatggaaaacgtgtggaccccggagttcaagcgcatcatcgaccacctcgccggcaaggccgaggaattcaaggatatgccgctgctctccctcacccacggccagccggccacgccgaccacgctcggcaaggagctcgccgtctacgtctaccgtctgaaccgtcagctcaagcacatcgaaaaccaggagtacttgggcaagatcaacggcgcgaccggcacgttcggcgcccacctggccgcatgcccggatgtcgactgggtcgccgtctcccgcgaattcgtcaccaaccgcatgggcctgatctggaacccgctgaccacgcagatcgaaagccacgactggcaggccgagctgtactccaccgtctcccacgccaaccgcatcatgcacaacctgtgtgtggacgtgtggatgtacatctcccgtggagtgttcgcccaggtgccggtcaagggtgccactggttcctccaccatgccgcacaaggtcaacccgattcgtttcgagaacgccgaagccaacttcgaaatcagctgctcgctgctcgacaccctctccgccacgctggtggaatcccgttggcagcgcgatctgaccgattcgaccacccagcgcaacatcggttccgcgctcggctactccttgctcgccctgaccaacctcatgggcggccttgagtccatccacccgaacacccacgtcatcgagcgtgagcttgatgagaactgggaggtgcttggcgagccgatccaaaccgccatgcgcgcctgcgagctcaagggcctgccgggcatggacaagccgtacgagaaggtcaaggagcttatgcgcggccacaccatcaacaaggaacaggtcgagcagttcatcgaccagcagtccttcgacccggaaaccgccgctcgcttgaaggctctgacccccgccacctacaccggtgtggccagccagctcgtcgctttcgaccgctgaaataggtgcgatgcgagtccctcgagcccatcgcatccaccacactactgcgctgagtcacaaaccaaaccgcaaactgaaccgaacaaggacaggcgtcaggtaaccatttcatgactactgaacaggagcagtccactacggaagatcgcccggacaaggcgacctcctccactaccgaccggccgatcgcctctggtgacggccggtcggccaattttgctgtcagcggaccggacagcccggcaaccgacgacagcaacgattccggaccgtacatcgacgacatcgctccgcgccgcacgcgcgacttcggcgatctgacccgggccggtctgtcgctgttgatggccgccgtggtcatggtgttcgccgtgtatctgggcggcatgacgcgcggcgtcgaatccgacgcacacaccgcagcccaggtcatcaactggttggctgacttcccctccaccgtgctgacgcagctggccaccatcgtcatcgtgatcatcgtgctcgctcaattgctactggcccgggaatggctgcaggccgcggtgtccgcgctggccatgttcgccggctacggcatggtgtgggtcgtatcgacggcaatcagcagtctgaacgatttcaccctgccaatggcactagtctcagccgccacctcatacggctccgggctgttgcccgacatctacgccggcatggcgtccttcctgaccgccgccgggccacgccgcacccgctccacggtcaaatggagctggaatatcctgtatgccatcgctgcggtgatggtggtgctgtcgtggcattcggtcaccggcatgctggtgtcgatggccgccggccgcacagtgggcatgctgatccgattcgtggtcggcacgcagaacaagggcgtgtggggccaagatctggtcgccgccctgaaaggcatcggactggacaccgcctcgctgattcggcatcaggagcccggcgtcggccacggttcactggccgtcacgctggacgacgatctggccgaaggctcgcgcatctacgatctggataccacggacaaccgtcgtttcatcgtttccgtcatcgacgcgcagacccataccgtcggctatctgaagcagttgtgggactgggtgcgtttcaccagtgtgtccatccgacgtgaccgttccgtgcgtgacgccgtccagcatcatttcgccatgctgctgggtctgcacaatatcaaactgcccgcgcccgcaccctacggcatcgccgataccgacgaatccgcgattctggtgctggatgcacacaccatcgaactgcccgccaacctgaacacgcttaccaaggcggatgccgtggcctacatgcgctacctgtccgtggcgagccggcgcggctatacgcaccggcgcatcacgccggacacgctcgcccggcttgaagacggcaccgccgtgattgccggctggctcaacggcgacaacgcttccggtccggccaacaccgcgctcgacaaagttcagctgctagtgctgttcgccgcgctgatcggcgtggaaccggcggtggaggccgcccgcgaggcgtggggagacacgactctgacggccttggccccgttcattcagaaggtcgcggtcccctcccccacgcgcgcgctggaatcctgggacaagcagctgctcaagggcctgaggagtcgtatcaccgcgctggctgacgaggagacggtggaatccgccgaaccggtgacgctggcccgattctcctggcgttcgatgatcaccatgctgctggtcatcgtggccgtggtcgtggtcttcacccaactgaagcccgaggagatcatcaccgcgctgaccaacgccaacccgttgatggcggtggtgacgctcgcgttcggtgtctgcggctggatcggctcgtcgatttcgctcggttccctgatggcgcggcacaagcgtgacaatatgggcgtcttcatgagccaggtggcaggcggcttcgccaccgtatccatgccagccggcgtgggcccctcgttcgtcaacctgcagttcctgcgcaaatccggctatcgcaacacccaggcgaccgcaattatgagcgccgtgctcgtggtgtattacgccgtgtacttctccatgctggtcatcatcggcctgttcaccggccgcaacatgttctccggcgcaatcccgacaaacacgttggttatcgtgctgggcgttgtggtcgtggtgctgtccattgcgatgatgattccaccgttgcgccactgggtgacccgtcgtcttatgccgctggccaagacgtatatcaaccagctgctggacgtgctttcccagccccgacagctcacagtcagctgcctgggcgcgctgttccagaacgcgaccactgggctcgctttctgggcggccctgcaagcgttcggccattcatcgaatccgatcgaaacgacgttcgtcttcctgctggcctatgcattgggttccgcagtgcccactccaggcggtctgggcggtgtggaagcggcgctgacattcgcgttcgtggcggtcggagtgccgcagggcgtggcgctttccgccactttgctgcaccgcgtggtgttctactggctgcgcattccgctgggcgcggcggccatgaagtggcttgacaagcataatcttgtctgattcgtctattttcatacccccttcggggaaatagatgtgaaaacccttataaaacgcgggttttcgcagaaacatgcgctagtatcattgatgacaacatggactaagcaaaagtgcttgtcccctgacccaagaaggatgctttatggcatacaacaagtctgacctcgtttcgaagatcgcccagaagtccaacctgaccaaggctcaggccgaggctgctgttaacgccttccaggatgtgttcgtcgaggccatgaagtccggcgaaggcctgaagctcaccggcctgttctccgctgagcgcgtcaagcgcgccgctcgcaccggccgcaacccgcgcactggcgagcagattgacattccggcttcctacggcgttcgtatctccgctggctccctgctgaagaaggccgtcaccgagtgaccttctgctcgtagcgattacttcgagcattactgacgacaaagaccccgaccgagatggtcggggtctttttgttggggtgctgtgacgtgttgtccaaccgtattattccggactagttcagcgcttccataagctgctcgaatcccagggtgggctcggcctcgaagggatcgaggagtatggcttcccggcgttcgggggcggtcagggtcaggtgggtccagtcggcggagaactgggctccgacgttcagggccgcgtccacgaaccggccacgcagggcggcacgggtgtcggtcggcggattgtgcacggcgtattccacgttgtctcctgtcagcagctcacgcatctggttgcgggctacgagcgaaccgtacaggcgaccgttggcgatgtcgtggtagtcgagctcaagctgttccatctgggcgaaggtgacgtccgggcgacggcgtttgagcgcgtcgaacagacgcttcttggcggcccagtccacgcggtcggcgagcgcatcgtatgcaccacgctccagcgcgtccagaacgcggctccactcccccataatcgtgtcgatcgtggtggccggcagcgaacttgccagcgcatcgccatgggtttcgatgaaggccttgaccgccgcataataccggcgctgcagacccagtgcggacacggattcgcctgattcgagcgtcagttcggcgcgcggatcgtcaaggaatcgactgaccgtgcgattggcggcagccggatcagcaaaggcatactgctcgaatccggacggaacgccatggcggaaggcgtcttcgatcgcgcacagcacaaggtgcgtgacggcaagcttcatccatgtggaccattgcgaacggttcgagtcgccgatgatcacatgcagccggcggaaggagtcggggtcggcgtgcggttcgtcgcgcgtgttgaccatcgggcgggagcgggtggtggacgaggagacggcctcgtccaggaagtccgcgcgctgggtgatctggaagccgtccggggtcatgcggccggcaccggtgtacagctggcgggtgatgaggaacggcagcagctggtgttcgatggtctccaacggcacgaagcggcggaccaggtagttttcgtggcagccgaaggcgtggccggcggagtcgacgttgtttttgaacacatggatcgtggcgtgtgcgccgtaggattcgcgcagcttgcgctgggccttcagggctaggttgcgcatcacgtgttcgccggcgaggtcctgggccagggcctcgcgcgggtcgcgcgcttcggcggtggcgtattcggggtgggatccgacgtccagatacagacgtgagccattggccaaatacgtgttggtggagcgggaacgggagacgatgggctggaacatggtcatcgccacctggccggcgtccacggggcgttcggcaccggtgaccgccacgccgtattcggtttcgacgccgaaaatacggcagaacccgtccatctcggcggatggtacgggttccgtggcgtgcagggagcgggtgccgctgtcacgcagttggggcatcactcgccgcctttttgcacgaagctgttgacgtattcctcggcgttggtttccaaggcggattcgatgtcgtcgaggatgtcgtccaacacgtcggcttggtcggtggactcggtttgggcggcggcctgcgtggtggcgagggcgtcgtcttcctgggtcgcggcctgctgtgcttgaggttgttcgaattgttgtggcatgttgtcttctttttgggctgtcaaactcccctcagtcagccttcggccgacggctcccctcacccgaggggagccggaggagtcaaaaaattatcgctggttgatggagtcgagccacggatactgctgcaggtaatgctgcagttcgcggatgatgagtccattggaggccactacatcgttatcgtgacgccagtggatgcgttcgccgtcccaacggctcagcgtgccctgtgcctcccagaccactacggtgccggcggcgatgcccgcgatatcccacacgtgcagcatcggctcgaagtaggcgtcataggtgccgtcggccactttgcacaggtcgagcgagacggggcccacgcgcttgatgtcggccgggcgtccggcgagcgaggaggccacgtcgagcgcacgctgcgattcgctggggatgaaggacatgccgtagctcagcacagaaccatccagcgaggaggtcatcgacggcacgaccttgtcgcgcttctcgccgaccgcggttttgtggatgcgcacggcacccgctcccctggcggccaggtaggtcaggccgagggccggggcgtgcacgatgccgatgatcggcttgggctcgttgtccgggccgaattcgaacagggcggcggtcaccgtccattcgctcatgcgacgtacgtagttgatcacaccgtcgatcttgccgatgtaccagtaacgctggccagggcggctttcggcggggcgggtggtccagaagccgtcgaagtgggcgatgtcggcgattctggcgctcatgaagcgcatgatcttgttgtccacttcaagcttgtagcgggggccacggtccgcgttctcggtgctcggctgggcgaggttacgcggattgagttggtcgtggagggcatgctggccggcttcttcgagcaggccggcgactttgagcgcaaggttgcgcaggtcctgtggggtctcttcgcgtgtttcttccatagctaccaagtctatcgttcggcgttgatggccagcgacttcagcagatcgatggcgtgttcggctgaattgagttcggtttcgcagtgcgccttggtgaaggcgagcggatcggagatgtcgagggagaacaggtgatggtcggtagcggccatatggccggcattgccgtagaattcgaccgcctcgccctcgtctgcggcgcgcgggtcgcgaacagtgagtcgggaccagctggcggcggccacctcatcgccgaattgcgccacgagttttgccctgagccaggcgcgggtgtcttccggcggttcggtggtggcgcgtgcgatgtcggcggcgctcaccacccgttcggtgcggggttcgagtttggtgaagatgctgtccgcggggtcgagcgccgcccatttcaggtcgatgaccttcagtcgcggatcattccatccgttggccacgccgggtgcggacgttgtggtgattttgcggcgcagtttttcgagcagctgccatttgagcagccattcgatgcggctggcctcgccggtcatggccagacgttcgtcatcatcggcggcatggcggatggaggcgcagtcgatgagcgcctgctgccacatcgccataatggatgtggtggatttgtccggccaggcgggttcgccggcggtgtcggtgccttcgaccagtgcggcaacctggtagacggcttggcgcagtttgagctggataagccatgcgttggtttcgccgccgttggccagcggcaagattgcccccagcgtcaggtcgcgggaaacggtgtgtatggcctcgactgggtcagacagttcgagttcgtcgaggaaggcgttcaggtcgaatccggcctcgtccgcatgttcgagcagccacagcagcatgctcgtggtgccgagtttcagtgcctgcggcacctccatgcgattggcgtcgccgacgatgacgtgcagacggcggtatgcatcggtggagtgggattcgtcgcgcgtattgatgatcgggcgttcgaaggtggtttgcaggccgactttggcgtggatgtagtcggcgcgctggctgagctggtagcccgggatctcgctgttctcgccaatccctacgcggccggagccggcgtagatctggcgggtgacgaagtggagggtcatcaggcgtgtgaccaagtcgaatggcaccgcgcgggccatcatatagttctcgtgcgtgccccagcaggagcccttgccatccacattgttgcgatgcagggcaatgggagtgccagtctgtttgcgggcgcgttcggtggcggcctgcatgatgaggtctccggcgtggtcgtatcggaccgcttcgaacgggtcggtggtttccggcgccgagtattcggggtgggcgtggtccacatagacgcggccgccgttgggggcgatcacgttggtgatgttgagctgcggggcgtcggtgagcatgtccgggcgggcggcggcgcgttcgagacgggtgccgcgcgcgtcgttgaccgggtcctcctgccggtagtcccagcggatggatttgctgtggctgtccgcggcgccgttcaccacgtcgaaggacagttgcaccggattgtagcggtccggggtgttcagggataccgcgtattcggtttcggtgcccatcactcgtttaacggtcatgtagtgctccttgagcttgagctattcggcggtgcggatgcggcggatcgggtccatgccgttgatgcgcgaccattgttcggggtccacgtcggccatggaatcgcgggtctcgcggtattcgtcttccacggcggcagcgagcagcggcacggtgagtgccacgtccaagccggtttcgatggattccttgaccgctcgggtcttggcccggtccacgatgttcttgagcatcgcgccggagaccacgtcggccaggaacaacgcatgccactggccgttctcctcctgcacgtcgcatagatggcggcgttcggaggttccgtagatgtcatgcaccagcacggcggacaaggcgtgcgcgtcgacgccatcttccagaggcaggtcgtcggtgaggtaatggtccacgatggcgatggcctgattggttttgggccggccgacgcgaatcttgacgtcgagacgccccggtcgcaacacagccggatcgatcatgtccacgcggttggaggcaccgattaccatcacattgtcgagtgattccacgccgtcgagttcggagaggaactggggcacaatcgtggtctccacatcggaggagacgccggagccgcgggtgcgtagcagcgaatccatctcatcgatgaacacgaccaccggattgccgtccgcggcgcgttcacgggcgcgctggaaaatcaggcgaatcagtcgttcggattcaccgacgtatttgttgagcagttccgggcccttgacggacaggaacacgcccttgacatgggtttcggccggactgattgcgccgtcgccattcgaatcgtaaccaccctcgcatagggcgttcgccacggccttggcaatcatcgtcttgccgttgccgggcggaccgtacagcagcacgccctttggcggcttcaaatcgtagcgctcaaacagcgcacgatgctggaacggcagttggacggcgtccctgatacgaccgatctcactatccaggccgccgatgtcggcgaacgtgacatccggggtctcctccagcaccagatccttgtcgccctcggcgggcagcacttcgatggcgaggcggacggacggatcgacgataatacggtcgccctgattgatgcccgcatacgcgagcgcgccggaacggcggatgagcacgggattgccggaggcgtcggtaacgatcagtcgaccgtcgtcaagtacctgcttgacactgcgaatctggcccacggtgtcagcatcgcgctgctcgaccagcacgagcttctcgttgagcatcacggtggctccggcggtcaggcgggcggcgttgacgttggaggccacaggcaccaccatgcggcgggtgccggaaatgacttcggccgacgcgtgctggatgccgtcttcatcggtgcgggtggaatcgaccttgaccatggtggcgaaggtgagcggcggctgagcgagctgggcgagctgtgacttcgccttggtcagttccttgccggcgcggctcagcgcttcggcgagcgcatggttcttggccatcaggcgatcgttcagcgcggcgagatcttcggtgtcgctcatgcgggttcttcgcttcccttctatccgggattttcggcaacttatggcagtcggcagaccctattcgttgccgtcggcggatttcctgttacgtataacagtacgcacttttcgcaccacgaaccatacgatgaccacaatcacggccgcgatgaccacgtcctcgaacacgccgagcgcgccttgaatcgagcaccactggtcgccgagcaggtaaccggcggaaacgaggatggtgttccacacggccgagccgagcagggtccagccggtgaagtgcaggaagttcatgcggttgaatccggcgggaatcgaaatcagcgagcgtaccacgggaatcacgcggccgatgagcaccgaccatgtgccgtatttggtgaaccagtcgttggctttgctcacgtctttgcggctgacgccggggattttgtctgccgcgagattgatgcgatgcaggcccacccagcgggagatgccgtacaaggtccaggcacccagtacggagccgatggtggcccagatgattgcgcccggcagactcagggtgccgcgtgcggcggtgaagccggcgagcggaagaatgacttcggacgggatgggcgggaagatggattcgagggcgatggccaaggccacgccgataccgccgatggtttccatcagcatgatcagccagtcggtgatggtgccgatcaggccgggttcggtggtggtgcagatgggtgtggggtcggttgcaagaatagtggcggctgccatggaaaaactcatagagggcattgtcccaaggttttcccagaatcagaagcatgacgcaagaagatgtgcattttgttgacaagtccgccgagagcgaagttgggagcccggctgattctgcggtttctgtgccgacgctgagcaagcccggcctgctggttatggatgtggactccacgctcattgacgaagaggttatcgacgagttgggcgtggtggctggctgcggtgaggagattgccggagtgaccgcacgcgccatgcgcggcgaactggagttctgcgatgcgctgcgcgcacgagtggccctgttggagggcctgccgatctccgtgttcgacacggtgcatgacaagctgcatttcaccaagggtgcactggagcttatcgacacgctgcatgaacacggttggaaggtcggcgtggtgtccggcggcttccatgaagtggttgacatgctggcggccgagggccatatcgactattggattgccaaccggcttgaggttgccgatgggtgcttgaccggcaaggtgctcggcgaaatcgtgagcaagaccgtgaagctgcacgccttgcaagcgtgggcggaccgtttgggtattccgatgagccagaccgtggctgtgggcgatggcgccaacgacattccgatgattcaggccgccggtctgggtctcgcgttctgtgccaagccaaagacccagctcgccgccgacaaagccatcaacgaccgcgacctaacccacgtgctcgattatctgcgccggtaaaattttaccgacctcggctccggcacttatagttgcgccatgccgacttcaggcgcagaacagttgacgcttgcggggctggctccccgcaagcggcgtaaacgtgcgcctgcggagcatacgccggccgagcagcatcccatagcgcaagtcgtgttggatgtgcaggcgctccacctcggccagacattcgattacttcattgatgaaaaagacagcgaggccgcacaaccgggtgtgctggtgcgcgtgcggtttggcggtcaaagggtcagcggcgtgatctgggcacgcaccgataccagcgataccccgcgctcttcgattcgctatatcgaacgggtgttgagccccgatgtgctggttcccgcatcgatgcgtgaggatatcggtctgattgccaaagcctatggcggcacacgggccaatattctgcgtttcgctgtgccaccgcgcgtggccaaggtggaggccgaacagcggttagccgcgtcgttccgccgaccggtcggcggctccctaccagataatacgcaaggcggttttgccgggcgtggcaccaatcccgatgggaccatgcctgctggctctacctttgccgttgccagtaccgtttcggagggggctgcgcaggggtatcgtcgtctgaccgccaattacgccgacgtcaatgtgcttcatgatgcgcttaccggtcagcgtttccaatcttttgtgtttgattcgctgcccggtgcacaggagtggcaacggaacatggcatggatggtggccactgcgctgagtgccggtaaagctgccgtggttgaattgcccaccatgcgcgaggtcgaagacctgatgcctatgctgcgcaattatgggctcaaaccgttcgcccctgctccggccggcggctgggtgggcgacgtcgccgtgcttaacgcggagaccatgcccgcggccgaccggtatcgcacctatctggctgtggcgttgggacaggtgaaggtggtgatcggcacccgtgcggtgatgtatgcgccggttgaaggcccggcgctgttcgccattctggaggatgccgcctatcagaacatggacggtatgatgccatatccacaggcccgtggcgtgatgcggctgcgcgccaagtcccatggcggcgtgttcgtggccatggccaatgcgcgcaccccgcaaagccagtgggaaaacaccggcccggatacggtggagaccccggtgagcggctattccaccacaattcatccgctcgcctcgccgctgaaggacgccactccttgggtgcgttggctcaatcgcgatgaacttgcgcgtcttgccgacccgtccatcggggcgcgcgtgccgcatacggccgtccgcgtgctatctaaggctttggagagcggccccgtgctgctgtccattccgcaagacagcgtcagtgagactctgagttgtgcgaaatgccatcgtcaggcgcgttgtgccaagtgttccggaccattgcaactaccggccgaccgccgggactccacaccgcgatgccgctggtgcggggctgccgccatcaactggaagtgtccgggctgtgggcatgaacgtatgcgcgtggtgcgcgtgggtgctgcaggcactgcggcggagctggccggattgttccgtggcgtgccagtagttttgtccagcaagacgcagggcctggtgcgcgatgtggcttgtcagccgatgatcgtcatcgccactcccggtttcgaaccgcgcgtgcgtccggtcagtgccgagcagggatcggctggccatgagtatcgtgccgtggccgtgctcgacgcttggaccagcttgtatgcgttgggcgtggatgctcgcttggatacattgaccgcgtggatgcgtgcggtgtcgttgtgcgcgccgcgttcccgtggcggccaggcgttgattctcggcgaaaccgacccggccatcgcccaatcgctgatgctctgggattcgaggattcttgcagccaaggatcttgaggagcgtgtggagaccggtatgccgccggccgtggccgccgcctgcgtgtggggccgccgtgatgcggtgatgatgctgatgcagcgtatcggcgccctgggcggcgattggacggcctgcggcgagctgcccggcatgttgggcccggtgccgatcgcgcaaccggacacggtcgacgcccgggagctcgaagccacggccgaccgggtgaaggcagtaatccgtgtgccgcagagtcggcgagccgagctggcggcccgactgcaccgggaaaccgctcgtcatgtggcgtcccgcgaacccggcgagcttcgcttccgagtagatcccaaggacctgatctaatcgtcttcaacacgtgaaacgataattacagaatgaacatcgctagaaggaggacactatgaagggttggcctggagagccggatatggattacgacgtgctggtcgcggatggcgaggccgctgcgaacgccggcaagccgatcaccgacgtgatcttcgatttcggcaacgtgctgatttactgggatccggtcgccgtactcatcccccgctacagccagaagaccatcgacgaattcctcgacaacgacatctccggcttctacgatgtcaacgacctgatggacggcggcaccagcaccgacgaggccatcgccatcatgcgccgtgacaagggcgataagtgggcggacatcctcgactactacatcaagaacttccgcgactccctgaccggcatcgtgccgggcgcgcgcgtgctggtcaatgacctgaaggctgccggcatcggcgtgtggggcctgagcaactgggaatccagtctgttccacgtggccgaggaacagtgcgatattttgcagcagcttgatggcaagctcgtctccggttttgtcaagctgcgcaagccacacaaggaaatctacgaggccgcgttgaaccagttcggcatcaaggccgatggcgcgttgttcatcgacgacaaggccatgaacatcgtcggctcgaatgcggccggcatccgtggcgtacgtttccaggatccggtcaagctgcgtgaactgctcatcgccaatggcgtgaacattccggccgtgcagtgagcatcgacatttcaaggaggaccatgctcaaactcgtgttcgccggcacccccgacgtggcggtgccctcgctcaaggcctttgccaccgatccacgttttgatgtggtcggcgtcattacccgccccgatgcgcctaccggtcgcggccgcaagctcacgcccagcccggtcaaggctacggctctggagctcgggttgcccgtcatcgatctcaaaccccgctcccccgaattcatggaggcgttgaacgacctgcatgcggatatcgccgctgtcatcgcctatggcaatatcctgcccaataacgtgcttgatgcggtgcccatgggctggtacaacctgcatttctccaacctgccgaagtggcgtggcgccgctcccgcccagcgtgcgatttgggcgggcgacccgaccaccggcgccgacgtgttcaaggtgggcgagggtttggatgatggcccgatcgtcgcttccctgaccatcgaactgaccggccgtgagacttccggcgaactgcttgaccgtctggccgaggaaggcgcgcccatgtatgtggatgcgctggccgccgtaggtgaaggcaccgccacattcaccgcgcagccggccgagagcctggaatacgcgcacaagatcacggtgaaggacgcccgcatcagttggacggacgaggccgaggccatcgaccgtcagattcgcgcctgcacgccacatcccggggcatggaccgaactgtttgcggaagggccaatcgccgataatgacgagtcaaccgctaaatccctcgccctgcatattctcgccgcacaaccggccgaccagtccaatcccaacactccggccgagcttcagcccggcgagctgaaggtgggcaagaagaacgtgtgggttggtaccggcagcacgccgctggaactcacccaagtcaaggcgcaaggcaagaaggccatgcgcgccgccgactgggcccgaggcgcacgcctctcccccgccgcctgcgtgcgataacaagcaatatcgctcccgccttcggaagcacagtaaaggcccggcatcttcataaagaagatgccgggcctttcagctatgcaatcggcgatcagttgagaccggagagcttgttgatcagctccgggtcacgcgtcgcacccttgtcggccgagcgggcgaaggcggcgtacgccttcagcgcctgggagacgtggcggttgcggtgagccacgtagccgtcgccagcctcaagctcgcgacgacgctcgtccagctgctcgtcagtcagttcgacgttcacggaacgggcttcgatatcgatatcgatgatgtcgccgttcttgatgagcgccaccgggcccttgttggcagcctcaggcgccatgtggccgatggccagaccggaggaaccgccggagtagcgaccgtcggtgagcatggcgacctgtttgccgatgcccttgcccttgacgaaggaggtcgggtacagcatttcctgcatacccgggccgcccttcggaccctcgtaacgaatcacaagcgccatgccaggcttcagggtgtcgttcagaatgacctcgatggcctgctcctgggagtcgaccaccagagccggtccacggaacttccagatctccggcggaacaccggcggtcttgaccacgcagccgtcgggggccaggttgccgcgcagcacggcgaggccgccttcgtgaatctccgggtggctgatgtcgtggatggcgccgttggtgcggtcgcggtcgagcgagtcgaacagggtggtgtgcgtccacggctccggggagatgatgtggccaggagcggccttgtacatctgctgggcttcctcggtgcaggtcgggcgcatgatgtcccaatcggccagcttggcttccagcgtcgggtagtcgatggaatgcacgttggtgtgcagcttgccggcgcggtcgagctcgccgaggatgccggtgatgccgccggcgcgatgcacgtcggaaatctcccacttgccggacggcgaggccttgcagatgcacggcacggtgtgggaaatacgctcgatgtcgtccagggtgaagtccacgtcggcggactgggccatggcgaggatgtgcagcacggtgttggtggaaccgcccatggccacatccatggtcatggcgttctcgaaggcttccttggtggcgatggagcgcggcagcacggaatcgtcggaatcgtcgtagtactggtgagcgatcttgacgacttgcttggcggcacgcttgaacaggtccttgcggtaggagtgggaggcgaggatggtgccgttgccgggcagagccaggccgatggcctcggtcaggcagttcatcgagttggcggtgaacatgccggcgcaggagccgcaggtcgggcagacggtcttctcatagttgagcagttcctcatcggagacgctgtcgtcagcggtggcgtacatcacgtcgataaggtcggtgctcttgactgtgccgtcggcgagcaccgtggtgccggcctccatcgggccaccggagacgaacacggtcggaatgttgaggcgcagggctgccatcagcatgcccggcacgaccttgtcgcagttcgggatgcagatgagggcgtcggcgcagtgcgcgttgcactgatattcgacggtgtcggcgatgatgtcgcgggaaggcagggagtagagcatgccagtgtggcccatggcgatgccgtcatccacggccatcgtgttgaactcgcgcggaatgccgccggcttccttgatagcctcggaaacgatgcggccgaccttgttgaggtggacatggccgggcaggaactcatcgaacgagttggcgatggcgatgatgggcttcttgcccatgtcgtctccgctgacgcccgcagcacggtagagggctcgggcgcctgcaaagacgcgccctgacataatttttgcagatcgcatttcagtcatggttctattcaagcctttgcgagggacacgccatttgtcaagagtcgaataatggaatttgcaaaaacgtaatgtttctcacacatttttttggaatacattcctctggcgagagtccggtatagggctgacagaagtccccccaaacggctacacttgcttcggttgagatagattttccaatgtttggagataagaacaatggcttttggtactgacccgacacccgacggtcttgcgaacccgccgatcgacgatctgatgaagcacgccgattccaagtacgcgctggccattttcgccgctaagcgcgcacgccagatcaactcctacttcacgcagctcaacgagggcctgctgcagaacgtcggcccactggtcgaataccagaacaacgagaagcctctgtccatcgccttccgcgagatcgacgagggtctgcttgaggagaccttgggcgaggacgacgccaacgagggcaactgatcgattcagacgattcgtttggattgtttggacagttcgtcgccgaatgatggtgtgagagttctctcacaactgattttgagcgacacgcttgcctgagttatcgcaatcagctataactcatcatcaggagcgaacaagacgtaaggctcgagccaccgcgctggttggcacgggcctttatttatgcccgcttccgcagtgacaagtaaaaattgacaccgtatcattgtgcctcgcaccccgcggggcgataagtcctgaagaaagggatgatatgacagaagaacatcggcttatctccgccgaatccgtgaccgaaggccaccctgacaaggtctgcgatcaaatctccgacgccattcttgatgatctgctggcccaggatccgtccagccatgtggccgtggagacctccgccgccaccggcgtgttcctggtcttcggcgaagtcacgtccaaggggtactgcgacgtgcagtccaaggtccgcgaaaccctgcgcaacatcggctatacctcctccgaagtcggccttgacgccgattcctgcggcgttgtggtggccatcaccgagcaaagcgccgaaatcaaccagggcgttgcccgtctgactggcgatcaggagaccgccgccagccgcgaagaacgttacgaagcacagggtgccggcgatcagggcgtgatgttcggctacgccaccgacgagactccgacgctgatgccgcttccgatctatttggcacatcgcctcgccttccgtctgaccgaggtccgcaagtccggtgaagtgccgcacctgcgcccggacggcaagacccaggtaaccattgagtatgacgataacgataagcccgttcgtctggacaccgtgctgatctccacccagcatgatcctgaggttacgcaggattggcttgctgttgagctgaagaagcacgtgattgacccggtgcttgatgaggtgctgggttccaaggtgccgcatgacaactaccgccagctggtcaacccgaccggttcgttcatcctgggcggcccggcggccgacgccggtctgaccggccgcaagatcatcgtcgacacctacggtggcgccgcccaccacggcggtggcgcgttctccggcaaggacccgtccaaggtcgaccgttccgccgcgtatgcgactcgttgggttgcgaagaacatcgttgctgccggcttggcacacaaggtcgagattcaggtcgcctatgccattggtgttgccgacccggtgtccattaatgtggagactttcggcaccgagcagggtgtgacgcgaggccagattgccgccgccgtgcgcaaggtcttcgacctgcgccccgctgcgattatcgacgagctggatctgaaacgtccgatttatctgaagaccgccgcgtatggtcacttcggccgcacggacgttgagttcccgtgggagaagaccgacaaggtcgaggagctcaaggccgcgattgctgcggagtgaggtgctctaattaggacagagagatcataagaataccataagaatagggtgctttccgctgttgatggcggaaagcaccctatttgtttttcgcagtgtcctacgaatctgttcttatttcaatggggctggtgccgttttgttggactcgtcattgattccatcaccaccaatcatgccacaagaccgagcccgcgtcgacgatccatgatgctcatgccgaactccgtcttgatcctcctgtcccgataccagaccatgtactcgtccagcatgccgatgaactcgtccatggtgacacctgcgaagctccgtttatggaagaactcctgcttgagacggccgaagaacccctccgcggcggcgttgtccggactgcatcccttcgcgctcatcgaacgcgtcaggttgttgtccgtgcagatgcggatccattcgggccaccggtagtggcagccgcggtcactgttaaaccgatgtcggtttaactccgattaagccgggtttgttgttaagccggggaacggttcggggtcttggtggctggccgtgtcccatgtggtttcccggcttaacgttccgggttatgttcgtcttgtcccatttgattcgaacgaaggagtttgccatgggtgagacgacggttggccatgtcgcgggcgaggtggtccgcgcgctttacggggccggttatatggaatccaccataggccagtaccgcaagtccatcagggcgttggaacggtacgccggaggcccggatgcggtgtacacgcgtgggtcgggcgcggggttcgccgcgtcgaccttcagtgagcggacgggtgtttttgttcaataggaagttgaggtttgggggtggtgacgttttgttggacttcgttgtctgtatggtcgttggtcagtgtaccggatggtttcaggcgacgagcccgagctggatgcgtttgtccatgatgctcatgccgtattcggtcttgatgcgcttgtcgcggtaccagaccatgtactcgtcgagcatcgcggtgaactcgtcgatcgtcacgccccggaagctcctcttgtggaagaactcctgcttgagacggccgaagaacccctccgcggccgcattgtccggcgaacagcccttcgcgctcatcgaccgggtcagcccgtgctcggtgcagatgcggatccattccggccaccggtaatggcaacccctgtccgagtggatgatcggcgtctcgccgggcttgagcgtggcgcacgcgtcgcgaagcatgccgttggccagggcggcgttggggctcgtgccgatcgtccaggcgacgggcatgccgtcatggcagtcgatgaccggcgacaggtacaccttgcccgccgggatcgagaactcggtgatgtccgtgacccacagccggttcggcgcggtggcgtggaagtcgcggttcacgagattcgcgggtgcgccgccgatctcgcccttgtacgaactgtagcgcttcgcgctcttgagcacggggaccatgccgtggctggtcatcaggcgcatgatgcgcttggccgacacgatgatgcccgcgcttttgagctcgaggtggatgcgcttgtacccgtaacgcctcctgctgttcccgaacgcctcgcgcaccagggacaggaggttcgcgttcttgtccggccggcgcatggccttcaactggtagtagtacgtgctgcgcgcgatgccgacctccttcagcaggctctccgcgttcacgcccaacgtctcactgatgtccttgatcagggtcgtcttctctcggcttgtcaggttgtccgggtctgcgcccggctcttttcccaccagttccgccgcacccttcatgatcgccaaccggatctccatggcccgctgttcggcgcgcagacgctcgaggtcggcgcgcaacgtggcgatctcgccgcgcagcgcgtccggattgtcctgctgcgaggaatccccgcgttccggttccctcttcgccaccatgagtcctttcgcgtctccgagcagttgacgcttccagtttcgcacgaccgacgaatccacacccaccgcctccgcggcctcgcgcgaactcaattcgccggacgcgaccttcaggaccgcatcccgtttcaattccccgggaaccgggccacggcgaatccggcgttcgcccggcgcgagctcatcgatccacgaggcaagcacctctttgctcggataccccatctgacgcatcgtgcggctcgcacgccgcccatgcgtcagataatggtccacggacgcacgcttctgctcctccgtgtagcgcgcataccgttcaccacgctgcgaggacacgcccgtcccctgttcgtcgagccagtcccggtgccacatgcgcaacgcctcccggctgggataccccagctcgcggatcacatccgccgcgcagcactcgtatttcacatacaactcgaccgcgcgttgccgctgttccctcgtgtacttcgccatggccgtctcctcctcggatcacagtccaagaaaacggcaccacccccaaaacaggcaaaccgcggcgaatacacgttcgcgcccatccgctacggatcatccccgcgcgtgcggggcaaacgaaggcggtcgtggaatcacatgcgaatgatgcggatcatccccgcgcgtgcggggcaaatgagaccgccgtgctgaccgcagcctgacgtttcggatcatccccgcgcgtgcggggcaaactggtcgccgtagatcaggctgatgatcgtgttcggatcatccccgcgcgtgcggggcaaacgcctcccatggcgtagtggtacaggccgaatttcggatcatccccgcgcgtgcggggcaaacggtatcgaatgtgctcatcgaacgtgccgacacggatcatccccgcgcgtgcggggcaaacggcggctgctgcagcgtcgccgtgggcctggccggatcatccccgcgcgtgcggggcaaacttccgcgcgtgacatgagccgtaacgcctacgcggatcatccccgcgcgtgcggggcaaacgccaccaccgcgatcaacgtgtccggcgcggccggatcatccccgcgcgtgcggggcaaaccgttacgcaaggccggactcgtcacgaatggccggatcatccccgcgcgtgcggggcaaacttcg

SEQ ID NO: 3714 - DNA, 5384 bp, Unknown
  R150_10m  MAG No. k141_8396
atggctcgctacgagactgcttttggccgtttcggtattcgcgtcggccagattctgattaccgctgaagacacgattcgtgccacccagtaccgcaatgtggaacgcacgctggaccgtctgctcgacctcggcgtggtgccgattatcaacgaaaacgattcgctggcgtccaacgagattcgattcggcgataacgaccgtctgtccgcattggttgcgaacctagttcgcgcggaagctttggtattgcttaccgacgtggacgcgctatacacggcaccgccttcccagcccggctcccgccgtgtggaatatgtgcccaacgttatcgatgcatttggcgacatccaggtttccggctccggctccaaggtcggcaccggcggcatggtcaccaagcttgaggccgcgcgcgtggcggccgtctccggcatccccacggtgctcacttgcgcctcgaacgcgggccctgcgatgatgggcgatccggtgggcaccgtgttcgcaccggttaaggcccgcggttcgtcgcgtcgtctgtggattggcttcgccgccgacccgcgcggcactattgtggtcgatgcgggtgccggccaggcgattcgcggcgggcgtgcctcgctgctggcggccggcgcgctcgaagtgcatggcgatttttccgccggcgatccggtctggatcgatgccgaaagcggcgaacacctggcccgaggcctcgccggcttcgattccgaagaaattccgcagatgctcgggcgtaacaccgcccaactcaagcgtttcctcggcccccagtacgcccacccactggttcatcgcgacaatcttgtacttgtgtgactgatgggatctgtcacacaacagatcccatcaccatagtgcggctctggcgatttttcgtgctgtaggtttagcatggaagccatgactatggcgcaatggcagactctttccgaccgtatcaacactgtggcaccgagcgctacgctcgccgtcgattccaaggccaaggccatgaaggccgccggacttgacgttatcggcttcggcgcaggtgaaccgaatttcccgacccccgcaaacgtggtcaaggctgcggcagatgcctgccttgacccaaagaattacaagtacacgcctacgccgggcctgcccgagctgcgcgaagcgattgcggctaaggtgctgcgcgattccggctacgaggtgtccgccgaccaggttgtggtgaccaacggtggcaagcaggccgtgtatgaatccttccagatcttgctcaacgatggcgatgaggtcatcatccccgctccgtactggaccagctatcctgaagccgtcaaattggcgggtggcgtgccggtcgaagtattcgccggtgccgacgtgaacttcgagccctcgcttgaggcgctggaagcggcccgtaccgagcgtacgaaggcaatcatcgtcaactccccgaacaacccgaccggagccgtctggaagccggaaaccgtggaagcgatcggtcgttgggccgtcgagcaccacatctgggttatctccgacgagatctacgagcacctgaactacgacgacgcgcgcaccacctacatcggtgccgccgtgccggaatgccgcgggcagctgctggtgctgaacggcgtggccaagacctatgcgatgcctggctggcgcgtgggctggatggtcgcgccgcttgaggtggccaaggccgccaccaagctgcaggggcatatgacctccaatgtggccaacatctcccagcgtgcggctctggccgccgtggctggcccgctggacgaggtgcatgagatgcgcaaggcgttcgatgcacgtcgccgcgcgatcgtggctgctctgaacgatatcgagggcgtcaactgcccgactccgaccggtgcgttctacgcttttgcggacatcaccgctttgcttggcaagccgctggggcccaacggcactgtgtccgatacgtccgctgattttgccgccgcactgttggatgaggcccacgtggccgccgtccctggtgaggccttcggtgctcccggttacctgcgtttctcctacgcactggccgacgaagacctagccgaaggcatgcgtcgattcaaggaatgggctaactgagctaactgagaagagtcgtgtgccgcgcacatgccacgcgcgcgacacgcgatttgcgataatccaccggagccgttactataacaacttggcggtttcgccgtggcgaagcgttctctacggaatgcacgccgaggtggattttcacctagggaagtggcgcaattggtagcgcaacggtctccaaaaccgtaggttgtgggttcgagtcccgccttccctgccaagttttcaataatcaagcagctgacgcgaggtacagaatggctaagacgaacaacagcgaaaaggtagtcaagccgaatgtcttcatgcgtatcggtctgtttatcaagcagatcatcgacgagcttcgcaaggtcgtaacccctactgccaaggaactgttcttctggtctctggctgtgtttatcttcgtgctgctgctgatggccctcgtcacgggcatggacttcggtctgggcaagctcgtgctgtgggtgttcggctgatccgcacaacctaaggtgaataacaacgcatgagtgatgaactgaatctcgagaatctcgacgccgtgccggctgaggagcctgttgtcgaggcttccgaagctgctgccgatgaggcagctgccccggctgaaccggttgctgacctttccgcagaatctgacgcatccgtcgacaatgcagatgttgagtccgccgctccggccgcgactgaatccgctcccgttgcttccactcagaccgagaccgtttctctggatgaggacgaggaagaagtcaacgaatccgagcaggccgaggaaaccgatgccggtcagcaggccgttgacgaattctccaagtccctgcgttcccttgatggcaagtggtatgtgctgcacacctactctggctatgagaagcgcgtgaagaccaacatcgagtcccgcgtcgcctccttcggcatggaagaccagatcttccaggtcgaggtgccgatggaagaagtcgagaagcacaccgaaaagggcaagaaagtcatcacccgcgtgcgtgttccaggctacgtgctgattcgtatgtggccggatgagaatgcccgccgtatcgttcgcgaaaccgaaggcgtgaccggcttcgttggcccgaccaaggatccggcgccgctctcccgcaaggaagtcgtggcgatgatggctccgatgatcgcctccgaggcactcaaggccgccggcgacaagcccgccgccgccaagaagcgcaaggtcgaagtctcctacgccgttggcgatcaggtcaccgtcaccgatgggcctttcgccaccatggccgccgttgtttccgacgtggagcccaccactcagaagctcaccgtgctcgtgtccatcttcggccgtgatacgccggtggagcttggcttccaccaggttcagaagctggattaaccccaaactttgcagagcccgaccatcgtggtcgggctttttgtgttgtccgggtggatttgcataataggaaagcttgtgtctggagggaagacccgctagcacagcacagcaatataagttgcgggaggagaccgaccacaggccgattgcctacagcatgcacggataaataacgagtcaagaccgagcatgatggcagacagtcgaacctgaggacggcgaccattcgaaccgcgttatagaaagaagaaccataatatggctcccaagaagaaagtctcggcgctgatcaagctccagatccaggctggcaaggccaacccggccccgccgctgggcccggctctgggttcgcatggcgtgaacatcatggatttctgcaaggcatacaatgcccagacgcaggacaagatgggtcaggtcatccctgtcgagatcaccgtttacgaagatcgttccttcaccttcattctcaagaccccgccggctgcagctctgctgaagaaggctgctggcattgagaagggtaccgagaacccgctgacccacaaggtcggctctgtcaccaaggcgcaggttcgcgaaatcgccgagaccaagatggaagatctgtctgctcgcgatatcgaggccggcatgaagatcatcgagggcaccgctcgctcgatgggcatcacggttacggactgataaggagaaggacagatggtaaagcgttccaagaagtaccgcgaagccgctgagcgcgtcgatcgcaacaacctctacaccgccaacgaggccatcgctctgctcaagagcatgcctgcctacaacttcgaccagaccgtcgaggccgtgttccgtctgagcgtcgacccgcgtaaggccgaccagctcgtgcgcggtaccgtcaacctgcctcacggcactggtaagaccgccaaggtcctcgtgttcgcccgtggcccgaaggccaccgaggccaccgaggctggcgccgacatcgtcggtgatgacgacctgatcgcaaaggttcagggcggcttcctcgacttcgacgccgtggttgctactccggacatgatgggcaaggtcggccgtctgggccgtgtgctcggtccgcgtggcctgatgccgaaccccaagaccggcaccgtgaccatggatgtcaccaaggctgtcaaggacatcaagggcggcaagatcgagttccgtgtcgacaagaacggcaacctgagcttcctcatcggtaagatgagcttcgatgagtccgctctggacgagaacttcaaggctgtggccgacgaagtcaagcgtctgaagccgtccaccgtgaagggccgttacctgaccaaggcgaccatcacctccacgatgaacccgggcgttccggttgacccgaacaccctggcctgaggctagcgagcttcaatagctactgaaagggacttcccgtaaagggaagtccctttttgcatatgcgatgaccggttgcgagaaggtgaacctggatggtcacgcaatcgaattcttgcaacacgccggtgaacgcatgaatttgttacgcatcggcaatgcaaaacggattattctggtatcagaacagcgcaaataggctgtttgcgacacgccgaaggaaccgtgtgattgcaacgattcctgaggcttttgcgcgcctcgatttgcgcgaatccaaacatgcgtgtaagttatttccttgctgccgctcagcgagtggttctcctccggggagctgcgaggtgggtgagggggggtggtttgagaactcaagagcctctttggagtactgctttagagtcaaggattgccagttcattcc

SEQ ID NO: 3715 - DNA, 27293 bp, Unknown
  R150_10m  MAG No. k141_8478
cgtgcgtaatctgcttgatgatttgattcaggcttctcacgatttggaaaaccttgacgaagaggacagcgctctggtcagtgaagcggaatccgtccgttcccaactggctgaaacgcgattgggagctgatggaagagtccttgaatggaacgacgaattcatcgaatccgatccacagcaccgccatctgtcccacctttacgaactgcatcgtggtgcaggcatcacgtctaagactccgcgtctggaggaagccgcgagaaaatccctcgaagtgcgtggcgatgatggttccggttggagcatcgtatggcgcatgatcatgtgggctcgtctgcgtgatgcggaacacgccaaacgaatcataggcatgttcctacggccggtggatgcgaacgctgaaaccaatctgctgggcggaggagtgtacgacagcggattatgcgcccacccgccgttccagatcgacgggaaccttggattcccggcggccttgtcggagatgcttgtccaaagccacgatggctggattcgcgttcttccggccctgccggaggattggcatgagggaagcttccatgcgctccgcgcaagaggtggaatccaagtggatgcgacatggacggatcagaccgtggaatatacgttgcgctgttcgaagcctatggagattacgctgaacgttctggggactgatatgggacgtgtcgcattgtctccggataagccattcaagggaaccatccggcgttaacgtattgcgttatatccgttactaaatgttgcggaccgtctttcctaatagaggaggacggtccgcaatctttttttgatgggaaaggagattccgccattttccacgattggtatgcgcagatgaacctgtacagtgaaagctatgcgtgtaatttctggacgattcaagggtgtggcgcttgctacgccgaaaacgggtacccggcctaccacggatcgcaccaaagaggcgattttctcgcacctcgactcatggggagtgctggatgatgcccgtgtactggacctgttcgccggtactggtgcgttgggcatcgaagcgctgagccgtggcgcgcgagaactcgtggccgtggaaagttcccggcctgcggcggcgctgattaccaagaccttgtcgcagttacagaagaatcgttcgtgggatgcctcgctcaaggcccgtgtgttcaccaaaaaggccgagcaagtggctggcggctttggtgaatcctttgacgtgatattcattgatccgccctacgcctatgagaccgctgaatgcaatcagttgttggccaatctggcggtgggcagcgccaccaacgagaacaccgtgattatgctcgaacgctcggtacgctccgacacccccaccgcccccgaaggctggcaaatcactgaaagccgcaactacggcgaaaccgccgtcttctacatcgagcccgcggatgacgactcggatatagagcgttccgacgattccgccgcgtagtgaatctcccaccgtgtggtgaattaatcggcgagccggcgcggatgggtggcggagacctcccagcccaaggccatcagggtcttgcggtcggccttatccagcgccttgcaatccagtgccgcgataaggtctggccggatctcggcggtgcgggccagcgcttcgtcgcggcgaaaacggtccaccttgccgtggtcgccggacaacagcacgtccggcaccgcaataccacgccacacggccggcttggtgtactggcgatgttcaagcagtgcgtcctcgccggtgtaggattcctcgacaatcgaatctgggttgcccatgaatccgggcatcaggcgggtgatggcctcaagcatcaccgacaccgccacttcgccaccgttcagcacatagtcgccgatcgaatattcgcgtacgtcgacgccctgggagcggtagtagtccgggatgcgcgcatcgtagccctcataccggccgcagccgaacagcagatggtcggcatggctgagctcggtggcgtcgcgctgggtaaacaacggggccgatgggttcgggaagatgagcaccggtgtgccggatagggcggaggattcagacggtcgcgagaatcccagcagttcgtccaggcattcgctccacacctcgggcttcatcaccatgccggccccgccgccgactggcgtatcatccaccgaatgatgcacatcgtgggtccagtcgcgcaggttgtgcgctttgatctccaacaatcccttggcctgggctttgcccatcaggctgaggttcatcacctcaaagtattcggggaacacgctcacgatatcgatcttcatgttatccagcctaacggtagccccgcccgcattacacggccaccactacactattgcggtgatgaatacgacgatgaacctccccacccgcaaaaagcccgaagtgttgtccccggccggcaacctgaggggcctgaaaaccgcggtcgattatggtgccgacgccgtctactgcggcggcaaagccttcggcatgcgatcggcccccaaaaacctaagccttgaggactttgaggaaggctcgcgctacgcccatgaacgcggcgcccgcgtgtacgtgacctgcaacgtgctgccgcgcaacaacgagatcgaagccatgcgcgagtacgtcggccagctcaaggacaccggcgtggacgcgctgatcgtctctgacatcggcgtgatgatgatggcccgccaagtggctccgaacctggaattgcatgtctccacgcaggccggcgtcaccaattaccaagctgcgaacgccttctatgagcttggcgctcgccgtgtggtgttggcccgcgagatggacttgcaggccgtgcgtgatattcgcgccaacattcccggtgacctcgacatcgaatgcttcgtgcatggcgcgatgtgcatggcgttctccggccgttgcctgttctccaactatctgaccgggcgtgatggcaatcatggcgaatgcgcgcagccatgccgctggaagtattcgatcgtggaagagaagcgccccggccagtacttcccgatcgagcagaccgagaacggcgcctatctgttcaattcgcaggacatgaatatgctggggcacttggatgatttgattgactccggtgccaccagcctcaaaatcgaaggccgcgcgaaaagcgcctactatatcgccgccatgaccaacgcctacaaaaccgcggttaatgaatacatgattcaacgcggttttgaagacgctgatggcaatgttctgaagcctttccgtgaccgtgtgattcgcccgggcgaccccgattttggccaaggaaccgaagatcaagtgatgagcaatgccgatgccgcgttcgccggtgtggccgatgagggatatgaccgtggctctgatactgcggttgccgattcggtcaccggctcggttgccgcagaacgtgaccgcgtgacggttgctgatgccgccgactcaactgcctctggtacgtcggccggcaccgccgtcgaacccgacggcatgagctcccacgcccgctccacgcgccgcaagtccaacaccgcggtcgaacagatcgagaccgattggaagcatgcggccgttcgcccggccccgcacgtcgaactgcccgaatggctgctcgaggaaaccgacaaggtggcccaccgcgactactccaccggcttctattacccggagcacaaggtcacacagaacaccgaccgctccgcctacttccgctcatggctggtagtgggcgaagtgctgagctggagcgcggacgaaggcggacgtgtcacgctgatgagccgtaacaagatcgagcccggtcaacaggttgaattcctgctgcctggcgagagaccattggtctttaccgtgccggaaaccggcctgcgcgatgccgatggcgcgccagtacccgccatcaataatccggcgcacgtgttctcgatgccctgcccgcaccaggtgcccatcaacgccgccatccgctcgcgcaccaaaaagcccaccctcaaagccgaataacctaccactccgcccccgctgactgggggtggtcatgggaatcatgaacaccgcccgcacccaagaaagaatgccttatgcctgaatacagcgaagaaatcctcgattccaacagcatcagctctaccgataaagccggtcgccctattccggtgaccatccccatcgcactggcccccggcatcaaggtggtgtacaccacgcgactgggtggactgagcaccggcgattacggcaacctgaacctcggcggcaagtccggcgacgaacctgaggccgtgctgtcgaaccgcatcgcactcgccgaagcggtgcaagcccgcctatcgctggtctcccaagtacattccggcgtggctgtggacgtggacgactcgttcgtcatcaacacccccttcggcttcgacgtgtccggcacacatggtgagactgacactccgcacgtcatcgaggcggacggccaggtcaccgcacaatccggcatcgccctaggcatgttcgcggccgactgcctgccggtgctgctgggcgacccggtcaccggcatcatcggtgcggcccactgcggccgtcgtggtctggagcgtggtgtgatcggcgccacggtagacctgatgaagagcaagggtgccgacccggcgaacatcgtcgccacactcggcccgcgcatctgcggcgactgctatgaagtgggcgacgagatcgccgatcagttcatcaagcgcttcccgctgaccaagacgaagacccgcttcggtggtgccggcatcgacatcgccgaggcggcaatgatcgacctcgccttcgccggcgtacatcaggtggtcgattctatgccgcgcgtgcacgccgccacccagtaccttgaggaagacccggaactcgccgaactgtgccgcatggacggcgaaggcccggccgagctcgcggagcgcatcgacaacatcagccacagcatgtgcacgctcgaaaacccactgtggtactcgcaccgccgcgccgcgctcgccaacaaaacacacgaaggccgcctcctcgccctcatcgtgcgtgactaaacggagaatgcgggcacattccgtggagaagatgtgatgcagttcacggacggccagccctcaccctacggtggtgcctatgactgagagagatttcgatacccccgtcgagacgcctaccgtccagccggcccccgctcagggcgccaaaccggcacaaaccgtgccggtggtggccgtggtgctggccgccggcttcggtacgcgcttcgaccccgacaatcccaagcagcttgtctccgtgggcggcaagcccatcgtgtgctggagcattgatgcctttgaacattgcgatcgcgtcagcgacatcgtggtggtggtcaatcccaaggtgcgcggtgaagtggaaacgttggttggcgagatgggctacaccaaggtccgcgtcatcattgacggcggtgacgaacgtgtggacagtaccgccgccgcgctcgacatgctggctacggctggcattccggacgatgccaagattctgatccatgacgccgtccgtccgttcgtggaacagtccgccatcgacggttcgattgatgcgctcgaccagttcacggccgcgaccgtggcctacacctcaaccgacaccgtgctgttgaccgaggatctgggcgatttgaaagtggtcaagtcggtgccggaccgcccgaacaccttccgcgcgcagaccccgcaatccttccgcttcgcgacgattcgtcacgcttacgatctggctgccgccgacccggacttccatcccaccgacgacacgcgcgttgtggtcgattatctgcctgatgaacccgtcgccattgtctccggtgcggaaaccaacctgaagatcaccacgctggaggatattcccacagctgagcgtatcgccgaggagattctcggtcgtgatcccaaggaagaggcccgcgcccgcatgcacgccctgctggcccaagcggccggccagatgcatcgctagactggcattatgcgtgaactcaatgttgtgatctccggcttcgaccactatgacggcgtggaggtcaatcccgccgtcgaagtgcccaaggccatcgccgagcaggggttgggcgtctcctctgctccggacgatccgttggagcaggtcgccgtcaccgtccatgccgtcagcatcccggtgagcttcgccaaagcctggcccacgctgaaagagacgattgaggccaccaagcccaatatcgtcatcgccaccgggctcaagcacgcagcccgaggcgtgatgcttgaacgatgcgccaccaacctgatggacgcgatcaagccggacgcggacaacgtgaccccacgccgcgaacccatcgatcccaatggcccggccgcctattggacccgcctgccgttgcgctcgatcctgaatgatttcacggacgattcgattccggccaccctgagctcggacgcaggcacgttcgtatgtaattcgctgttctacaacttgctgaactggaccgccacccaggagcgggtgctgggcggattcgtcagcttcccgccggtcgtgccggcggattccagccagcatggtctgccactcgaccagcagatcgccgctggccgtgatgtggtgcgcgaagccgtgcgctactatctcaagccctccagctccggcatcctcatcgcctagcacgctgcgcgccacgccggaatagaacatggttcgcacgcattgtaacgattgcgcgtcactcaacgcccagcgctagtgcgatgcgctacagtgcttcaaggatgtgccaagagctttatgcgtgtgcgaaaggaataaacagcgatggtggatcgtttcccggtggtgctgcgaggatatgacaaggagaaggttgatgctgccttcgacgctactcaggagagtgtgaagcgtgcgcagcagacgttggccagcatgcgtgagcagattgcggcggatgacgaccgtattctgcaactgcaggcccagcttcaggaagagaagaacaagaagccggaaggcaacagcttcgcttccctgggggcgaacgcccagcagatgctcgcctccgccgagcagacgagtaccgaactgttggaacgcgccaagcaggacgcatcctccatccgtaccacggctcaggctcaggccgaaacgctgatcaacaacgccaagctggatgcccagcatattgttgacgacgccaatgccaaggccgcctcgattctgacgaacgccaacaatcaggccgaatcagtgaccacctccgccaacgaggacgccgcacaactgcgctccgaaaccgccaagaccatcaccgaacagcgtcagaccgtcgagcttgagctcagcaacgcgcgcgaagagcacaccaagaagatggcttccgaacgctccacccaagagcgcgaaatcgccgatatgaaggcggaagctacccagcaggttgccgcaatgcgcaaaagcgccaatgaggagatcaccaagcttaagtccgattccaacgatcagattgaggcggcgctcgccgaggccaacaagaagctcgccgacgtgcgcgagcaagtgtccaagatgatgaccgaagcccagcgcaaggccagcgaaatcattgatgcggccaagaccaagggtcaggaaatcactgatgaggccgaggtcaagcgcaccagcacgatgagccaggtcaacgccgaagtcgagcagatccgtcacgacatcgccgctcagcaggatgaggccacgaagaaggtcaacgaactcctgcagcacctcgaagagcgtcgtgtggcggccaagcgggaagccgatgagttggtcggccaggccaagaacactcgcgaccaagccgattcatatgccgcgtccaagcgcgaggaggcggacatccaggccgccgcaatcgtgcataaggcgggcgaggaagccgatgcgcagatcgaggagcgtcgtgccgccgcccaaagcgagcttgacggtctgtccaagcgcatcgccgatctgcaggaacgcgagtccgtcatcacccagcgtgtttcggaactgcgttctatgttctcgcaggcgttctccggattcgctttcggtggtaatgcggcggcctctggtcagagtcaggaagccgctgccgtggcgtcattgccggtggtcgcgcccgtcccggaagtcaagcctgtacacaacgaggccgatgatcagccgggtgagttgagcggaaacgagtcggctgccgacgatcacaatgagacagatgcggcaccggctgattcggctgattcagctacgcagaatgagcagtccgaatcgtctgagccgtccgagcaccagacacagggcgaaccggaggccccgactcaggagaatccagccgtatctgagcagaacggcgaatgacaggccttcgattagactactagcggtaagaattacggcacctgcgctttcgagccaggtgccgtattcgtttggatctgcgccacaagcgcaccatcacagaaggagtatgacatgagtgaattgacgcctctgaccggcgaagcactgaataccctgcgcggcgatttcgcacagagcggcaccaaccgtctggccatgaacgcggtgaccgccgccggcatcgacaaggtggctcgcaattatgaccgcgctcgtctgatgcagcgccgtttctccaccatcgttgacaatggcgaagccacccatcaggatcgctccggccgctgctggctgttcagttccctgaacgtggcccgcttcatcgccaagaagaacatgaacttgaaggagttcgagttctcccagaactacgcgatgtactacgacaagctggagcgcgtcaactacttccttaaggatgtggccgctctggtggctgccggagagccttccgactcccgcctgatgcagcacctgctcgccgacgtgatgggcgatggcggccagtggaccatggccatgaacgtgtacaagaagtacggcgctgtgcccaaggacctgttcccggagaccgaatcctccaagaacaccggtgaaatgaacacccagctgcgccacatgctgcacaccgccgtggcgcacatgtacgccgctgacggcgatgcctccaaggtcgaggcgattattgccgacgccactgctgccggccaccgtattctgaccatccacctgggcgagccgccggtctccttcgactgggaatggaccgacaaggatggcgaattccaccgcgacggcgagattacgccggttgagttctggaagaagtacgtgggtccggctggtcttgaggactacgtgtgcctggtggatgatccgcgcaccgagcacgccaagggcaagaagatcggcatcgagcacctcggcaatgtggctggcggcgacgccaccgagtacctcaacgtgccaaaccagttcatgaaggactgtgtcaagcagattctcgttgagcagggcatcccggtatggttcggtgccgactgccacccgttcatggaccgtgagaacggcgcttgggccaccgacctgttcgagtacggccgcgtgtacgacgtggacttcgatttggacaaggaagcccgcgtgcgcttcggtgactccgccatgaaccacgccatggctttcgccggcgttgacgtggccgacgacggcaccacccgccgctggcgagtggagaactcttggggcaccaagatcgccgacaagggctacttcaccatgtccgacgactggttcaccgaatacgtctacgaggtagccgtcccgaaggccctgttgccggaggaataccagaaggccctcgaagagccagccaccatgctccccgcatgggacccgatgggcgccttggcctgacttcgccagcctcccggaatcggcctgacggccgatgctgtgttttttcgcagcctgccggctgctagggtctctccctctgtcagcgcgaagccgctgacgggggggaggccgcggtcgcaggccgcacaacaacacagcatcgccgcaggcgagtccacgcaggcgagttcacccaaagtccataaccgccggcccaacaagcagtccccgtaacagactgctatagttgggcttttgcgtctatagcgccataccgacggtacgtatacaaggaaaggagtcgagcaatggcagcactacgtggtccggatagttccgaggatgaacgtcgtttgggggagcaggccgtctttcccgagaccgtcgatgtcaacattcgtcagcttgaccccattcccgcgccgcgtgccttcctcagggagcagccgctcaccgatgagatgagcgagctcgtgctccactcgcggcaggaaatccgcgacgtgctcaacggccgtgacgatcgattgctcgtcatcgtgggtccgtgctcgatccacgacccgaaggccgcgcacgaatacgccgagaaactggccgccgtcaagcgtgagcttgaagaccgtctcgtgatcgtgatgcgcgtgtatttcgagaagccgcgcaccaccatcggctggaaaggcctcatcaacgaccccgatctggacggtcgcttcaatatccgtaagggcatgtggctggcccgcaaggtgctcaccgacgtgctgagcctcggcctgcccgccgccaccgaatggcttgaccccatcaccccgcagtacatctgcgacgcgatcagctggggtgccatcggcgcgcgtaacaccgaatcccaagtccaccgcgaactggccagtggcctgtccatgccggtgggcttcaagaactccaccgacggctccatcaaggccgccgccgattcctgcttcgcggccggcttcgagcatcacttcctgtccattaacttggacggtcgcgtgatttccgccgaaaccaaaggcaacccggattgccatctggttctgcgcggttccagccacggcccgaactacgatgccgaatccgtgcgtcaagctctggaagacctcaaggtttccaaagcgtccggcccgagccagcatggcctcgtcatcgatgccgcccacggcaactgcggcaaagacgaaaaccgcgaagccgaagtcatcgaagagatcgctgagcgtctggcgcacggcgaacaaggcatcaccggcgtaatgatggaaagcttcttggtcggcggtcaccaaaagccggccccgctcgaccagttggtctacggtcagtccgtcaccgatgcctgcgtgccgtgggaacgcaccaacgagctgttgcacaccctagccgacgccgtcgccactcgccgcgcggctaaatagctttgtctttgtaaaaatgctcactgagacccactcagtgagcattctttgccaataacggtggtcatgtcagtttgttcccgtgacaccttatccttgggaaagatactgatccaaggagagatgttatgcagcagcaggaggaagcagcacattcgctgcatccgttgcaagtcggtccgcagccgttgaacaccccggaagagcttcgcgccattcgtcaggcgatgggggaggggaagaacccgctcgttgccactgatgtgccgcgctgggaagatcaggtgggtgtcagtcgcatcatcaaccgccgcgtattggagctggagccgctgcccacgcccgcgcaagtgctcgctgaactcccgctgaccgatcaggctcaggaaatcgtcgcctactcgcgtgatgagattcgcgcgtgcctgtacggccaagacgacaggttgttggtcatcgtcggcccctgttcggttcatgacccgaaggccgcgctggactacgcgcaccgattggccaagctgaaggacgagctcggtgagcagctgctcatcgtcatgcgcgtgtacttcgagaagccgcgcaccaccatcggctggaagggcctgatcaacgacccggatattgatggcagccacaatattcgcaaaggcctgttgcttgctcgcaaaaccttgcttggtgtgctgaaggaaggattggcggccgccacggaatttctggagcccaccagcccgcagttcatctcggacgcggtgagttggggcgccattggtgcgcgcaacacggaaagccagatccaccgccaattggccagcgggctttccatgccggtcggcttcaagaacgccactgacggctcggtgaaggcagcggtcaacggttgcttcgccgccgcccagcagcacacgttcttcggcattgaccatctggggcgtgcctgcgcagtcgagacccttggcaacccggactgccatgtggtgttgcgcggctcgattcacggcccgaactacgatgccgagtccgtggccaaagccatggaagacgtacgcgccgaaatgcccgccgaatccgcagcctcgcacggtctgattgttgattgctcgcacggtaactccggcaaggacgagcatcgtcaggccgaagtcgtgcgcaatattgccagcagaattgcagctggcgaacagggtattaccggcatcatgatggaaagctttattgaagggggcaatcagaaggccgcgccgcttgatcagctggtctatggcaagtcgattaccgacaagtgcatcagctgggaagaaaccgaggccttgctgcgcgagcttgcggaagccgtggccacgcggcgttggcactgagttgcgtcatcggctctctcgcaggagcaatgcaacgaaacgtctctacccctcagcccgccattcggcggccacctcccctgacatgggagtcgaaagcgttgtgaaaggaacttacatatgggtatgaaaactgtagctattattggcgcattggatgaggaagtggcgctgatcgccaaatcgctcacgcatgtgacgcacaccgccaagggcagccttgacatcgtgtccggcacggtcgactcctttggttctgacgtcatcaaggttgccgcaacggtaggcggcatgggactggtcaatgcggccgccaccacgcagctgctgattgacgagttcgccccggacgccgtgattttcagcggcatcgccggcaacctcaacacccacctgcacatcaacgacgtggtgctcggcggcaccctgcgctacctcgacactgacatgcggctcgtaggccagtggaagcccggcactgcggacgctccggtggaggaattccactctgatgaccgtctgctggaagttgccgacgaggcgcttgccaatgcgggcattacccacatcaccggcatcatcgcctctggcaactacttcgtggacacgccccaaaaggtcgaggaggtcatccgactcaccggggctgacgccgtggagatggaaggcgccgccgtggcacaggtcgccgcccgcaatgacgtgccggcactggtgattcgtgccctttccgacaacgccgacaccgattacgaggtattcaaggagttcgacatctccgagtacgccgataccgccgcccgtctggctgtcgacatcgtcaagcgcctgtagtcggcgggctggcccatctcaccatccacgttttgggtatgatgaccacaatatgagcgttttcaaactattgcttataacctgagccatactcggtgttcggcacagcgatgtgcggggttcatcgctggggccacaagccgtaccagttcttctcccgcatgccggtcgctgtgctcaattcgttaagcgacgacaacaccgtcgcgaagcattgaatacacaatgcgcacgctgcactggggtttatctgcagcatgaggagagaaaaaatgactgcaagcgcaaccgcggctgtgaccaaaccggtgaagaaggattcggttcctgagatcatcgccgcttccatggtcggtacggccatcgaattctacgataactactgctattccattgccgctgctagctacttcggcatgatcttcttcacggacgtcgccaagtccaaccagaccctcgccacgctgatggccttcgtgaccttcgccgtttcgttcctcgcccgtccgttcggctccatgctgttcggccacttcggtgacaagctcggccgtaagaagacgctggttatcgccctgatgaccatgggtatcgccaccttcctggtcggctgcctgcccggttatgagcagattggcgcatggtccgtcgtgattctgtgcatctgccgtgcctgccagggcgtgggcctcgccggcgaatggtccggtgccgcgctggtcgccactgaaaacgctccggccgacaagcgcgccctgtacggttccttcccgaaccttggcgccccgattggcttcttctgcgcttacggcctgaacctgctactcgaatccaacctgagcaaggaacagatgattgccttcggctggcgtatcccgttcctgtgctccgccgtgctggtgatcattggcctgtacgtgcgtgcccgcatgtctgagaccccagtgttccagaaggccactgaagagaagcgcacctccaagcacccgctgcgcgacctgctgccgtactggaaggaagtcgtgctcggcaccgtagccatgggtatcacctataccctgttctacgtactcggcacttggtcgctggcctacggcgtcaagggcttgggcttccagcagggcgagtacctgctcatgcagatgtgctccgtggtgttcttcgccatcttcatcgtggtctcctgcgtgtacgccgacaaggtgggccgcaagaaggtcatgattgccgtgaccgccgccgccttggtgttcagcttcttcgtgccgatgctgctcgtgcactccgccgcccatatcatgatcttcctgtgcgtcggcttcatgatcatgggtggtttgttcggcccctgcggcgcctacctgcctgagctgttcccggtgcacgtgcgttactccggcgccggcctgagctacaacctcgccgccatcttcggtggcgcattcgctccgaccatcgcccaggccctggtcgcctccaagttcggcgttgccggtgtgggctggtacatggccatcatggccgccctcgctctgctcgctctgttcctgattaaggaaagcaaggacaaggactacgagctgtaaatagagctccccatattatgctcccgctggcgggagctgtccacgaaagcggactgagggtggccaatgggatttcggttctttgaccaccctcagtctcactgcgttcgacagctcccgccagcgggagcattttgttatgtcgtcccaccaaaaatgaacaatagacgaacttacgtagtttgggcatctcactacgccttgcacgttttactctggaaatcatggatatctggcagatcgtcgtgattgtggtgctcgccgcgctgatactggcgtgggttgccgtcatcgcctacaacaaaggccgcgtttcaggtcggctcgccgccgaacaggacctgtccggcgacgaggatacgcgttctctattcggtgatgatgcgcccgtgcgccccaccgagcgtcgcctgattgaagtcctgcccgaagccctgattgttaccgaccgcaacggcttggtccaatattcaagccccggctcagtgccattcggcctggtctccggcgaccgactcaactcgcgcgaagtcgaggacatcctcactcaggccgccgccgacggtggcgtgcgtgagcgtgaggttcagctgccggtcaatcgcaattcctatccgtcctctaatggccgaggactggaggccggccagtcacgcccgtccaacatgctgtatttgcgtgtgcgcattggcgatatcggcgatgacctgtacgccatcttcatcaacgacatgtccgagcagcgccgtttcgaggccgttcgccgtgactttgtgaccaacgtttcgcacgaactcaagactccggccggtgccatctcgctactggccgaaaccgtgaccgacgccgccgatgatccggacgccgtacggtatttttccggccgtatctccaaggaatccgcgcgcctgaccgaactggtacatcatcttatcgacttgcagaaagcccaaagcccgcaaagtgtgattgatgcgcggcgcatttccgcgctggatgtggcacgcgctgccatcgccgccaatcagacccaagccgactcccgccatgtggatattcgactgagtgtcaacggacagtcagtgcccacgaaggtcgaggagctggccgatggcgaaggttccttggaagaatcaggcagcccggccacgagcggtccgatgatcaaggccgacaaagaggccatgcaaaccgccgtcaagaacctcgtagagaacgccatccattactcgcccgaacacaccactgtggcggtcggcgtgggggagcgcgatggcaaagtcaccattcgcgtggtcgatcagggcatcggcatccccgccaaatcactggaccgcattttcgagcggttctaccgggtcgacccggcccgttcgcgcgagaccggcggttcgggactcggcttggccatcaccaagcactgcgtgcaggagaacggcggtcggatttcggtctggtcgcgtacgggggaggggtcgacgttcaccatcgagctgccggccgccccggatgaggatgacgacgaggcccggccggacgagtcgacacaagcgtagggccttggttggtgcccgatatggtgccattccattgccgcacaatcacacagtgggcgaggtgcgcacaccgtgcgtagcacaattacgcaattacgtactttcaggaaacagcaggctaacggagaacaaatggttacgatagtatcggaaaactttgcgcctatgcgcacgggaacatacccaagaaaggctactatggcacgcattcttatcgtcgaagacgaggaatcctatcgcgagccgctggtataccagctcacacgcgaggggtacgacgtgtccgccgccgccactggcgaggaaggtctggaactgttcaccaagggcggcatcgatttggtgctgcttgatttgatgctgccgggcattgacggcactgcactgtgccgtcgcattcgtgagcagagccgtgtgccgattattatgctcaccgccaagagcgccgaaatcgataaggtcgttggccttgagattggtgcggacgattatgtgaccaagccgtactctttccgtgagctgctggcccgcatccgtgccgtgatgcgtcgcaatcaggccacggcccaggcttccggcactgtggatgacgatattccgctggtgtgcggcgatatcgccatgcaggtaggccagcatcaggtcaccgtacgcggcgaaaccgtgttcttcccgctcaaggaattcgaactgctcgaatacctgatgcagaacaagggccgtgtgatgacgcgtcaccagctgatcgaccgcatctggggttcggattatgtgggcgacaccaagacgctcgacgtgcatgtcaagcgcgtgcgctccaagatcgaggaagatccggcgcaccccaagtatctgactaccgtgcgcggtctcggatacaagatcgatactcccgcggagtaaatggaaggcggccttcgggccgccttttttgttgtggattgtgggctcgccgcaggcgagtccactccaaaaactacgtagcctcaacgtagcccacaaacatccaagtgttcatcttctgtttactgatttcggttttgggcccttgaaaccaccaatacgcttgtagttgtcatgaattgaccgggcagcgctgagccgcccgcgaatagttgatagagggattaagtaataatcatgcagaagaacatcctcattcgctccattgccgctctgtccggcattgtgatgctcgcttccgtggccgcctgcggcgataacaccgccaccacgaccgacaacagctcctcctccgattccacttccaagtccaccccggtctccggcaacttctcgggcgccggcgcctcctctcagcaggccgccgttgaagcctggatcgccggcttccagggcaccaaccctgaagccaagatcgcctacaacccgtccggttccggcgctggcgtgcagaccttcctgaccggtgccaccgcttgggccggctccgataaggcccttgccgatgacgaagttgagcagtccaagtccgtgtgcactgaaggcaccgccttcgatgtcccggtctacatctccccgatcgccgtggtcttcaacctcaagggcgtttccgatgccggcaagcacatcaacatggacgctgccaccatcgccaagatcttcgacggcaagatcaccaagtggaacgatccggccatcgccgatcagaacaaggacctgaagctgcccgacaccgccatcaccgtcgtgcaccgctccgataagtccggcaccacccagaacttcgtctcctacttcaaggacgtcacccctgacaactggacctacgacctctccgagaactggccgaacgaggttggccagggcgccaagggcacttccggcgtgatctccaccgtcaagcaggccgacggcaccatcggctacgctgacttctcccaggtcggcgacctgggcaccgtggccgtcaaggtcggcgacaagtacaacgagatttccgccgaggccggctccaaggtcatcgaggactccaagcaggacgacaccgttaagggcgacaaccgcatcgtcatcaagatcaaccacgccaccgaggccgagggtgcctacccgatcgtcttggtctcctacgacatcgtctgcccggcctacaaggacaccaagcaggctgagttcgccaaggcttggctgacctacgtgacctccgacgagggccagaaggccgctcaggatgccgccggcaccgctccgctgccctcctccctgaagtctaagatcaccaagtccatcgaggccatcaagaccaagtgatgacgtcggcccgcaagggtcgtgtggactggacctgacaactgaacgatagactgtagtagtaagagcagtcgccgccaactttaagccgcagtcgtaaaccatacggctgcggcttaaagcgggtcaggacccgaacggtttggcaaagtcacagacgaaaaccgcaccacttgaatacttgataaccaccctatataaggagaatccgtgagttcgcaagacaaaacggctgtgcagccagttggaggcaagaccgccgacaaggtgtttcgcggtgtggcatacgcctgcggcatcctgatcctggttgtacttgccgctgtgttcctgttcctgtttttccgcgcctggccactcatcggtggcgatcaggccgccaacagcgacaccgtgtccagctttaccggcggcaaggccagcagcttctggggctacgtgctcccgctgttgttcggtactgtgctcgtgtctttgctggcactgctgattgccttcttcgtgtccatcggcattgcgctgttcatttcgcactatgcacctaagaagctcgccaccgcgctgagctatgtggtcgatctgctggctgccatcccgtccgttatctacggtttgtggggcggcctgattctggtgccggccatctacccgttctggaactgggttgccaaccacttgggcttcattccactgttcgagggcccggccgccaacccgtcgcgcaccgtcgccaccgtggctgtggtgctcgccgttatgattttgccgattatcacctccatgtcccgcgatatcttcatgcagaccccgcgcctgcacgaagaggccgcgctggcgctcggcgccaccaagtgggagatgattcgtctggccgtgctgcctttcggcaagtccggtattgtgtccgcctccatgctggctctcggccgcgcgcttggtgagacgatggccgtgttgatgatcctgtccccgggcctcaactactccatcaagctgctgcaggcctcgcagaaccagaccatcgccgcgaatattgccgcacagtaccctgaagccaacgatctgggcgtctccacgctgattggaaccggtctgattctgttcctgatcacgttcgtggtcaacttcatcgcccgtaagcttaccgagaaagcgactgcgtgatgactgctgctgagaacactgaaaagactccgatggacggcacgcccgaaatcgacttcgatcgtttccgcccgacccgttccgccatccagcgccgtaatatcatggaccgcttcatgtgggccctgatcgcggtggcgtttgtgatcgcctgcatcccgctgatctccctgctgtggaccactatcgtcaacggcatcaagcgcctgaacctgaacttcctgagctacaacatgaccggtgtggtcggtggtagccagaccccgtccggtggttacggcggtgtgctgcacgccatcatcggtactctcgaaatcaccgctggcgctatggttatctccattccgatcggtttgatgtgcgccgtgtacctggtcgaatactcgaaccgcggcaagctcgccaccacgatctccctgctcgtcgacgtgatgagcggcatcccgtccatcgtggccggcctgttcgccttctcgatgttcacgattctgctgggccccggtaccatcaacggtttcgaaggctccgtggctctctccctgctgatgctgcccaccgtggtcaagtccagcgaggaaatgctgaagatcgtgccgaacgatttgcgtgaggcttccttggctctgggcgttaccaagcagcgcacgattaccaagatcgtgctgcgcaccgctctgccgggcatcgtctccggtgccattctggccatcgcccgcgtgattggtgagaccgcaccgttgctgatgaccgccggctacatctccagcaccaacgtgaacctgttctccggccagatgaccaccctgccggtgttcgtctaccaggagtactcgaagctcagcgcgaactgcccgcccaacgccgacgccacctgcgtgaccacgattccgatggaacgtgcgtgggctgcggctctcgtgctgatcgtcatcgtgctgctgctgaacctcattggccgaatcgtggcgaaggtcttcgccgtcaagaccgagcgctaagccagtcgctaagcctaagccttaagaacacaaggaaatataaggaaacatcatgggacaacgtattgacgtcaaccacgagaacatctattacggcgactttctggccgtggaagatgtgaacatcaacatcgagccgaacaaggtcaccgccttcatcggcccgtccggctgcggcaagtccaccgtgctgcgcaccttggaccgtatgcacgagatcatccccggcgctcacgtcgagggcgaggtgctgctcgaaggcaagaacctgtacgacaaggacgtggatccggtggccgtgcgccgcgacgtcggcatggtcttccagcgcccgaacccgttcccgaccatgtccatccgtgagaacgtgctggccggtgtgcgcctgaacaaccaccacctggccaagtccgacgccgacgatctggtcgagtgggctctgcgcggtgccaacctctgggaagaggtcaaggaccgtcttgacaaccctggcatcggcttgtccggtggccagcagcagcgtctgtgcatcgcccgcgccgtggccgtccaccctcaggtgctgctcatggatgagccctgctccgccttggacccgatttcgaccttggctgtcgaggatctgatcaacgagctcaagagcgactacaccatcgtgatcgtgacccacaacatgcagcaggccgcccgtatcgccgactacaccgccttcttcaacctgaaggcagtgggccagcccggtcacctcgagtacttcgcggacaccatcacgatgttcaacaacccgcaaaacgaagaagccgagcgctacatctccggtcgcttcggctgatcgtttcctgcgcgcagcgtaatgatttgtgcgtaggagaaacggcaaagcccgccgcaaggcgggctttcgcatattcaacgcgagtattgccgagtattatcgttctcgcaacggagcgagctggaatactttgtcggactgggcggcgacttcccgcttcggtcgatcgacgggagaacggcgggtaaagcggtacaagacaagtccgcacgatgaatactctgtgatgaatcttctgtttacggtgcgagtgtggaagaatggtcacagcaaggtccagcaaaggagcataggtgagtactggtctgatcgtcggcattgtcgttgtcgttattatcgttgtcttgattggttggggcgtcagcgcctataacaacctggtgacgctgaagaaccgtgtgaagaacggttgggcgcaaatcgacgtgcagttgaagcagcgtgccgacctcatcccgaacctggtgaataccgtcaaggggtacgcatcccacgagtctgaagtcttcactcaggtgaccgccgcccgcgccggcgtagtggctgcggccagcaacccgagcacgaccactgctcagcgcgccgccgccgaaaaccagctgtcccgcgccctgttcaacctgcaagccacggctgaggcatatccgcagctgcaagccaaccagaacttcatggatctgcagaaccagctcaaggaactggagaacaagatcgcctacgcccgtcagttctacaacgacgtggtcctgaagctcaacaccgccatcgaaaccgtgccgacgaacatcatcgccggtctgttccactttgagcaggcgcaatacttcgaggccgatgacgcttcccgtcaggtgccacaggtccagttctgacccgcttcaggcccgtccggtaagccgccggccgggcccgtattgtcttaagagagggaagatatgcggatacgattcattcgcgccggaatcatcagcattgttgccacggtggtgttggcagttatcaccttggcgataatcgggacttccgcgttcggcgattcggccggcctcagctaccgcacgctggactatgacgtgaccgccaccgcgaacggtgatttgaaggtcacgcagcatatcgacgtcaagatgcgtgagcgtaccgacagtgacgacaacaccaagccgtggaagcagctgttccagcaatacacgctgaactccggcaccttgactgatatcagcgatatcagcgtgcgcaacgtcaccgacggcatcgactacgcacaacagagcgagcccaagctgcccagtgacgtctcttccgacaaggaatggaacagcgactacgccaaccattggtatgtcgccgatgtgagcgatggcagcgaccatccaaaggcatacacgcccggtaccgatggcctcaagcccagcgcctccgccaccgaagatgacacaaccgtggagatcggctggaatattccggtcaccaccgaggccgacagcatgaagttcgatgtaagcttcaccatgcacgatgtggccaccaaatggaaagacgtggcctccttccaatgggagccgttcggcaagaagaaccaagtgcctatcggcacggtcaccggcaccgtccatttccccaacggcatcaccggcaaaacctcatggacatggctgcacaccgagcgcacctcggaaaccaagcgcaacagcgacggcagctacacgttcacggcctacaacatccacaatggagactacctcgatgtggtcgcggcgttcgatgccgccaaagccaagggcatcgcccgcaagggaaccggcaatcatctcacggacctgaaacaggacgaatataagcaacagcagcgctggctcgacaagcaacgattcgctgccagagctcgtctcgtgttctggattgtcagcatcgtgctcggcatcgcgttgtgcgcgtggggtatctgggctgtgatctccagcaaccggcgtgcgcaatacagtggcagcgtcgaatactggcgcgaccagcccggcatcagtccggcttccgcagcccgtctgattcgcgtggtcgatccgtcgacgcgccaatccgatgaagaccgccagctgaccgccaccatgctgtcgctcgccgtcaagaaggccatcgccatttatccggggccgtcggacatgtatcgcggcatcgacatgagccaggccacgccggtgggcttgagccaaatgattgccgccgaccaaggcaagcagtatgcggcaggcatcaccagcaccatcgtgattctgccgctcgccattgatgaggcacccaacgcgcaacagttgggattgagcgaatcggaagatgcgctgctgaacctgctcatcgtcatttctcagcgcgtgggcagcccggtattcgacctgaaccagatgaaggcgacctgccagaactggcaagacggctatattgagctcggcaaattcaccggtgcatgcagcatggaataccagcggctgggtgccacgcgctctgtgggctggcaatggatcctacccggcgtattggccgccgtgctgggatttggttcgctgctggccaacagctttatcggatacccggtggctggtcttatcgggctgccgatattcctggtcggactgttctgctcgatggccggcgcgatgaccgtgctcactgatcaagggcaggatatcgccggccggactctgggccttaagcgttatatggaagacttctccaacttcaccgaccggggtaccgccgatttggccttgtgggattggtatatggtctacgccgccgcgtttggcatttccgatcgcgtgatgcgtgaactggccaaagcatatcctcaggtcaacgacccggcttggctggatgccaacgcctccaactcgttgttctactggaactaccgcccgtatggctggtacagccaccgtcataatggtccattcgaccacgatgctgccgggcagacggacctaggcgttggcggcccagctccggcttacggaggcacgtcgtttgccggcggattctccgacctcggctcgcagctgaactccggtctggcggacatcagctcgaccatcagcgcggcagcaccatccgccgattccggtggcgatttctccagcttcggttcgggcggcggctccggtttcggcggctcgttcggtggctcaggtggcggctcgttcggcgggcggtagcgcatgcctatgtcgaaacgcattgttcgtgccctgggcttaagccttgtcggtgcgctgattcttgccgcactctgtgccggtgccttgattctcggcacagatggtgccgacctgagctaccgcacgcttgattacgatgtgaccgccaccgccgacggcgatcttaaagcacggagcatatcgatatcaagttgcgcaaacgcaaggatgacgatggcaagaccaaaccgtggagatcggctggaatattcccaccaccgtaaaaaccaacagcatcaagttcacggtgagcttcaccatgcatgacgtggccaccaagtggaaggacgtggcgaccttccaatgggagccattcggtgagaacaatcaggtgccgattggtacggtcaccggcacggtgcatttccccaaaggtgtgaccgcgagcaactcgtggacttggctgcacactgaacaaacctcggaaaccggccgaaccaaggatggcagcttcaccttcaccgtaaatgatgtgaaaagcggcgagtacctagacgtggtggccgctttcgacgcggccaaggcgggagatatggctcgtgtcgagaccgacgatcatctgcaggagttgaaggaagacgaagccgacgacgaacggttctggcgcaatctggaacgccaacgcgccacaaggcgcctgaacaactggatgaccaccatatcggccggcctgatattcgggattattggtgttgttgcagccttacgctcctccggacgttcacgttaccgtggctccatcgaatattggcgcgatcgccccgagctgagccccgcatcggcggccaaacccatcgatatcgtgacttccggcgacaaacccgacatttccgagcgccaactcgtcgcgaccttgctttctctggccgtgaagaaagtcattgctgtgttccccggttcggcggacctgtatatcggcgtggatctgaaacaagtttctccggtggagctcagtcagcgaatcgggtccgatccatacaagcgcaataatgcgcgtaccaatagcacgattgtgatgctgtggcagtacgattacggcgtatctgagggatttgatgaatcagtattcgtcgaatccgtatttgatggatctggatctggcggatctggatctgccgcatctagcgtgtccgatgcacaccagcccgatctcagtgcttctgagcgggcattgctctatctgctcaccgtgatttccgagcgcgtaggtcgtacggcatttgacatggatgacatcaaagacgcctgcaaggattggaaagatggctacaaggaactcgaaaagttcaccaatgcgtgcaagaccgaattcgcggcggcggatatcgcgccgaaaaccgagaacggatggctcattcccggggcaatcaccgtgctgatcggtggcgccagcatattcatcaacggtttggccggatatctggtggccggggccctcatcggcattcccctgatgacggtcggcatattctgcttcctgatggggaattcctacgtgctgaccgatcatggtcagcagatggccgggcaatgcttgggtctcaaacgatatatgcaaggcttctcgaacttcaagtaccgtggagtcgcggattcgacgctgtgggattggtatatggtctacgctgccgcatttggcatatccgaccgggtgatgcgggagctggccatggcctatccgcaagtatccgatccggaatggcttgatgccaatgcctccgacacggtgttctattggaattatcgtccgtacgactggtatgggttgcgtttctacaatggctcggcgttcgcggattccgtggctgacagcggattggccggagcggtgccagcgttcgggggcacgtcgttcgcggctgggttctctgacctcggcacgcaattgtcgtacggatttgcggatatcaccgcgacaatcaatgcggcctcgccatccggtggctcaggcggctttggcggtagcagcggcggttccggcggcggttcgttcggtgggcggtaagcgatgtgcttctgaaagtccctatagctttgaaagtaaaaggcccggtgtcatgaaccgca

SEQ ID NO: 3716 - DNA, 6390 bp, Unknown
  R150_10m  MAG No. k141_8521
cgaacccggaagctaaggcctggcacggcgatggtactgcacccgacagggtgtgggagagtagcacgccgccgcaccacacgtacaggaagccccgatacccctcaaaggtaccggggcttcccgcatatcaggacacttgcgcgtggggggtgtatctcgcgtccttgggccccggcaggagtatcccgtcggggcccagtgcgttttgggcggcaacccgctgaatacccggtaagatgtctgaggtatcaacaaacaggtcaggaggtgacgcgcatggtggcgccaagccgtgatgaccgtagcgtagatgcattggtgaaatccaaggcagtacttgatgtattggcggaactgggaccaagcaccgcaaaaaccataagcgaacgtactggtgaacccgtaagctcaacgtatcgtttgctggataatctcgtcgcagtcggttgggtggaacggggcatcaatcgtggcgagtatcggcttggcatcgattgcgtacgtatcggcggccaaatcgaaagcagactggacattcagcagatcgctcgccgtaccttccgcgcccatcacggccagttcggcatctggggtctgttcgttcggaggcgattgcgcacggtgtgcatcgagacacgcacccgtgagacattgcaaagctatgcacagctggtgggcaatagcttgcctctgagcatgagcgctccctctcatgtactgacggcctggcttcccccggctcgctacgagcagctgttggaacactatgcctataccaacgagctcggcggcacattctccacgatgcgtgccacagcaatgggacaggctcgtcatatacgcgaatgcggcttcacctatgacgtcggccagaccatggccggctccgtgactatcagcgtaccggtattcaatcacgccggagagattcaagcggcaatcgccctgagtggcctttcccgctccttggaacctgagctggcctgtctggtagatgggcaaccggcaacggcatcggctcaagacatggtgcgattggtgcggactgccggccgtgaggtgtcgcgaggccttggatacagtggtgatcatcttggcctgaacagttgaatatgatgagtcagggataagtcaggggaaggaacgtcgacgatggcggaagacaaacgtgaaccgacccgcgctttagacaaggcgagtcgtgtgatggacgcattggcggcggagaatggcctgtcgccggcagatatcgccgacgcctgtgatatcccgcgatcctccgtataccgcgtgctggatggactggtcgatgtggggtgggccgtaacggatacggatggtaactactcattatcactggactggctgcgattggctgatgccgctcgcacgtctcgtaccgaatggcagcctgcgattgcggtcatgcatgccatcaccgcgcaaaccggcatgacctcattcctcagtgtggtctccggcactgaattggtatgcgtggaatgtgcgcaaggtcatgccatcgattcgctgatcctgcgcccgggccgcgtgctgcctctgcatgctggcgcggccggccgcgtggccttggcgtatttcgaggatgccgatgtcgaacgctatcttgcaggagtgccgtttccggcatataacgagaacacgctggtcagtgtggaacagttgcgcgaggatattcgcttgactcgcgaacgtggatatgcactgtcggatgaggatgtgacgttgggtgtcggtgccgtcggtgtaccgattgtggacaacgagtccggtcgcgtgatcgccagcctgtccgccggtggattcgtggacgaagtgttagccactcaagaatccttggccgcgttactgcgcgatggcgtacgcgaaattcaggcagcctgattcggcccgctaggctgtcgggctggacggttatgtccggtcagctatggcctttgccggctacggttctgctggttatgcttctgcccgactacgctgcggtccgttacgcttcggccacacgacccaacgcgatggcggtgatcagcacgtacgcctcgcgcgggtcggtggcatcccagccggtggattcggcggcgcgcttcaaacggtagcggatcgtattgggatgtacgttgagctccttggccgtggtctcgagcgaaccgccgaacttcaagaatgtggagacggtgagcagcgtcggatcatccgggcctgctgctgtcaggcttccgtagaccacgcggaccagttcgtcacgggcgtccgcgtcgccgatcaacgcacgttcgggcagggcgtcgtcggtgcgtaacgggcgcggcaatggctgcacggtggcggccagggccggcgcggcctgaagacagtagagcgtggcctgaatcgaacgcatcgcgccatcggcaccggtgcgctgtggacccaaggcgattggccgatcggcggcgaacgacggggcgatggtattgcagatgatttccggcgtggccgcaccgaccggacgaatcaacgccactacggcggtgctgttgccgatcgggcgcttggcggtcagacacacaccgccgaaatcggccacgattttctcgatttccttggccgtacgtgcggcggaccgggcagggtatccggcgatggtgtaacaatcgaagtcatgctcgaaaccgaggatggtgaacagggactccactcgttcgtcggccagatgattgaacaggcactcgaacagcacggtgcgtacgcggttggtcgcggtgatgccgggtgcggccgaatcggatgaatcggatgaatcgggcgcacccggcataccggatgcaccggacgaatcggcaacgtcggcagcaagaagttcgagaaaatctgacatagtcactagtgtagcgtcgctgattggcgttgcctttcagccaaagactctcgccaatacgtcagcaccacgaatccgaatacaaacgcaaccggcaacatgtgccgctcgaaattattggccggcgcggtaatcatcacgcccatcagcagtagcagcggaatatgggtcatgagggtgagccaacgtcggcgaatcacctcggccgcgccgatcagcaatgtcatcaccacgtagaaattgccgtgcgtaggccagccgagcacgggaatactgccccatacgcgagtgaagccggcgatgtgctcacgccagtcatggttgtaatccttgatccatgtggagtttttctgcacgtaatcgctggccacgtaataatccatcgatacgtacggctgatcgttcacattgaagtatccgaagcatttggccagcaacgcatccagcgcgatgatcggattgtccttgacgatttcgaaccatgccttgttgaaattggtcatatcctcgggcgtcaccgtgcgccacttgtagctgaccttcttggcctgaataccggaggatttcaccgggtcggcatcctgctgggagtaagcgtcggccatctgatcgagattgaagacgggcgcgaggttctttttggcttcgtctgaaataccgtccggattgcgctgagccacgcgggcgatcatttgcagctgtacgccgcggctttcgattggatcgccgccgatgatcgcaccagaggagatggcgaaggagatgccgccgtgaatcagtacggtggggatgagcagcgccacgacgtaagtcgcccagcgtttgcggtcggcgatcagagccagcacgatttgcagagcgatgatgtaccacgcatatttcgcggaaatcagcatcaccgacgtggccaggatgaaggcgatgaagctgtggcacggcaagtgaacgggcgtggcgatggcaggggtctgaggatgtttgcgggtgccggcggggtgccaggtctggacgagttcataccagacgctgaaccaccagacgaacgagaacgcgaacagcggcgatttggtgatggagatagtggaaaacacggccagcgggcagaccatgaagaacagcagaatcaggaatctggccaatcctccggcctgtgggggaacggcggaatccgttgccgtttttcctatccaaggccggttcaggaatcgattggcggcggcagcgcagcagaacacggcgaacagcgtctgcagggcagccaacgtcacgatgccggcatcgtttgagccggtcagatgcctcgcaaacgtgactatcgcgccatagaacacagtgagtaccacattgtgctggtcggtcagatacgtgggatcggacggccacatgtagtgcgcggtggggtagatgtccatcggcacgaaggagaagaagccgatatagggctgtttcaggccggtccactggttccaggcccagctgaattcgcggatctgtgagcggaggtccgcgccgaatgcggccagcagagtggtcggcacccagagccagccgacaaaaaacaccagcataagcttccagaaccggttcgtgccgcgtgtgatccagcggtccagaacagtgacggtggacgtgacgatagcgcgaacggtacgacgggtcttggctggttggctggcctgctgatcggcggcgggccgtgatgtttcgctattctgctgatggtggcgtaggcgctcgccgatggtcttcggcagtatgcgctggcctgctgcgaatcgcgccatcagcgtgatgattccgagatatatcaggaacgacacgacgaatattgcggtattggcccagttccaatgggcgagggtgccgttctcctcgtcccggtacagcgggccgaccgccgagcacagtgcaagccacaggcaggccagcacggccagtgtccagcgcgcggcagcgcccacgcgcgcaagatgcgggtgggactggcgactggatacggcggcaagcttcgcggtggctggtgacgtcatgacaatatatggtagccgcacaggtcaacggttgatattcgatgtctgccgggcatcgccattgttcgcaagccaatacgacggccgggtgcatgcgtgggctcggcgaatgcggaatttccgaagttgtgaacgctaacacgggctgtccggcccaaaatggttgattttgtgcgcttttccgtggaatatcgcgggcaaaaaacggcgcaaccgaggtaacgtagtgtccatgatgattgcattgaaagctgcaacgccgcagctacccagaactacagccgtcgcggatcatgtggtcgccgtggacgaaaccgattcgaccaacgcgctggccgcgcagatgatcggcgacgggtcgttgacgctgcccgaccaccaggatggcgaactggcggtggccgtggtggccgccgaccggcagaccgccggccgtggccgcaatggtcacaagtggatcagtcagcccggccgttgctcgacgatgtcctatgccgtgcgcattccgcgcgcgatcgccaccgacgaatccgtcaatggctggctgcagatgatcgccggactggtcacgctggacgccctgaacggcatgatcgaggaatacggtgccgcgccgaaccagccggactgcttgctggaactcaaatggccgaacgacgtgttctgccacgggctcaagctgggcgggctgctctcggaactggtgattccgccgtcgtccggtactgatgctgatgccgatgacgacgtcgtcatcgtgttcggcgtaggcctgaatctggcgctgggtgcctgttggctgcccacgccgcagtcgacttcgctgcagctgcatgtcacgggcttgccgtcgtttggcgagatgcgcgatgcggtggccgaacgtcaggtcgagggcttccgtgaacgactggcgaagttcatcgccgacccgaagggccagaccgagtcgttgcgcgaggaaatgaaggcggtgtgctgggcgcgcggccgtcaggtcgaggcgcatttcacggacggcaccacgctgaccggcgaagccatcggcctcaacgaagacgcctcactgatcctgagaacacaagacggcacggaccatacggtccgcaccgccgatgtgggagtgctgtaatagccggccagtagctagctagtagctcaggtcagcgaccgagcttggacaggccggcggcggccagagaggccaccacggccttgatggcgtcgccgacgacgaagcccatggaggccagggccacggcggcgagcggcgcaccggtcaacgcggactggatgatgaagccgaaggcgtacaccaccacgacgccgccgaccagcgcggccagcaggtagcggcccgcggtgcgcgcggcggccgcgaaggacgaagtgtcggacttgccgcgcagcagggcgatgaccaccacacccggcaggaagccgaagaggaagccggcgctcgggccgaccagggcc

SEQ ID NO: 3717 - DNA, 48815 bp, Unknown
  R150_10m  MAG No. k141_9026
cagcgagcggaatgcggcggcggaaatatccgccacatccggatagccgagagccacgatacggtcgagctgtttttgggcctctactgatgcgatagacatggctaccagtgtagaacatcaccttcgcttcatcgggcagtcaccatctgggaagaccgctactgttgttccgcgcgtttcgtacaatgtcattgttttacggtcacccgtatgacggccgtccgaacgtaagtaacccatcgaaacccagaggtcatagaggtcatcatgtccgaaaaattgaaggtcggcatccttggtgccaccggtatggtcggtcagcgttttatcacgctgcttgagaatcacccgtggttcgaggtggtcacccttgccgcttccgcgcacagcgccggcaagacgtatgccgaggcggtcggagaccgttggaagatggaaaccccgatgcccgaatacgtcaagaacatggtggtcgtcgatggcgacgatgccgagtccgtggcctctggcgctgatttcatgttctctgcggtaaacatgccgaaggaccagattcgcgccattgaagagcgttatgccaagaccgagaccccggtggtctccaacaacagcgctcaccgttggaccccggacgtgccgatggtggtgccggagatcaacccggagcacttcgaggtgatcgagcaccagcgcaagcgcctgggcaccactcgtggtttcatcgccgtcaagccgaactgctcgattcaggcctacacgccggcactggccgcatggaaggaattcgagccgcgtgaggtggttgtgagcacctatcaggcgatttccggcgcaggcaagaccttcaaggattggcctgagatggtgggcaacatcatcccgttcatctctggtgaagaggcgaagtccgagaaggaaccgctcaaggtgttcggccatgtggacgccgaaaagggcgagatcgtgccgttcgacggcgacctcaagatcacttcccagtgcatccgcgtgcccgtgctcaacggccacaccgccaccgtgttcctgaacttcggcaagaaggccaccaaggaagagcttatcgaccgtctggtgaactacacgtccaaggcttccgagctggagctgccgcacgcgccgaagcacttcatccagtacctcaccgaggatgaccgcccgcaggtcaagctcgacgtggactacgagggcggcatgggcgtttccatcggccgtctgcgtgaggattccatcttcgattggaagttcgtgggtctggcccacaacaccctgcgtggtgcagccggcggcgccctcgaatgcgccgaaatgctcaaggctctaggctacatcactaagaagtagttgaatctcgttaaaatcgcaaaagccctccgcaaggagggctttcatcgtattaggcgcggaattcgcggctcagcggccagtaccgccgtacaccacggcttcgatctgatcggcatcgagaccgtatgcagtgtgcagcgccttgacggcgtcgttgagctgatcgagcggcacaagcgcggcaatgcgaatctcggaagtggagatcatcagcacgttgatgccctcatcgctcagggcctggaagaacttggcggccagaccggcgtgggtcttcatgccgacacccaccacggctaccttgccgacgttggtgttcacatcaaaggagtggtaacccagcacttcctgcttgtcgagcagcgtgttctgcacctgcttgacggccgattcgggcacggtgaaggagatgtctgcagtgccaacggatgcgccggcctgcacgatcatgtccacgttcacgtcggcggtggccagctcggtgaacaccttggctgccatacccggctcgttcggcacgccacgcacggtggccagcgcctcggaacgatcgtgggcaatgccggagatcaccggtgcctcggggcccaggtcagggaacaggtcgcccatggatttcgcttcttcttcagtcatgtcttgccttgtcttggttgaaattacttacgattattgttcgctgtagccgcgctcagtcgaggttcggcagcgtgcgcgggtcaatgccgtcaggcacaaccagcgtgccggggcgacgggagaacgaagagcgcacatgcagcggcatgttgaaacgctgagcgtactctacgcagcgcagtgccagcaccttggagccgcaggaggccatttccagaatggcttcgtagccgatggaaggaatacggcgggcggaaggcacgatgcgcggatcggcggtaaagatgccgtccacgtcggtgtaaatctcgcagatgtcggcaccaagggccacagcgagtgccacggcggacgtgtccgaaccaccgcggccgagcgtggtggcgtcacccttggcgttgatgccctggaagccggcaacgatggcgatgtctcccaatgagagcgcgttcttcacgcggtccggtctcacggccttgatgtgggccgcgccgtaacgggtgtcggtgaagaagccggcctgctgaccggtgaaggagtgggcgcggctgccttcggcgtgaatggccatggccagcaggctcatggaaattcgctcgcctgcagtcatcagcatatccatctcgcgctcgggcgggttggagtcgatgctcagcgcctgatcgataaggtcatcggtggtatcgcccatggcggagaccaccacggccaccttattgcccttcttctccgtctccacaacgcgcttggccacacgtttgatcgaatcggtatcggcgaccgacgagccgccgtacttctgcacgatgagagccactgctgtcctttgttcttctcttagggatttgtttggtcgatattctacgcaaacgcaacgattataagggctgtcgcgttcaccccgcgaccccgcgccggcatgcggacacgggtatggcctacgttgttcagcaaatattcaagttttcaccggtggttctttgagacagccgcatccatcctttgagattcgagcggttaactatcaattaccggcaaacgaaagcaaaccggcgaggtttccgcagaaccccataactgaataccttgtcatgggcgaaactttgggctacaaagtggaccgcatttcggtgattttgccggatgacacgtcgaagctcaagattgtgccgggtgaggaccgtgtcaccttgatgacctgtacgccatacggcgtgaacacgcatcgactgcttgtctccgggcaccgcgtggcaattccgatgccggcccccgagccgaatgacgtgcttgacgcgcgcaatatcgcccttggtgttggtctgggcatactggcggcaggactgttcattatctggttggcacgacggcacaaggccgcgcgcatcatccgccacggcgcattctggccgtggatgcgccgcaagggcgaaagcgccaatgatacgctggcctaggcctcacgccgaccggccagcgccctgcccagcgtgatttcgtcggcgtactccaagtcggagcccaccggcaggccgctggcaagtcgggtgaccttgacacctacgggtcgcaatagctgggtcaagtagctggtggtggcctcgccttcaatattcgggtcgagcgccataatgacttccttgacctcatcgccttctaagcgtttgagcagactgggaatacgcaggtcggcagggccaacgttggccattgggttgattgcgccgccgagcacatggtataggccgcggtattcgcgcgtgcgctcgatgctcatcacgtccttgggctcttcaaccacgcagatcaccgaacggtcgcgtctcgggtcggcgcataccgggcaggggctggattcacacacgttgccgcaaatatcacagaagcggatcttggccttgacctcctcgatggcctcggccaaatcgcgcgcttcatcttcgggcgcggacagcatgtagaaggcgatacgctgcgcgcccttcggcccgatgccgggcagccgcccgaaagcgtcgatcagtcgctgtattgcgccgtcataagcaagtgccatgggtattcctcgttattcgtcctcattattcatccgagtgcttcttggcaggctggatgttcttggggttcttcggatcatctgccgcgaattgctcgacttttttgacctcgaatagctttttcagatcgtcaagattcatggccgtcgcctcgccgagcgactggtcgttcatcgagtattcgtcgtcctcggccgcgacttgcggttgcggctgcggctggctattccacgggtcggcattcggcgtcggctgtgcgggctgcggttgattccacgggtcatcgccggcagccggctgcggaaccgattggggctggttccacgggtcatcgcccgacatattgcccgacatattgcccgacactgtctgaggaaccgaagaagccggagtctgggactgcggctgattccacgggtcgtctcctggctgcggagccgcctgagcatggttcccctgcggctgattccacggatcatcgtgaggagactgctgatatggctggttccacgggtcggcttcgaccggttgcagtgccagcgaggccgtagcctgagattgcggctgattccatggatcatcgcttgcgccggcaactgccgtagcgggagctgcggtggctggctgccccgtggactgtccagtgggtccagcggacgcaacggacgcagcgggtgcaacaggagcagccggagcggcccacggatcaacaccatcactgatgtccggaaccgcaacatgcttcttgtgatgctcttcgggcgcaggcgcagcagcgggctcgttaggtgcgaacccgtctgcagattgcggtgaagcgttgcttacggccggcttggcccaagggtcatcgtcactccagctcttcgccgccgtggatgcactggattggccggctcgatggctgtcgtccgtatcctcggcttggcctgttgcagtcggcttcggagctttcggctcgctccccatatgaatgcccagacccgcgcccaaactcgacgcggccaatccggccttggccatggcaatctgctgcttgaccttggccaattgctccgggctcatacgtttgacggattcgactcgctcgccattcgccgcgaccgcagaaggtgcaataaccgcattggcaccgaactcgttgcgcacggcatccaacaccacggacgccgccttcttaccgctgttgtccacggccaaggcgaaagcgtgctggctcagcgacttgtcgaacgtcatcgacaggcaaggcagactcttacggttgggaccgaattttacggtcggcaccttgtctcgtgacacatattcacgaatggtttccggcaaagcggcgacggctgcatcccacttctcgtcgatggaccgattatccgatgccgcaggcgaggtcaccggttgggccgggacggccggcgacgtggcgggagcaccccaggcattggcagcagcagttgctgcggcaggttgcgcagacggagagcccgcgggccggtcgctgactgggctgctgacagggccattgtctcccacagcggattcatgggaagcggtgctctgaggcgcggctgcttgctggttgcgtgcagcaccggagaatccaccatgtgaggctccggcaaacccgcctcgcgatgcgccggcaaaaccactggcacccgtaccggaagcggctgacgtagtcgaagtcgaagaagcagccgcaggcggcatgccagaagaagctggcgcgggagcggctgttgcaaagcctgattcactgccggccaacaatcgtccggccagcagttccaagcgcatacgcggagaaatggctccggtcatggcacccaacgtagtgttgatgatgtctgccatggcggtcagtgcgcccagtcccagcgccttggcttggcggtgcagatcgtccatatcctcggcctcagccgtgtcggacagcacggattccgcacggtccccggccaacgtaagcaccagcagatcacgcacacgagccagcaggtcttcgacgaatcgtctcggatcgaatccgccgaccacgactttctggataacgccgtacagggcttcgccgttgtgattgattaccgcatccactgcctcaccgatcagcgcctccggcgtgaagccgagcagggctacagcggcatcatgggtgataacgccttcgaccgaaccaaccatcagctggtcaagcacagacagggtatctcgcatggagccgccaccggcgcgcatcgccagtttcagcacaccgggctcgggcttgatgccttccttgtcgcagatcgtctccaggtagggacccatgacttcctgcggcaccagacggaacggatagtggtgggtgcgcgaacggatggtgccgatcaccttgtctggttcggtggtggcgaagatgaacatcacatgttcaggcggctcttcaacgattttaagcagcgcattgaagccctgctgcgtgaccatatgggcctcatcgagaatgaaaatcttatagcggtcgcgcgcaggggcgaaaccagcgcgttctcgcaattctcgagcatcatccacaccgttgtgcgaggccgcatcgatttcgaccacgtcgatggaacccggaccgccggtggccaggtccttgcagctttcgcattcgccgcaggggtgggaagtcggccctttggcacagttgacgcaacgggccaggatacgcgcggagctggttttaccgcatcctcgcggccctgagaacagataggcatgcgtaagcttgccttcgtccaaggcgcgcatcagcgggaccgtgacttggtcctggccgatgaccccttcgaaggtgtccggacgatagcgacgatacagtgcaagtgccatagctactaacctacctttgccctcagaattaaccgataaaaagtcaagataaaccgggctcatagctgccgaatcgggaaaactctttatattccaacgacattcatctgacaacggttaccgcatttttattgttattaaccgctttctttgtattaacatagtgtcaataacggttgtagtcaggaggtgcccatgagcgatatcctcgacgagaaacgccccacccgtggcgatgcccggcgcgacgccatcgtgcaagccgcgcgcaaggtgtgtctggaaaaaggcttctccaaaatcaccgtttccgacatcgcaagcgaagtcggtatgacgcgttcgctgttctaccactacttcgaagacaaggaagccgtagccgacgcagtactcgatgacgtcatcgacgaaatcctcaccacgttgaagcagtggaaccaagcgcgcgaaacaggcaacgtgaacaaggcattagacgacatcgtgcatgtgctccgttccctaatcgccgacgagagccccttctcaaaccgtatgatccaagatggcaacgccgaactgtatatcaagttcattgaccgcgcggcggaccgtattgccgactacattgcccagaccaccgtacgtgatttcgagcagatgcatggtctgccaatcaccaacgtccatgagacattcttcacgctaatcgtggggcttatctcgctggttcgctcgcatccgaacatcagcgaccgaaccatcaaagaggtcatggcgcagacgctgcatatcgaaagctatgtcgtctgaggtctgacggccattggctctggtaccgctctcccgcactcccctcagtccgcttcgcggccagctcgtccgcaattgcggacagcctacggctgactttcttctggttcgactatcgtcgaaccctcgcctacaaacatcccactgggctgtttgctttacggctcagcctaatgaggggagccaatataatcaggtcaggcgaactggccggttacggggtcgcgaccgtctcgggcgatggcgtcgagcacttcctgtcgggagtccacctcacgggcggctacggccggcggtaccagcacgcgtagcgcgcagtcctcggccactaccctgaatggcagatgcccgatgtattcgccgtccgccatcagcaccggtggctcgtcgccttctgcggctcgcgtgacttcgatctcgcgtatgcgcttccacccgaacacctttgaggcgagcagcttgccgttataggcgttcgagatggccaccgcacattcgccgaagttcggcacatgattcatccacaccaggtccaacagcccgtcggagaagcaggagtacggtgagacctcgatgccgccaccgatatgacgcgaattcgcaatcgtcagcaacggcgtgatgatgtctcgttcatccgtggtaccgtccgccagcgtggccttgacgtggtacccataacgcttcatatgcgtcagctccaccagcaccgccgcaaagtagcgcatggtgccggtcggcagatgcgaatgattcgcacggtcgttgatacttgcgtcaagaccacaggacagcatgcccgcatagtaccggtcaatcgggtgctcggcagacttgttctcccggtactcgtattccccgccggtggatgggttcacggcatagccaccatccaaagaggtcacgcgtcccatgtccacatcaatgtgtgatccgcgcacgatagcgccgacgataccttccactgcggtttcgatgcgattgaccggcagcttaagtccccgagcgaaatcgttgcccgagcccatggccacgatgcccagcggcttaccgccgcaacccacggcattggcaccgagtgcgatcatgccgtcgccgccgaccaccaccagatagtcgtactcgtgcgcgcgttcacgcgcctggttcagggaatcgtcgaaacttacgccggtgatgtcgatgacgtcgaagttatgggcacggccggcgtcctccagcagtcccaatactcgcgcatccaccttggcaccacggcccttatcggaagtgggattgcccaccatggccaccacgcgacggcgttctgtgcgttcactctcgctcatgctctcaccttaaccaaaggtccagaagcccgccagagcatcagtgcttacggtccattattgtgataattgtctccttccgtacaattcaccggtccggcccgagccatccgctccacggatgatgccaccggaaccatggtttccaccttgatggttaccaacacgtcttcatcccgcacggagcaggagcccagcgtgacgccattcgcttcagccatgtttgcagcaagcgcgcatggatcaccgatatccacatgccacagcgcatacgcggcgtcaaaggcgatgagatcggcgagggaacgcgctcgattctggcagatcatgaggttgcccgcacttgccgccaccgcgagcgcaatgcccaccgccataaccagcatggctccggccatcgtgcccgatccctcctcataacgcattccctgcaccgcagttcctttctattgcggccgcccagccagcagccgaccagttattggcttatcgccgtagcgttgccggtgacccgcgttggagtgacatccagtgggccgggcagtaccgaacattcgaccatcacgctcgtcgattggccgttgtgggcaatgctgacgcggggatctccccctgcaacgtccgcagctatgctgcgcgcggatgattcgtcaccggtaaccacaaactcgcgtgcagccgccgtcgcggcactttggcagtccatggaaacgatgaccacacgtcccattgccagtatcagcccggcgatggcgataacgctgggcaatacgatcgcgaattcggcggtggccgatcccgtgcataggtctggcggcagtctggcgagcctccaccggcatctcatggtcttcatggctgtcacccgactttcagagcctgtttgatgatgttggtcagcaacgtcttgatggcatccgacttcaggatggcgaccagcaccgccgcaaagcctgtagccgcaacgagtacgactgcgtattccgcagtggctgcgccttcttcgggctcagccatgagggcgcggatgcgtgcgtccatgaggcatagccgttctttcgccttggcgttcagcgtggccacacgagccttgctgtgcgcaaagatgccggcctgcccgtcgacgatgacggggataggggtattcattggcgttcctttcggtaaggaggggaagctgcgcagtggcttcgcaccttccccatgcgtatgtgagtggttggcccccgcgccgggttgacgcggggtgcataccactgtggactatcaacgcttcatgcaccaggaaaaacggggtatgtggttctagcttgccgagttatccacacctcgacgtgtcgtccaccacaaatgtggataaccaaacgcagccaagtacaataccgagcaatacaacaagattcagcctaagcgcactcggttcacgcctatattcacatcgtgaaggacgcaatcgccggaatgactcctaccagcacgaatgccggcagaaaacatagccctgtaggcatcagtagctttaccgacagcttcgcggcattccgttcgatagcagcacgctcgtcacggtccagctgttcaatggcggattcgaggcgcacaccaggcatatcgccatgcgtccatgacgattccaaagccgattgcagcaggccaagatctcgttgcgtggtattcgtatttcccttggatggactatcagctggcgcaccctcatgctgaacagccatagcggcatgccacgcatcagcccagggaacccctctggtcagggagttcccgacctcgctcatgcgagcgccgcagtcgccgccgacggctttgcccaccatgtcaagcgcccggggaatcgaggagccctgacgcaaggacacctgcaacatacgcaatatgagtatggtccatgacgacccgcaatcatgcgctacggccggctcctcgcccggcaagcggctgtcatgacgagacagagccttatacagccaaccagcaatcgccgcacagcctgccgcggcgtgtacccacaccgtactcataatccgctgcctttcaacaatgcccgcatccatgccaagccggcagcataacaacatcctcccaatgtcaagcagaccacaccgcgtggcgatccaagcaagaacgccaatggtctagctcccagaagctcgcccaatgccacagtgacggccggaagcgcgctcagcagccccacagtggctttaggaacggcacatgcttgcgatcgcaagttctgcatcagcctcatctgccggtaagcagtcaataccgcttccagacatggcaccgcttggcaaccgagctcatcgctcaaaaccgctgcggcggcgaccccgcgtgcagcttcaagtacctgcgctggtgattcgtcgggcagacgccgctgttcgaacaccgttatgagccgttccacagtaatgcgatgagtggcgaagcgtctgctggattgttcctcgaatgcttcaaccaatgtgccgccacctcgcaatcgcgcgatggcggacgtaatcacctgcgcaacgcccacgcgaggtgagtcggcatatcgaggttcgtttatggctgcggaatcgaccgcgcgcccgcggtaagccagccggtacagcctcccggacttgttccccggccatatcagcacggcgagcgccaccagaacagcacaccacatcatcacccaccaccactcggcctgggaacgatgccccatcgttcaatgaagtgcccccattcggcggcataccgaggaggatggcagccattccataccgccagcggtgttcctgccagttcaccatgtgctacgcgcagttcgccgatctgcgtgatacgccgctgtccgttcactcgctccaaatgcaccaccgcgtcgaaagcgcctgccgccagcatggtcaacgcctgtggactgactccggcgagtaatccaagcgaaatcagcctggacggtactcggttcacgccgtccgcatgcacggtggtcatgccaccgtgatgaccagaattgaacgcgcgcaataggtcgacgatttccgcgccacggcattcgcccagcaccacgcggtcggggcgcattcgcaacgtcgctttgaccaagtccgccaggcttatggctccgacgccctccacattcgcctcgcgtgttaccaacgagacatgatcgtcgcgtcccagttcccccagttcacgaacttcctctacggtgacgatgcgctcgttcacgtcgcattgcgccagcagcgccttgagcaaggtggtcttgcccacgcctgttccgccggtaatcagcactgtggcatgtttgcgcaccaatcccacgaacgtcggcagccaagcagccgggaatacgcctaatttgctcaggtgctgtagcgatgccatggttcggtcagggaatcgtatggaaatcgcggcaccttgtggcaccaatggggcaatcaccgcatgcacgcggatgccatccggactggcggcatccgctatcgggcaggcatcatccagtctgcgcccgagctgcgcgcacagttggacggcgtattctcgaactacttgcggcgagcggaacggcacatgcaatactgtttcgcgcatgccattgccgcggtccgcccaaacgcggccatcacaggtcaccgccaaatcggtaacctgcgggtcagatgccacgtcatccagcagaccgaagaatatggttctgagcgctgtgccagcctcattggctcgcgtgctgacggcagccatagcatcactggtccttgtgagaagctcccgaaaccgggcgaatggcctgttctacgagatcggcaagcaagttcatggctttgcgactgcctttggtcaccgatctgatgccgaggccttccagtacgtctccgcacagattgacacttggcttgatgggccccaataccgtggcagtcaaatagtcctgcgcctcgccaatacccacgtggcctctcccacgtggagcgccacgtggttccacacctacgatatgtggcgcttcacagccccatgaatccaatctggaccggtgcgacttggctctggccagccccattaccgacaattccgcggcaatcacctgcaggccactgcgcagatcgggtacggtctcaatgagtccaccctgaccggcatctacgatgacaacgtcgttcgtttccgccaaagcccgaatggccgcttgaacttcccaccagtcaggctggcgcgcgctccaagggtcatagggaagtactcgcacaccctcccacatcatcagctcatggttcatcgcctcaccctcgatacggccgaggggcgcgtcgacttggctgaaccgcaagcccggctctcgttctacaccaagcagcaggtcaaggcatccggccacgaaatcagcgtctatgagaacgcagctgtgttcacgtctcgccaatgtccatgcaagcatggaagccatgacactcaaccccacgcctccatgacctgacgtcatcgttacaatgttatggaagctggtgtctgtagttagggcgagtgccggagcctcgcccgatctctgccgttcgcatgaggccaacggcctgggcggcggagtgtagtagcgatacgctggaattggcgcatcgtccgtgggcagcggaatgcccggaggtgctaccgctggcgaggtgatcctacgcgccacgcggggtgtggtgttgctattcataagccgattgaaacgtgtccgagttcaatgctcaacacgaatcgaccattgtggttctagcttgctgagttatccacaccccggcatgtcgtccacgacaaatgtggataaccacgctgctgtttcacgcccatctcatgcagaaaaggccctgacctcacatgcacagtcagggccttcattttcatgacgattccttatgcggtaatctacatttcttgcttacttatcgaggttcttaatgccgtcttccatagcatccaactgagcatcggtcaccttggccggcttcttcttgccgaacttggccttgagcagaccgatgatggtcggggcgagcgagaccagcagaatcagcacgatcaccagctcgaagtggtcctgtactgccggaatgttaccgaagaagtagcccagcagcgtgaacaacgtggaccagcacaggccgccgagcactgagaacggcgtgaaacggctccaacgcataccggaaataccggagatgaacggcatgaacgtacgaatgaacgggaagaaacggcccaggaacacggccagcgggccccacttctcaatcatgtgctcggttttggccaaacgctccggggtcaaggccttcaccttgccggactggatgatgcgacggccgaagaaatgaccaatgaagtaattgcactggtcgccgataatcggggcgcaccagaccaccggcagcagccagaacagcggcagcgcggccttgccggtcgcggcatcgggagcggcgaacacaccggcggcgaacagcagggagtcgcccggcaggaatgggaagaacaccacacccgtttcgataaatacgatgaggaagatgaagccgagggtcggcgccacgcccatggcaatccaaccggcaatcgcggcacgcggatccttcagcagttcgaggatgaaattaacgaagcccatgtgattcctatgagtcctatacgtctatatgtgtgaacaatctgtccaataaccagacattcgtctgaaaaccgtcaaccactctaccagtcgccccgatacaagagggggccaccggaacctcatagcagccattactgccatcttctttacaaatatggcgtgcttcgctggtatatcgtcaacacattccaccgctcatgaggagaactgcatgcgcggtgatgtaatcaattactcaccaagacgctggcgcacgaaaccgtccagcgcggccgcatcgataccgtcatacgattcgatggacgcgaactggcccaggccggaagtatccgtgcgaatccagccagtctgcgcgatcagagtcgcgcccgatgccgcaccggcctgaagtccaaccgaggaatcctcgagcaccacgcacttggccatgtcttcacgggcgatgccaagcttgtcggctgcggccagatagggcgcagggttcggcttgtgttcgtacggatcgtcgccacagacgtagccggcgaacagtccctcggactgcttcatgatgttctccgccatacggcgcggcgacgtggtgaccagcatggacggaatgccggcctccttgagcgagtgcagcacgtccaatacgccgggaatccacggcagacgttcgacctccgccttgaacacataatccttgagctgtttgtcgatttcgggaacgctcaatgtgcagccatgcgcaatcatgacctctgccacgtgtggcaccggagtgccggagcactcccaaccgaggtcctcgttccactcgccgccattgttgtgcgcgatctcgatttcaccgtcatgccaaagcggctccgaatcgataagcgttccgtccaaatcccaaaacacggccttgagcagcatggttacctccgtacgtcgcagtgaatcctcaactattcgtattcgatatacctatctcaccaactccgcacgacagccgaacagcaaatcaccaaccccacaggaccatggatttggaatcggcgggggtggagtcggattcgcgcgtggtgtcggcagcggtatcgcggccgggcagttcgcgggtttcgcggcggatggcgttgcgccagaggcgggcgcggttggagcgttgtacctccacgatattgccgtcacggcctgcggcgaaaacgctctcctggtcgccggtttgcatgcgtttgacttcgcggcgcagttggcgattctcttcttcgagggccaaaatgcgtgcgatgccggaaagattgatgccctcatcctgacttaggcgctgagctcgagtcaggcgggcgatgtcgcgcaggcagtagcggcgtgcgccgccatcggtgcgctgcggacggaccagacccagccggtcgtactggcggagggtctgggggtggatgttgcccagttcggctgcctggccgacggtgaagatgggcagttcgatgtcgaagccgacgtcatcggctccgtcgagatcggccctgcccatcaccagcgcggttgcgcacatcgcgtacaactgcttcatttggttggctaaccgcgccattgttcacctcctgattacaggctgagatagtcgccggctttttcgtcgaattctttggcggcgtgcttgacggccagacccggcttggcggggaccatgatctgcacgcggccgatcaggtcgcccggctggttgccgcgctggacgccaagtcccgcgagcttgacctcagcaccggagctggagcctgccggcaccctgaaggtgacgggattgccgtcgatatccttggcctcgaccttgccaccggccacggcctggcccacggtgacgggcaggtccatgacgatgtcgtggccgcgcatcgagaacgcggcatcgggcttgacggtgacgtgcaggtacaaatcgccggccttgccgccgttgatgcccggcttgcccttgccggcaagcttgattttctggccgtccttgacgcccgcaggcacgtgggccttgaacttcttgccgtccacggacagggacacggtagcgcccttgaccgcctgacgcagggtcaggctgatcttggagttgcggtcctcgccgttttcggggcgcggggtctcctcatagccatagccgccggcattgccgtacggcgattggccgtagccgccatatgactggccgccctgacctgcagcaccgccgaacatcgagaagatgtcgttgatgttgttggggccgccgcccgaagtggagaagcggatacgcgaaccgttgccaccggcaccctggccaaacatggagccgaagatatcagagaaaccggaagcgtcgaagccgccggcgccggaaccgccggcgaagcgggcgccgcccatgccgaactggcgaatcgcgtcgtacttttggcgatcttccttcttgctcagcacgtcgtaggcttcggagatgtccttgaacttctcctcggcttccttggtcttgttgacgtcagggtggtacttgcgggcgagcttgcggtacgcctttttgatgtcgtcgtccgaagcgtccttggagacaccaaggactttgtagaagtctttactgagccattcgttttcagccattcatgtctcctttcttgaagagtctttatggttggctcccgctggatgaacagcccagtgggctgttcatagcagtgcgcaattgcgcacgtcgcataaaacatcgggagctgtcgaacgaaacgagactgagggtggtttatattcagtgtttgaccaccctcagtcagccttcggctgccagctcccgccagcgggagccaaggtaatgtcagctcgttaacgagctggccgttatcagttttgcggggaggctactactactcgggcggcgcggattacgcggtcgccgatacggtagccggcttccaccacggtgtcgacggtttccttgtcggcatcggcatccggcttgtgcaggattgcctcatgcttggtggggtcgaagtcctcgcccttttcgccgaacttctcgacgccgaacttctcgaaagccttgtcgatcttggcggcaacggccttgaacgagtcgtccatctcgctgtgttcgcgaatgcggtcgatgtcgtcgagggcgggcagcagcgcggtcagcacgtcgatgatgccgtgctggcggaagcgctcctgctccttctgcgtgcgattgcggtagttgatgaactccgcacgttcgcgttgcagggcttcgaggtagtctgcggcttccttcttggccttgccgaggggggtgagggtgtcttcggaatcggactggccttcgccagtcttctctccggcatccgacttctctccctcagctgcggcaggagccgcgtcggctccttcattggaaggagcctgggcagccgaatcctgcgcagagtcggactcggcggaggcgtcagcccctgaagaggcctgagcggcctggccggcagcctcagcatctgagggatccggcaggtcgttcaggtagtcgtccttgttgaactcggacatcacttgttgtccttgtcgtcatcgtcgtccacgacctcggcctcgacggtgtcgtcgtcggaaccggaggcggagccagcggaagcgccggcaccgtcagcgccagccgcaccggcaccagccgcggcaccctcggcaccctgctgggcgtagaggacctggccgatcttctgggcggcggtcatcagctcggtctgagcagtcttgaccttctcggtgtcgtcacccttcagggcttccttcagagcgttgaccttgtcggtgacttccttgacgatgtcgtcggagagcttgtccttgttgtcgttgacgagcttctcggtggagtaggcgaaggcctcagcctggttgcgggtctcggcgtcttccttgcgctgcttgtcctcagcctcgtgagcctcggcttccttgaccatgcggtcgatctcgtccttcggcaggccggaaccaccggtgatggtcatggactgctccttgccggtgcccttgtccttggcggacacgtgcacgatgccgttggcgtcgatgtcgcacaccgagatgccggcatcgtgcagcacgttgttgaacggcgtgcggcagcggcccagcaggtcggaggtcatctcctcgaagtgcgcacgggtcagagcctcatccaggtgcaccggggtgccgtcgggggtcatggccaggtactgcatggaaatgctggtggaagaggaggaggagagttccttcttcgcctgctcggcggcttccttcaggcgctgcagcgcgatcttgtccttggacaggtcgacgccgtacttgttcttgacttcggaaaccagccaatcgatgatcttctgatcccagtcatcgccaccgaggtggttgtcgccgttggtggcctgaacctgaatggtggagaagccgtcgtcatccttgccgatctccagcagggagacatcgaaggtgccgccgccgaggtcgaagaccaggatgcgctcgtcttccttgcctttctcaaggccgtaggccagagcggctgcggtcggctcgttgatgatacgcaggacgttcaggccggcgatcttgccggcgtccttggtggcctgacgctgggcatcgttgaagtatgccgggcaggtgatgacggcgtcggtgacgggctcgccgaggtatgcctcggcgtccctcttcagcttcatcaggatctgcgcggaaatctcctgcggggtccacttcttgccgtcaatgtcgacggtccaatcggtgcccatgtggcgcttgacggaggagatggtgcggtcaacgttggtcacggcctgacgcttggccacttcgccgacgaggatctcgccggacttggagaaagccaccacggacggcgtggtacgggcgccttcggcgttgacgataacggtgggctcgccaccttcaagagttgcgatgcaggaattcgtggttcccagatcgataccaactgcgcgtgccataatgtgtgctcctttgtgggacttgcgattgcccggccggcgccgccgttcgccacgacctgttcgggttgtgacgcgcggtgtgcgcgagccgtctcgcacgtgttcattctttcgtttttcgcccgggtttcggtcggttccttgtgcggttcctctcggttgtggggtttgcgttcgcaaccgcccattcccgtgcttccgaaacttgagcctacaccactcaactttaaaccgcaagtgcatattcccgaattcggcaaaaaacttgagcgattctcactcaggtttttgcgaagcgcggcacacggcacgtatcgcatcacagccaaaagccgccggaaaaccatcgcccgccgggcatcggctcggcgggcgatggttttccggcggctggacgactcgggattaccggtcggccaaggccgaatcaattgttcctggcgttacgcgcggccttgatgagcatcgcaatcgcaaccagcatcacagccgcgatggcgatggccataacggcggtaccggtggcgcccaacggaccggagaccgcggaatcgtccggcaccttgcccgaagcgatcacgccgttcttgtcggcgcccggcttcttgtcggcggagccggcggccggcgcctggatggcgacggtcgcgaccttgccggactggcgaccggtgacggtgagcgtgtactcggcgccttccgacatcttgtcgagcgcgatcgaagtggtctgcgcgggcttgacgcgcacgccggacaacggggtgctggaatcggacttggacaccacggcgccgtccttgtctttcagctcgtagctgagcagcgcgtcaccgttgaagccgtcgacattggcgacgtacttgccggcctgcgtacgggcgaccttcacggtgccgtccttggagagcgcgttctgctcgtcgggggaggtggccaggcccagggcaccggcgatggtgtagaagttatcggtctgatcggtcaggccgatgacgcgctgggcgccggggccggaagcggcgatgcgcagctgggtgccggtgtgctccatgtcgccgccgttgtagccgccttcggcgtcggtggaggcttcctgggcggtgccgtaggagacgaccatgttgttgccgtcggcggacttgagcacggtggacagcgcgtaggccggctgggcgttgaggacctgggaggtgtgcgcatgatcggcggtgacgatcaccagcgtgttcgtgaggtccacgttcttgatggcgtaggcgatggcctggtcgaagtcgtcggtctcgccgatctggccgcaggcgttggcgttgtggtcctgcttatcgatcgaagcgccttcgacctgcaggaggaagccgttcttctggccgttcgggttggcgttgagcagatcgagcgccttcttggtcatgtccttgagcgaggcgccacggttgccgagccaggcgtcattcggggtgcacacggtcgggttggcgtccttggccggatccttggcggtggccttggacgggttgaacttggtcggcatgttgccgtcgctcatcagggcgagcaccggctggccatccttgtactgcagggcgttcatcgcggccgggtcgttctcaacggtctggaagcccatgtccttggcctgctcccacacggtcttgcccttgtattcgccgccctgcacggtctggcggaagtacttggagccaccgccgatggtcacatcggcgcgggtgtcgagcagctgctcggagatggagccgatgccgccattctccttgagctggttggcgaggcactgtttggaggcgttgttggaagtgccgtcggtcttgccctgcgggccgtagcaggcgcgctcggtggagtgcgattccagcacggccggggtggcgtcctggatttccgcggtggacacgttgccggtggccttgccggcggccttggccagctcgaagagattcagctgcgggttgccgtagatgtcgacgtcgacggcgttgttgtaggtcttggtgccggtcgcccatgcggagccggacgcggaggaatcggtgacgggggtgagcttgcccgggttggggttggcgaccagcttgccggtgccatccttgccgacggcgctgtccttgctgccgtcgccgagcgaaaaggtcgtgtactggccggtgcccgcctgcacgtcgtcaagcgcgccgggctgaccgaccgcgtccagaccatcgaagtggccgttggcgcccttcagatagtcgcgggcgatggtgatttccgaatcgcccatgccgtcgccgatgaacagcacgacgttcttcgcgctcttgttgccgatggcggcgatgcgctgcgcggcgccgtgcttggcgagctcggcgaccgacttgccgttggggctgtaggtgccgttcgcggcatcgacagcaaacgccggagcggcgagcgcgccgagcgtcgcgatggaggcgatcgccgcgacggcgctcgtcaaaaccttgtgattgcccattgttcgtccttcttccatgcagtgtcatctgcgccgtccggcccgcactcctccggccgcacccgtttggccacgtccgtcgtcgtcacgccttccagcttcacggaaccgttccgcacctgcattgcttggatctttcgattccggatttcacggtaggcctcacaagccaacgtccggataccgccggaagaacgccggatgaacattcttcgtcgaatcgggccacggcatcatcgccgcatgaaccggcaagccatacacgatccgcacctggcagtacatgttctcgaaaatccgccccgaattccccgaggcggcgttcgtcgccgaatgtgggccgaccgaacgaatcgatgcaggccggattcgacatggacttctacctcgactggcgctgggacggccccccaacgctctccccgcagtcgttcgtcgtgctcggataacccgctaattgcccaactcaccgaatgtattgcaatcgttgtcaatatgagttacggtaaagatagaacagctcgaacattggtctgtcagattgccggaacctcaacgcagagcggccctcgaacagcaatgcaaacgactagcagtacccgatttgcaagcaaggagtcatcatgaccgacgcgtacggcaacgacgcagcgaccagcaccggcaccatcgcagacaccaccaacgacgccgcttccggtgccccgcagcgcgcggaaagcgcggaacgactcgcccgtccgctggtcaagctggccaaagcatgcgggctttccacctcgttcatcgaccagctcggcacctacaccgaaatcagcgacgaggccttggtcgccgtgctcaaggccctcgatgtggacgcctccagcgacgaggccataaaacgttccatgaccgaacttgaggccgaaaacagcaaacgtttgctaccacccaccatcgtggccaccaccggcaagccgacaagcctgaccctgaattgcccgtcggacgcggacatcaccgcctccatcgagctggaggacggcaccgcgtttggccactttgccctgctgccgaacctcaattccggcaagccggacttgaccatcgcccccgatctgccgatgggctaccacacactgaccgtcacggcggacgggcgcgagggcaaggcggccatcatcgccgcccccgcgcgcattcccgtgccggaggcggtcgccgagcaccagcggtggggctggatgacgcagatgtattccgtgcggtcccgcgaatcgtggggcatcggcgattacggcgatctgaagctgctgctggcggacgcggctgacaagtccaaagccgacttcatgctcatcaacccgattcacgccggcgcgccgattccgccgcttgagccatcgccgtatctaccggaatcgcgccgattcctcaacgtgacgtacatccgcccgcaggacatccccgaatacggcacgctgccggccgatatccgagcgcaggtggatgcgctgcatgattcagtggccgcacgcaacgacgaatcgaacccgatggacatcaacgcggcgtgggcggccaaacgcccggcgctgcgcctgatcttcgacgcgggccgcaacaacaagcgcgagctcgaattcgagcatttcaagaccaccgccggcccagacctcgattccttcgccacctggtgcctgtgcttcgaggtatggggcgcgccgtggggcgagaaccgttggttcttcgagaagaccatcgacgacccggccgtgcgccagctcgtcgaggagcaccacgacctgttcgagttcaaccgctggctgcagtggattgccgccgagcaggtgaacgccgcgcagcaggaggcgctggaccacggcatgacactgggtctgatgcaagacatggccgtgggcgtgcacgggctcggcgcggatgcctgggccaatccggaacgcttcgcctccggcggcgtcacggtcggctgcccgccggacttctataaccagcagggccaggattggggccagccgccgttcagcccacgctatctggaggccaccggctaccaggtgtaccgcgagatggtgcattcgatgtacgagcacgcgggcgcggtgcgcatcgaccatgtgctgggcctgttccgcctgtggtggattccgcaggggctcggcgccctcaacggcgcatacgtaacgtacaaccacgaagcgatgctgggagtactggccatcgaagccacgcgcgccggaggcatggtggttggcgaggatctgggcaccgtgccggattacgtgcgccgcattctggcagatcacggcgtactcggcactgacgtggaatggttcaaccgcgtggacgattcgccgaacgccggcgacccgtaccgcgcacccgaggactaccgcaagcaggcattggcctcggtgaccacgcacgatctgccacccaccgccggctacctgaacttcgaacacgtcaagctgcgcgaggagctgcatctcctgagcgagccggtggaggcgttcgccgcctcggcgatgaccgaacgcacggccatgatgaaccgtctggtggagaacggctatatctcacagaccgtggcggatgatgtggaaggccatgtgcaggagatcgtggaagcgatgcacgccatgctcaccgatacgccgtcgctgctgctgcaggcagcgctggtggacggcgtgggcgaatgccgttcccagaatcagccgggcacttccagcgagtattcgaactggcgcgtgccgctggcggacagctcaggccacgtggtgcataccgacgaggtcttcgacctgccacgcgtgcagtccctagccgccgtgatgcgccgagagaagcggtgatcgattccgcaatgggaaattggtctaaatcggcttcgaggggctgatttggcctttcccggacatctacttccgtttcaaggggctggtgcccaagtagacccaacgcgagaacggcggaatgacgttggcacaaagtcgtttgcacttgtggcttcaccggcaaggagccccttgaaacggaagtagatgtccgggacaccctaaatcagcccctcgtaatcgagatagccgaagacgacgacttgttatgggcatgttatcgttgtcatgacaatgattgttcgcgacggcgaaggagcgacggcatatgaccaaggcaagcattcaggcagtggcccgcgaggccggcgtttccgtatccacggtgtcccggaccttcgccaagccggatctggtgcttcccgagactcgagaccgagtgatggccgcggccgaaaagctcgactactcagtctcacgctcggccgccgccctaaaatccggccaatcgttccgtatcgcactacttgccagcgagaccatcgccagttggttcaattcgaacatcttcgccggccttgactcggcgctgcgcccctccggctacgacactgtgccctaccccatgcgcaacgccgccgagcgccacgacttctttgcggatttgcccgtgcggcgcaatgcggatgcggtgattgtcagctccttcgacatcgaaccggctgaagtggagcgactgaagcatatgcacgtgccgattgtcggcatcaacatcccctccaccgatgggttcgacgcaggcgtgagcattgatgattacgccgccacacgttcggctatcgagcacctgattgcactcggccaccggcatatcgcgttcgtcggcagcgcaccgaccgaaaccaatatgcgctacagtgccgaggctcgtttgcagggcgtcattgatgccgctgccgcccatccggggatcgagctaacgcccctgagcattcaacgcggtcttggcgaaagcaacgcggcattgaacgccgtactgaacgcctcccccagcatcaccgccttctgttttgaggatgatgaaatggccgcgcccgtgctgtatcgcctgcgtcaatacgggcggcgggtacctcaggacatttccatcatcggcttcgacgattccaccctgtccgccgccgtgggactgaccacgctgcatcaggacccgttcgcaatgggcgcgactgccgggcacatggtattggatgccattgccggcaagtcaatcgaaccggcattcgtacggccggacactccgctaatactgcgcgaaaccaccgcgccgcctgccgcgacagcagcgcccgcgcaggcgtgagcacgttaccaccgcaaaacgccgataaatcgatttttgcatgcgtaattcacatgatatcgttgtcatcatcaatacaacggtcgggccttcacacagcagttcgggcgcgaccggaacaacccaaccacaacgcacccggaacaggagggaatcggcatgaccgcaaataacctcaatgacgactggtggaagcaggccgtcgtttaccagatttacccgcgcagcttcaaagacgttaacggcgacggcatcggcgacatcgccggcgtcaccgagaagatggactacctgaagagcctcggcgtggacgccatctggctttccccgttctacccctccgatctggcggacggcggctacgacgtaatcgactaccgcaacgtcgacccgcgcctaggcaccatggaagacttcgacgcgatggccaaggccgcgcacgaggccggcatcaaggtgatcgtggacatcgtgcccaaccacaccgctgacaagcacgtgttcttccaggaggccctcgccgccgagcctggctccccggcgcgcgaccgctacatcttccgcgacggccgcggcgagcatggcgaactgcccccgaacgactggcaatccttcttcggcggtccggcctgggcgcgcgtggccgacggccagtggtatctgcacctgttcgataaggcgcagccggacgtcaactggaagaatccggacatccacgaggagttcaagaagaccctgcgtttctggtccgaccacggcaccgacggcttccgcatcgacgtggcgcacggtctggccaaggacctcgaatccaagccgttggaagagctcggccgcgaatacagcgtggtcggcgtgctgaatcatggcttcagccacccgctgttcgaccgtcgcgaggtgcacgatatctaccgcgaatggcgcaaggtgttcaacgagtacaacccgccgcgctttgccgtggccgaggcgtgggtggtgcccgagcaccagcacctgtacgcttcgatggacgagctgggccagtccttcaacttcgacttcgcgcaagccaactggtatgccgacgagttccgcgaggccatcgccgccggactcaaggcggcggccgaaaccggcggttccaccaccacgtgggtcatgaacaatcacgatgtgccgcgcagcccctcccgttacggcctgccgcagatcaagggcgcgccctaccaccagctgccgcacgactggctgctgcgcaacggcactacctatcccgaggatcgcgagcttggcacccgccgcgcccgcgccgccgctttgatggagctcggcctgcccggtgccgcctatatctatcagggcgaggagctgggcctgtttgaagtggccgatattccgtgggatcacttggaggatccgaccgctttccacactgctcaggccacgatggacaagggccgcgacggctgccgcgtgccactgccgtggaccgccgccgatgagccggccttggccgacttcagccgtccgactccggccgatgacggtaccggcgagaaccatgtgccgctgtgcgccgccggccagttcggcacgggcgcttccttcggcttctcgccggctacgcgcgctgagggcgtgacgccggccgccgacccgcacctgccgcaaccgctgtggttcaaggattacgcggtggacgtggagcaagccgacccggactcgatgctcgcgctgtatcgcgccgcactggcgattcgccaggagtcgctgaccgccacgcgcgacaccacggccgagcaggtggacatgggcgacgatgtggtggcgtacacccgcgcggcggttggcgggcgggtgttcacctcaatcaccaacttcggcaatgctccggtcgcgctgcccgatggctccgtggtgctggcgtccggcccgctgacccccgaaggccagctccccaccgacacttctgcgtgggttgttcagtagtgcttttgcgagcttacccgacgccagtcatccatcttctccggatgctggcgtcgtcctttttcccggctaagctgtctccatttcggggatgactgccctttctttccattcgcgacatgccaaccccgaaatacttaataatattctatatacttaacaagagatgtgaatcttacagattttcgttaaggattgaggtcgacatggatgccgagcattacattcgcgagacacttggtctgccctgccaaatcacttcttgggatggcactgcctcactgccgctatttctgaccaacggacggacattcagcaaactcaccatcgacaacacgagcatgctaatcgcgagcggagaggctcacccattcagcatcacacgcgtcaccgccgacgccagcaggcttgagcagcggacggatctgcccattgtctttcagtttccccggctttctgcataccagcgaaaagccctgattcagaatcacgttcctttcatcgtgcccggtacccaactgtatatcccttcactgggcatggtgttcacccagcgcatctcctcacggccgctggagaacgcacaggatatcgaggtgcgacccttctcccccgcaacacagctggtctggctgtatttgctctactccaacgagagcaaagtccaatcagatattgcccgagcgcttcagtttaccgaagctcaggtcagcgttgccgtgacgctgttagaacagctggcattcgtgcaccgcaccaagcaaggccgcagcaatagcgtcgaactactgacttcaaggcagaccagccgacttgatttactgaaatcatcttggcatctcctgaagtcaccaatattcagcaaatataccgtcacgaatcgcaatcgccagatgattgccgacgagctgattccggccggcgaatttgctctttcgcgcaggacgcaactggccaccccaaaactgcgaatctatgccgttgaacgtcattggctcaagcagcacaacaaggaactatgcattatcgaccccgctttggaaaaggtgccagataatgcatatattctggagctgtggaggtacgatccccgcctacttgctcaatatacgcaggaagactaccttgccgaccccatttccacggccctgactcttggcgagattgccgacgaacgtttggaagacgccatacaagaatccatccgcaatactttctcaggagcgacaatatgacacaaggcctgcagctcatcagaacggcctttgccggctacgaagattcttacgtaatcatcggcggcaccgcttgtgacatcatcatgaccgacaacgacctggacttccgagccaccaaagatattgacatggtgctgattgccgagggacatcttcgcgagtttgcacaacgattgtggtctttcattcgcgatggcggatacacctctatcacgaagaactccgcacagcctcacctgtaccgtttcatgcaccccagtacgtacgggtatcccactatgatcgagctattttcacgtcaccctgacttccctattgtgccgaactcgttcctgacgccattgcatattgcaaacgacgtttccagcctgtcagccatcatgctgaacgacagctactatcggctactgcagcaaggccgcgaatcaatacaaggcatcagcgtgcttaacgagaaatatctcattcctttcaaggcgaaagcatggttggatctcaacgcccgagaacaacatggcgagcacgtagacggaaaagatctcaagaagcataaatatgatgtattccgtttggctcaactacttgctccagaggatcgcgtgtctctcaacgacgaggcctaccatgatctcgctgattttcttggggaaatatcccatgaaacgcttccgatgaagcagctcggcatacggggaacacagcaaggcatcattgatttgatagccggcgtatatcaactgtctatcccaccacgcgatgaatcttctaccacgatgtcagcgtaattttgtattccgcggaataaagccgttttgcgtcaccacgtggtgggtagtttgctacgtcgtggggattttactacgtggtggaggtttgactatatggtgggaccatgcgaaaggccgccgctccgaatgaatcggagcggcggccttttggtacgtgctgggtactctcctcaggcgcttacgcgccagcgggagctacaggggctcactgaacctgggcgcgggcgatcttgccggtgaaggagttggcctcgtcggcatccttgacgccatccttgttccaggagaacatggcgcgcagcttcgggccgacggtctcgatgcgctcgttggagtacttctcctgcagttccttgaagtgcggggcgccggcatcctgatcgtcgatgaactccttggcgaaggagccgtcctggatgcgcttcaggtggtattccatgcgcttgcggcagtcctcgttgatgacggtgttgacgtagtcgccgtactgggcggtgtcggagcaggaccaacgagccttgttcaggccgccctcgttcatcagatcgacgagcatcttgagctcgtggcagacctcgaagtaggcgatctccggctggtagccggcgtcggtcaggacttcgaagcccatctcgacgagcttgttcacgccacccatgagcacgttctgctcgccgaagagatcggtctcggtctcttccttgaaggtggtcttgatggcaccggcgcgcagagcaccaagggccttggcgtaggccagggtcagagcccaaccatcgccacgcggatcctgctcgacggccacgacgaccggcacgccacggccagcggcgtactcacgacgaacgatgtgacccgggcccttcggggcgaccatgaacaccgggtgatcctcagacggcttgatgtagccgtagtgaatgttgaagccatgagcgaacgcgacggcggcacccggcttgatgttgggctcgatgtcgttggcccagatggtgcgctggtactggtcgggggccaggatcatgatcacgtcggcctcggcggaagcctcggccacggacttgacctcgaggccctgctccttggcgaaatcgaccgacttggaggtcggacgcaggccgacgaccacgtcgacaccggaatcgcgcaggttcagcgcgtgggcgtggccctgggagccgtagccgatgattgcgaccttcttgccttcgagaacagaaagatcaccgtcgttctcataccagatctgtgctgccattattggcactccttttcagtagtggggtgtggcgccgctgggcgccggggtatctacggtgtgcagataagtcctgtgttgcgaggattgtgtccttcaaaccgaaatcaatcctaccgagaacgccgtcgcagccccgctggagtccacaacgtgagctaggtcactattggagtatggacagccgtgtgcagagaacgattctcgataacaactctgcacccttttgaacagaatcgcacaatcccacatatggggaaaggctgagatatcaacgatcttgcatattcggtgttcgtttgcctgcaagaaatcagcgcatagttgttattgagaatgattcgctgcgcgcaacaacacaaaaccgccgctcccgtatgggcgggaacggcggtttgctagcttaaatccccttcaggggcggcaatcactgaacctgggtacgagcgatcttgccgttgaaggactcggcctcgtccttgtccttggcctcggcgttgttccaggagaacatggcgcgcagcttcgggccgacggtctcgaggtgcgggtgagagtactcttcctgcagcttcttgaacttcggggcgccagcggcctggtcgtccatgaactccttggcgaaggagccgtcctgaatgcgcttgagctggtactgcatgcgcttcttggtctcctcggtgatgacggtggaggtgtagtcgccgtactgagcggtgtcggagcaggaccagcgagccttgttcaggccaccctcgttagccaggtcgaccagcatcttcagctcgtggaagacctcgaagtaggcgatctccggctggtagccagcctcggtcagcacgtcgaaaccgaggtcgcacaggtggttgatgccacccatgaggacgtcctgctcaccgaacagatcggtctcggtctcctcggtgaaggtggtcttgatggcacccgcacgcagagcgcccagagccttggcgtaagccaggcacagcggccaggtcttgccgtccgggtcctgctcgacggcaacgacgaccgggacgccacggccagcggcgtactcacgacgaacgatgtggcccgggcccttcggggcaaccatgaacaccgggtgatcctcggacggcttgatgtagccgtagtggatgttgaagccgtgggcgaaggccagggcagcgcccggcttcaggttcggctcaacttcttccttgtagaccttggcctggtactggtcaggcagaaggatcatcacaacgtcagcctcagcgacggcctcgccaaccggcttgacctcgaggccctgctccttggcgaactcgacagacttggaggtcggacgcaggccgacgaccacgtcgacaccggagtcacgcaggttcagcgcgtgagcgtgaccctgagagccgtagcccaagatggcgaccttcttgccatcgaacacggacagatcggcgtccttctcgtaccagatagttgctgccatttttggcgctccttttatttatttgtttatgggggtgaaatctttaattgttattgtgctctgctggttctgcagaaactgtttttagttttggctttccttgtgggcttttccgatatgcaggtttagtcctgttgcaccggaaaagcctcgcaggggttcacttcgtggaattgagatttttcacgttgtgaacttggcgatatttagttatggaggatttcacttggtaaagtcagcgtccttcgtctcacggcaggtcaggaccgacaccaggcagcacacggccatcacggcgaggtagaggcccacggagtggacgccccagtgggagctcagccaagtggcgatggtcggcacgaacgccgcgccgacgatggcggccaggttgtagccgatgccggagccggagtagcgcacgttcgcctcgaacagttcaggcaggaacgcgccgatcgggccgaaggcgacgcccatcagggcaaagccgacgcacaggaacaccatgttggcgaggaagttcttctggccgaccagaccaccgtccagcaggaacgggaagagcgcggcgaacacgacgagtgcgcaggaggagaaggtcagcacgcgcttgcggccgatcttgtccgcgtacaggcaggacagcacgatgaacagggcgaacacgcagatggagatcatgagcatgagcaggtattcctggttggtgaagccaaggccgccgccgccttcgccctgctccttggtgccccaagcgagggaccaggtggcgagcgtgtagaacagcgtgtaggtcacggccacgaggaaggtggcctgcagcacctgacgccaagacttgcggaagacctcggtcagcggggacttgacgaccttcttctgctcctgagccatacggaagatcggggtctcctccatgtgaacgcgaaccacgaggccgacgatcaccaggatggcggacagcaggaacggcacacgccagccccaagccagcatcgcgtcctgattgttgaaggattcgagcacgaagtaggtgccgttggacaggaagaagccgatcggggcaccgagctccgggaaggagccgtacagtgcgcgcttgtcttcaggcgcgttctcggtggcgaccagtgccgcgccggaccattcgccgcccaggccgatgccctggatgaagcgcagcaggcagaggatggcgactgcgccaacgccgacctgatcgtaggtgggcaggcagccaatcaggaaggtgccgacacccatggtcatgaggctcacgaccagcgtggtcttgcggcccatgcggtcaccgaagtggccgaagatcagcgagcccagcgggcgggcgatgaaggcgatggcgaaggtcagcaagctcatcagcagtgcgacggtggggttgtccttcgcggagaagaagatgtgcgggaagtagtttgccgcggcggtgccgtaggcgtagaagtcatagaattcgatggcggtaccgaccatcgatgcggcgatcacggtcttgaccgaatcgcgtaccaaggtagcggctttacctgccgcctgccctaagccagtctcttcgactgctgcagtcattgttactcctgttttgctctcgttcactctcattggcgggcgattatttcgtctcacagggaggttgttgttctgttgctgtgttgttgccgtgtactgtccgctaccgtttccgtctgcgggattctgccgtaagccttgtgagcgcaacaaaaaaagccccgcaacttgcagggccttaccgattgtgtcagcttgattggccctgccttcgttgacggggcttcaagcatcaatgccgaattagtccgccagcgaagacgggctaataattcgtgcggatacaaacgcagaagcattgaatccagtcatcgcgtggcctcctttcggtatttcctcaggccgttcgacctgaactggaatgtaaacataggtttggctgtcttgccaatccagcaagggttcacattgtggacgccacgtcgccgagacgaacgcccccgccgcggggaggaacgccgccggcggccggggagccggatcggcccgtcattgcgcggactcggcggtgagggtgacgattccggccagcagcaccatgacgatggcggacgggaagagcaggtaatagccgaagctgtgctcgaaggcgttcaccagtagcgcgccgatgatggcggcgagcgccagaccggccgagttggcgagcgcataaatgccgaggtcgtggccggctcggcgcgggtcgggcaaagagtccattaccagttcaaggcctaacgcatcgtagacgccgaaggcgaatccggagatcagcgcgaagagcagcatgccgttttcgcgtgccgtgccggtggaccagacgccgagcccccatgccaccgccacgccgatggcatacagcaggcaggatgccgccaccactgcagtggtggcgatgttccgttcctcgatcttctcggagatcggcccagcggcccaggacgcgagcgcagcaccgatgagcgttgccgcggccatgccggcgatgaggaggcccgcgggaatggtcaatggcgcggaagtgaacaccacagccttgccatacacccaaaagcgcacgagataccacagaaagaccccggtcagcccaacgcccgtcatcatgcacacgcgagcggcgaacacacgggcgaatgcaggcgcatgtgccggcggacgcagctggtcaaacacctggctcgactcgaatcgttgatgtggctgctcctggctggaaggctccttgggcagcatgatcacggtcaggatgccggaaaccgcaaacagcacggcggtgtaggcaaacggcgtgaaggagtcgaacatcacgccgagcgcacccatgcatacaccaagcgcttggccaagcatcacgccgataccgtgccagcgctcaatgcgcggacggaatttgtccggaacccgttcgctgatggcgctggccaacggcacggaaatcatcgcataggcaaactgcatgagcgcccagaagaaacacagcactacgaggcctgtgttccgccccagaaccagcgtgatcagcgcgcacagcacgccacccgccaccatccacggggtacggcggcccagaggaatacgtgtgcggtcggacagcgcggagaccaagggcatcgcgaacatggaggccaccacgccaacgactaccagcacggccagaggcaccaccaagtcagtggcgacgggcagcggacggctggtggacggattgatggtgaccgatatggcagaagcggtgtcgtagtcgaacaatcgcgccacggcgttgggcatggcgatggtgttcaacgccgcccaaggcgcgccgaccagaatcgaagccacgaaaaagccccaattaagacgggaaatctgaacagcggtgggtcgctgaccattggcggcgaccatcggatcgcgcatatcgagatatgcagacgacagatcaggcgcaggggcatccacgctggccgcggcagcggcagcagccgacgaaccggcggccgccagacgcacggcctgggcctcgggctgatcggcggatgcctcgggaggacgccgacgatctttgatggccagtcgggccacggcatccttgtcttcgggactcaatgccttgtcgagatccgggcggtcgtcaatacccgggcgcacgtacggttccaacatgttgctgctctttctttgctctcatcaccggcgggaggtaccggccagctccgactgagcatgacccgcaaccccgccacatgcaaaaccgcccgagcgcactagcttcagtgcactgcgggcggtttgttttccatggacccagcttacgccggacgcactacttggagcgcgcacagcggagtggcgtttatgggccaaaggttagtcgatatcggcaatcggcgggttgctcagcagatcatcagtctcgtggtcaccggcggcatcggtccaggcgaggctggcgaccggagtggtgttattcgtgccgagtccgcggccgggctcgaagatgagggcggccttggtcttgccgtcggcagcgatccagcggaaggtgatggatgtgtcgccgtcggcttcgtagctgaactcgccattgaatgcaggcagttcgttgcggaacttggccagggcgttcagggccttcaccaccgggcgctcgaggttttcgtcgatttcggcggtggagtagtaatggcgattgatgtcacggccgttgttggtcttgcgcagcagttccatgtcgttgcggccggcgagcgcgcccacgtagtagacctgcggcactccgggcaggaagaactggactgcgcgggcggccagatagtgctggtcgttgcagccgagcgcggagtagtacgtgctgttgacctgatagaggtcgaggttgctggcggcggcaccggtggcggcctgggattcgccgtgggtgttggcgtggatggtgttgaccagattatcgacgtcctcgtcgggcacgaggcccttgaggctgcggtcgagctgatcggagccgatgtcgatcacgccgatgccgtcgtgcgtatcgagcacggtgacggcgttgttcgggcggatttcggtccagtggaccacgggttccacgtgaccggtgaacagcgagtgcaggagcagcggcggcagggcgaagtcgtagacgcggtccaccttggaggcgatttcaacctgcttcttgtagtagctatgcacctcaatgagaatttcgaggcctcgcttgacgccttcctcgcgtaggcgtgagatgagcttaaaggtcttgggggtcatgaagcagctggtgccggcctccttggcgccgtagcccacggcgtcgagacggatgtagctgacgtgggatgcggccatctgatcgaagatggacatgaggtattcccagcccttgtcggaatcggtgtcaatatcaacctgctgcggagtgaagctgacccagaccaggcgggtcttgccggcgaacttgtagtgggtgaacggcaggcccgggcgcgggcggtagatgccggccagttcctcttcggtggcgccgttcgggaagacggagctcatggtcagaaacatcgggtaatactcggattcctcacctttttcaagcacgtcttggaactgcttggattcccagctcatgtggttgacgatggcatcgaccatgatgccgtgggtcttggaaagttcagcgacgtcgtcccagctgccgagacgcgggtcgactttggtgtggtcgatcgggtcaaagcctgcatccgcaccatcgaacggagtgaagaacggcaggatatgcacgccgtcatacacgccgtcgaagcgggtgcgcaggatgtcggtcatcgagctaagagtgccatcgccgagacgatcggcgtaagcgatgagctgcactttgtttttcatgggacctcccttggttcatggatgcaggtgcaatgtgtacgcagtgtatgcgtgcttttacatacttatacgtatcgaaccggtttgatattacctcgaaagggtcgttgatgtctagtaataccgcaaaatgcgcgtgtcgaaccggtttgatgcggtgttctacacaacccagcctgtccgatccccactcagcgttccaacgcgcagcatcaacgcgtggtatcgcctggcaccagcgtcatgggaataagcacgttcggctcgaacggcttggggatgttcctgcgtgaagcgttagccgcagccacttcctcattggcaatagcctgcacgatatggtcggccgccgactgtgcgatcgccgagaaatcctgcgcgaccgcggtcagcttcatgccggccaaatcggtcaaatacgtaccatcgtaggcgacgatctgcagctcgtcaggaatggaaattccgcggctcaacgcttcgcgcacgcagaacgacgcaccaatgtcggaactgaccacggcatcgacgccgtcggtcgccaccttgtcgagcgcattgctgaccgcacgatgacagccggcaaaatccatcacttcgccagcttcaacatactcgtatttcacgcctgcggaggtcaattcctgttccaacgtgaggtaatagcgcaccgtcgggaccgtggtctttcccaaatcgaacgatccttcctcgacttctccgcgcgcagccaaatcgaagaattgatctcgcggaccgccaatcatcaccacatgtttggcaccattgcggatcagcatctgcgcaatcaatcgcccaccctgctcgtggtcggacccaatcgacgaaataccgtctccaagcacacggtcgaacgcgacgatcgggcgatgaatcgacgtccaataatcgccgggatgcgaagtgtgcgcacacatgacgatgccgtccatcatgtgccgacgcaacatgtcgacatactggatttcgccctccgcctcatctgcggtagagcacagcatagtgcgtaatccttgcgcggcgagtgcatgctgcagatgtgcggtaaacgtcgcaaataacgggtggcggatggtgggcacgatgacgccgaccagattcgtgcgatcatgatacagattgcgggcaagctcgttcggcacataattgagggcttgcatggccttacgcacgcggtcgcgcatgtcatcagacacgtacccgttgccgttcaccaccagcgagacggtgctcagagacaccccggccttcttcgccacatcgcgcatgccgaccatgatcgcacctttcccgttatcactgttctatcgctgtattctcacgtgcttaccacgcgcctctcgcgagatattatacttattttcacattctctcgaacctgttcgacagtccggtgtgtatatcgcttgacggggacacccctaactttatttccatcatgtgattttcatgatgcccccttgaaatcacattcatgggccacttttgcgctgcattcgataccgcatcgatggaagatacatcatgcacaacatcttgcaaaacatcacaattacgcataacgaaagaaacggcgcaaagcttgcgatatccacgctcactttgcgccgtcttcttgtattgatgatggcctacattgcgatcatcgcgatcagtcagtcggaacgtcaccagactgcgtgtggtcaaagaccggcttgttgtctttgtcaaaggtgtagacgccgatattcgcagaactcggatcattgttcttgttgaacggtccaatgccggtctggccctgatactggatatccttgccatccttcagcagggcgaggcaggccttgtaggaatcgcacttctcgccgccgtcagcaccggagacggccgccatgttggcttgaatggtcttgccgtcagcgctgccgcccttctgcgcggcgagggctgcgaggatgatgccgtcgtatgtttcagcgccataggtggtggtgtttttcagatccacaccggtggattcaagacgcttgacgaagtcgtcggacgggttgacgccaggaatggtgcctttcgagccttccagcaggcctgcgtcgagttcgctcgaatagtcggaggtgttgccatccacgaagtacagtttcttggtgtcaaccccggcggaagcgagcgctttgagcaacggcttggtctggtcgaaggcgatgacgagcgtcgcgtcggggttggacgccttgatggcggtggcgattgaggagaagttcgtctcggtcggatcgaaggtgtccttttcgccgtagacgatgtcgacgcccgccgcggaagcggttttgacgactgtgtcgcgcagaccggtgccgtattcgtcgttgaagaccgcgatggcgagcttctgcacgccatcctgggcgatcagattacccataaccgcaccctgcacagtatcaggagcgaccgtgcggaagaagtagtcggacagaccggagaagccggccgaagtggcacccatcgacagcatcggaatgttctgcgaagtaatggacttgtatgtgttcttcaccacggagctggaagcggggccaataatgaacgacggattcttgctcaacaccgactgggcagccgacgtgttctggtcggcatgatccgcatcagacgtatcggcgtccacggtggtgaccttgctgccaagtacgccaccggcgtcattgatgtctttgactgccagcttttcggcggccagttcaggcggtgccagataggccagggatcctgtttccggccacagaccgccaagcacgaacttggtggttttggcaccggaatcggatgtgtcggagctggagcttccggagccggagccacagccggcgagcgccatgaccgcggcggccactactgcggtggcggtgatggacagctttttcatgcccttcatgtttgtcttcttcatatgaatcaccatttcctctcttggctccgctgattgccgaacccttggtgacgattgccgagataggttgctcgaacatcttgaggtgcactataggctgcgaggaaaccgaacgtgtatgcgtgaagttaaccggagatgaagtatgaaaactgttggaaacacaaggatttgtgtcagtttacaggcatggcggaaccgccggcggggggtattccgccccaccggcggaaatttgattcagagcccgaaattccgactcgtaggggatcgcgtaacgtgtacggagaccgacatccgagttctaaggcactctaaagcacacgaaggcgcttcgagcggagaggatgacgggccttatacgctccgctctgcgatttaccggggctacctgccctcttcctggacctcctcttccagattgcccaagtacaaggagacaaccttcggatcgttcatcaaatcacggcccttgccggagtaggcgttgcgaccttggtcgagcacatagccacggtcgcagatctgcaggcaacggcgggcgttctgttcgacaataaccacggagacgccggccttgttgacctggcgcacgcggatgaaggtttcgtcctgaagcattggcgacaggcccgcggaaggctcgtccagcaggaggactgacggcttcatcatcagggcccgggccatggccaccatctggcgttcgcctccggaaagctggccggcaagctggttcttgcgctgaccgagcttggggaagatggagcatacgtagtcgaaccgctcctcgaacagcttcggcgcctggaaagcgcccatatgcatgttttccgcgatggtcaggctggggaagacgttttcagtctgcggcacgaagccaacgcctcgggacacgagcttgtcggcacgcagattggtgatgtcctcgcccttgagcagaagcttgccggaatgaatatgcaccaggccgaacagcgacttcagcagcgtggactttccggcaccattcgggccgatgatgccaacgatctcaccttcatggagggtcagggaagcgccattgaggatgttcacgccgggaatgtatccggccacaaggtccaccgcgtcaagcagtggctcaccttccggctcacccacatgaatctgctcgcgggtcagcggcttgtctccgccaccttggatgtccgattcaccagaatcggacacatggggtaccgagaccgcaccagacactccagccgcacttgccacacttgcgttgtcgctcatttcaggcctccttcaaatcttccagcacggagtcgtcacccaagtcgatattcgcatgggctcccagatacgcgtcgatcacggccggatcgttcatcacgctcttcggctggccttcggccacgatcttgccttcagccatcacggtgacccagtcggcgatgtgtcgaaccatgttgatgtcgtgttccacgaacagcacggtggtgccttcctctcgcaacgccatgatgtggtcgagcagcgactgcttcaacgcggggttcacgccagccatcggctcgtccagcatgaccagctgcgggtcggacatcaacgcacgcgccatttccaacaacttgcgctgaccaccagaaagcgcacctgcataatcatccttctttttgatcagcagaaaacgttccagcaatgcttccgccttctcaatattcgctttctcctgcttcttccacatgccggggaacagcgcgcggaacatgccctcgccaggctgcacgggagcgccgagcagcatgttgtcaagcacggtcaaccggctcatcaccttggtcaactggaaggtgcggaccatgcccatgcgcgccactttttcaggctgcacgtgggccatgtccttgccgtcgaactgccaagtgccggtgttcggcatatcgaaaccggtcatcagattgaagaacgtggttttgccggcgccgttcggtccgatcaacgcagtgatgccatgcctttcgatttcgaaatggctcacgtccacggcggtcatgccgccgaacttgcgggtcacgtcatcggcgatcagaatcggatcgggcttgtgcacacccggcttgttctccacaaatttcaaatcctcggtgactttgtcacggtaggccgtggaaatgagggtctcgccttccggcgctttggtggcccatttggtcaggtcatggaacggcactcccggctgcacgccagatggctgctgcgcgccggtggtcggggtattcgttgtatcaggcatggaaagccaactcctttcggtcgcccaacaggccttggggtctgaatatcaccagacacatcagcgccacgccgacgatcacccagccgagggcttcgatctgattggaggagatcagggtttcgggaacggtgttgcgcataacctccttgacgaaggtgagcagcacccacagcacgcaggagccgagcacaggaccgagaatcgtggccgcgccgcccagcagcagaatcgtccacacgtagaacgtaactgtacggccgagcgaatcgggctgtacggagcgcggcaggacgaagatgatgccggccatcgcaccgaacaatccgcccaaaatcagcgattccatcttgtatttcgtaaccggcttgccaagcgaacgaatcgcattctcatcctcacgaatgcccttaagcatacggccccacggcgagtggaaccatcgccagcacaggaacgcagcgatcgcaaccaaaatccaagccacgatacgcagccaccaggaattcgcgatgttgttgctgtacgtccacagcaggaacgtggtcgagccgtcgggcagtggggaaagcgcttcgaacttttcagtgaaatcctgcggcgagatgcccgcggaaccgccggtgaagttcgtcatggctgtggaacggccgacgatgcggatgatttccgcggccgccaacgtgaccatggccagatagtcgggcccaagcttcagcgtcggaatgccgagcagcagcgcgtagatgacggcgagcgcgagcgccgcacagaccgaggcgaacaggttgcagcccatcgactgcgtgatggcgaatccgtaggcgccgagaagcatgaagcccgcctggcccatgttcatcaggccggtcatgccgaagtgaatgttcaaaccgatggcggccagtacatatgccgccgtggtgggggcgatcagctcgcccgccgcgttggagatgattgtcatgaagtccatgaatcagcccaccctttgctgcttgccgaagatgccctgcgggcgcaccagcagaacgatgatgaggattgccagcgcgctggcgtaacgcatgtcgttggggatgacgagggagctcatatccgctacgatgccgatgaccagcgagccgatgagagcgccgttggcggtgccgaggccgccgagtgtgaccgctgcgaacatcagcaggatcagggtcgcgccggtgttccaagagatgccgttgaggtatacgccgaggagcacgccggatagggcggccatggcgcacgagagaatccataccacgcggaccacctgatccacgttgatgccggacgctgcggccagtgccgcgttgtcggaaacggctcgcgtggcgcggccgagccgcgtcttgtagaggaacagtgtgacgcccacgatcacgcagatggcgatgagcgcggacagcagcgtcggcatgtccgtggtgatcgggccgatttggaagctgttcggcacggatttgacgatacccttaatgtcaccgccgaagaagaactggaacgtgtactgcaacgccatggacaggccgatggtcacgatcatctgttgcatggtgccgacgtggcggcggcgcagcggaccccatacgatctcgttttggatgaagccggtcagcgcgccgatgatcacggcgaagatggcggaagccacgagcggcatgtgtagcatctgcgtgcccacgaaggccatcaggccgccgagcgtgacctgttctccatgggagaaggactgcagtccggtagtgccatacacgaggttcatacccacggacatcaggcccagcatcagaccgaagataatgccggaatacagttgctgccagatacgtttgccgatattggagccaccttttttggctgacgatgctgcggcgtccgccgatccggctgcatccgccgtcccctgcttgctgtccgccgattcggccgcgccgttgccagcggtatcgtcggcctgatcgaagcggatgacgccgcgctgcttgtcgaagctggctttcttgatggtgaccgtcgcactgctcgacttcaggccatgctctttcgcaacggcatcgtcaatcgtgacggtgtagtcgccatcatcggcaacggaaaacgcccacttgccatcggctgcggttgtggcctccgccgtagccttgccggacaacttgacggtggcgccggcgatcggctgtttgccggcatcctgcagaatgccgttgacgcaaccgttgtcggatgtcggattgcattcatccacggcttgagcggtgccggctgcggacgcaatggcgggagggagtacgaaaagcatcgagagaacggcaaaaatcgaacatagcattgcgattcccggtcgacgatgccgtgtgaaatacgttacggctgtcattggtttttcctctcttattgttttcacaacgtaggagaggaaacagcttgcgcggttgcgctcagatttctttcacgttactcagcgaccgtccgtgtaacgtgaaaattacgccggattggcaagcagcgcaatgccgaaaccggtggccacgcaaatgagaggcaccgcgacggttgctattccatagcccagagccagcgtaaaacgacgctggcgaatcaatgaaaccacttcgttgagcgccgtggagaatgttgagaaaccaccgagaaatccgacaacgaacatcatgaccgtgtccatatccaccgattgcgaatagtaggacatcatggcgatgcccgcgcatagcgaggcgacgccgttgatgacgagcgtggatagcgggaagttgcggttcgttcttcgattctcgcggttccagccttgttgaattgacacgtcgagcacgtaacgggccatggctcccagaccgccgaacagacagatcatccagatcatcagcgcacctccccggtagtcgggtcggcgacaagcgaaatctccgcagtgatcggtttgggctcgaagctgggtggaagcgggttggccggctgctggattggctgcgactgctgaatctcgggcagctgccccaagtctggagtatccggctcgcgcagcaacggctgcgccggctgcgtcagctgaggaacggccagcggaggaatctgcggaacgcggcctgtctgcataggctggctggctggcggcggcacggttggtgtttcgactcgcggaacctgtcccgtctgtgcaatctgctgggccgtctgcgcggcttccattgcggcctgcgcggcagaacgcgccacgtcggccactttcacatggcgtacgccctgcgtgtccgattcggcagaatcggacacggaaacagctgaaaacgcaccccgaacccgctttcgagtactccgtgacagcagtgcctgcatcagaaccacgccggcggcggcagtgagcaaaccgcctgcaaaatttcccgcaagatagccaagcgcactggcgatatgccgctcgtgcagaccttccaccgtttccagcatcacgccggacatcgtcgaaagcccgccgagcaagccgagcccaacgccacggctgacaacctgccgcacccggcgacgcagccacgaagcggtcgccatgaattcggtcagcatcgcgaacaggaagcaggcgaccatattcgacacaaacgtgcccacaacgaatggcgtcccgctgaccgacggcaggagcatatccaacgcatgccgacagccgactccaacaaatccaccgacgaacaccacaacatacatcagtccgtcggcgagcggattgaaccgcgcctgcatacgtttcatcggcgccaggggaatcgtaggcggatccatggtgttagcggcgggcgcggttgcaccagcatgcgtcacctcaacagtgtcgattgcctgcgtgatgggatgtgagtcctcacccgcagtcaccacgtctcccggcgattgttcttgcgattccattgcgctccccctgtactggccttccgcggacagcgttgttccgcccataggccgtgcaacaacgagctgggccgcggttgccaccttcctaacgcatatgagtttacacggaacgccaacgtatgcaccctggatgtccgattccgcaaattcgtacatccagagtccagccgaattcagccaggctcagtcaagccgggcatcacacagccgccgcatcgcaggtcgcacctcgcgctcctcctcgccactgaacagcaccaccagatagtcgccggcacgcagccgtgtatcgccgcgcggcacgatctcgctttcgccgcgacgcaggccgatgatcaggcacccagacggccaacgcacgtcacgcacccgcttgccgtccgcaatcgctcccatttccaatggcagttccataatgccgctgcccacatggcttgcgatcgccatctgcatgccttgcgcgcgcacgtaccgctccagcaactccccataaatcggtttggtgcgcagcaaatcggacaccaacagcgcgatgaaagcgacggccgcgaccggcagcatgtgcgtcaacgttccagacatctccacagccaacagaatcgacgtgatcggcgttttcacggacgcggcgagcgtgcccgtcatcacgcacaccgcaaacaccgccactgcgtcggatggcagatcaccgaatcgatgcaacacttcaccgcagatgccgccggccaacgaaccgaccgcaagaatcggcatgaaaataccgccaggcgcgcctgagccgaaactcgtagatgtgaacagcatcttcgccacgaacagcagacacagcattcccaagccgacgcgcgcatgttcggcggtatcaatcagattcgagccgccgccgagcacatcgggcaaccagatgccgacaggcaacgcgatcgcaatcgcaatcatcgggcggctccatgccggcagtttgccgtacagcgtctggaagccaagcaacgagcggttcatcagcgaaccaaccaaaccggccaccaatccc

SEQ ID NO: 3718 - DNA, 3499 bp, Unknown
  R150_10m  MAG No. k141_9106
aaggtactcaatccgctacaatcgctccaatcgctacagctgaatgacggcggcctcccaaggatcgagctcacggttagcgagggagaccacggcgtgcggggcatcatacgtgctgattaccacgttcgactcggtgattccggcggcggccagttcggcggtttcgcgcggtagatcaacggttcggccggacatgttgaccacgaccagcagcttctcatcgccgagggtgcgggtgaaggcgtagacatgcgcgtcatccgcatcgagcagatgccagtcgccggccgccacgacaggcatgtcgtggcgcagcgcgatgagctgcttgtagaaggcatacaccgaatccggatcgtcgaattcgccggccgcgttgatcgccgcatggttgggattgacggagatccatggctccttagcggcatccggcgcagtgaaaccggcatagacagagccgtcccattgcatcggggtacgcgaattatcacgaccgcgcgcggcgatacccgccaacatcgattcgggcgactgcactttggcttcctcaaccctttgacggtaagcgttcagggactcgaggtcacggtactggtctaggcgcgtgaagtgggcgtcggtcatgcctagctcttcgccctgatatatgtacggggtgccgcgatgcatgtgcagcatcaggccaagtgccttggccgaacgcacacgagattcctccgaggagtcatcaccccaacgagaaacgacgcgaggctggtcgtggttaccagtaaacaggcttgcccagcctgcattcttcacggccgcttgataaccggccataatgctcttgagcttcggcaggtcaagtggcagtggcttccatttgacgccttcgcagtcaaaatcaacgtgctcgaataggaagagcatgtccagctcgccgttggcggggtcggtgatgtattcgttgcgctgtgcggtaacgccgggagcctcgcccacggtgaggaagccctcacggccttcgaacacttcacggcgcatttcggccaggaattcgtcttggcgagggccgtccgcgcagaacggattcgggttggaatagccttcctcacccacgggcagatcgtccagctcggaaccgtactcgccgggcagcttgccagacaggtccgtgcgcttggaaatcagcgtaatcacatccatgcggaagccgtcaacgccgcggtcaagccaccagttcatcatgtcgtataccgcgcggcgcacagccggattttcccagttgaggtccggctgcttcttcgagaactgatgcaggtagtattcgccacgctcagggcaatactcccatgcagaaccgccaaagtaggagccccactggttgggctcggcaccgggctcgccggcagtggtgccgggacgggcgggacgccaccaataccagtcggcgtgctcatcatccttgtttttggacgcttcaaaccaggcgtgttcatcggaagtgtgattgacaacaagatccatcacgatcttgagcccgcgcttgtgggcctcggccagcagctcatccatgtcgtcgagtgtgccgaacagaggatcaatgtcctgatagtcggaaatatcgtagccattgtcgtcttgcggagacttgtataccggggatagccacagcacatccacgccgaggtcggccagatagtcgagccgtgacgtaatgcccttgagatcgccgaggccgtcgccgttggtgtcttggaaggaacgcgggtaaatctggtaaacgaccgcattggaccaccacggatttggggtggcaccgttggtgcggatggaatctggaattactgtgcgttgtgaagtggtcatcgttggctcctccattatttatggtctacattgcctgttgctcatagtctaaaaagcgctgaattacatttccattggggaactgcgttggtgtgccggaaacaaaaactgcaaagagccggaaggcactgctacggctcaattctcataagctgcacatgctatttagcaacatatgggccctttcgctgtttgtggtgggtgactgtgccgtggggtgatgttggtcgggtaggttggaggcatggatgcctctcacctgttcaccgccgcgcttcggctgcggtcgccttggagggtcgggtctgcggacttccgtgacgccgacggcgacgggcgggagccgcacatcacgatcggcttcgagcccggcagagggttcatgctcctgttcgaggcgtgggtgtggctatatcgcctgtgctcgtggatgatgcactcgaggctcgaacctatgaaggagctcgcccgcttgttccgccaccataatctacctgacctgcggcagctcacatattaacggttcttctgattgcgacgcgcaagagcaacttcgggcgcgcttggattgcctgcttgaacccactggtgcggggatagatgatttagttgacacgcctgcgggaatctggtggggatttcgctggcacaccggatttcaagcaaaccccgcctcgggaaccgctccggacttcggcgttggcccggttcgtatgtcaatcgattgccgtctgaaccgggacagaatccgctgtcccggttcgcgatttttgtccttttttacaaacagggacaagccaatctccgcaattcatatgctccgtaatacaaaatcggcggaatagagccgatcccggaatcaacatgttgtcccggttttcacataaaacgattgacattcataccgggacaatgaaaattgtcccggttcgtgaaaatcgcccgaaaccgcgaaccgggacagcggattctgtcccggttcgcgcgtcaaacggttgatatgtggaccgggacaagccagtggcacggcgacacagcagatgcgctcaattgcaccgtaagccgtacggtttcgtcactttttcattcgcacaacgagcaaaaccacatgacctttgtacgccaccgccacatcaaccgaccgtcgcctttattgtggcggtttccagtatggcaacaggacagaagagcctcctccggtgagagccggaggaggcttgggtggaagcggacctttacttcacagagtcctgcaattcaggactggcctacggccagacccaacatgacctcgcgagtacgcgacctatccggccgcccgggccgggaaacagcccacggggctgtttccttaatcggctcgtctcgctcgacgcggtgaagtaaagcagcgcctgcgctgttttacttgaccgctcctctcatcactccaccgacaacccacttttgggcgaaaatgtagacgatgaggatcggggccatggccatcaggtagctggagaatgccatcgggtagttggtggcgaactgcgagctgaagacgtactgggcgagcgggatggtctggttcgactggtcggtcaggatgatcaacggcaggaggaagtcgttccaggcccacagtgcggtcaggatggcgatggtg

SEQ ID NO: 3719 - DNA, 27005 bp, Unknown
  R150_10m  MAG No. k141_9258
ccaagcacgaggtcaacatcgccatcgtcggcaagtacatcgatctgccggacgcctacctgtccgtcaccgaggccatcaaggccggcggcttcgccaactgggccaaggtcaacgtcaagtgggttgcggccgaccgttgcgaaaccaccgaaggcgcggccgccgctctcgacaacgtcgacggcatcgtgatccccggcggctttggcattcgcggcatcgacggcaagatcggcgccctgaagttcgcccgtgaaaccaagctgcccgcccttggcctgtgccttggtctgcagtcgatggtcatcgaatactcccgccacgtgctgggcattgaagacgcgaactcttccgagttcgagcccgattgcgccaacccggtgatcgccaccatggaagagcagaaggacatcgtggccggcaagggcgacatgggccacaccatgcgtcttggctcctacccggccgagctggaggaaggctcgctggtcgccgaactgtacggcaccacgcatgtcaccgagcgccaccgccaccgttacgaagtcaacgtggcctacaaggatcgtctgcgtgaaggcggcctgcgcatctccggccagagcccggacggcgagctcaccgagttcgtggaactgccgcaggacgtgcacccgttctatgtggccacccaggctcacccggagttcaagtctcgcccgaccaagccgcacccgctgttcgccggtctggtcaaggccgcgctcgaccatcaggcggcccgctgaccgtggatcccgcgcggtcggtccgcgcacgatgaaggcgtgacggcacggcatctcaggatgcttcgccgccacgccttcgccgtttggcgccatccgtgatgccgcatggcccgatggcgcccgcatgtaatcaagcccacagccaatatgcgtcaggacagctagtgtttgcacttgggttctgctaggttttcataggattaagtgtgatacaaggaaggcaggatggtgaccgaaaacacagcaccaaacgccgccgctgacgtggagatgagccagtatgtggccgatcgtacccgcgtcaacgaggacaagatcaagaaggatgacgagatcatcagccagttcggcgactacaactatggttggcatgattctgatgccgccggcgaagccgcaaaacgaggcattgatgagaacgtcgtacgcgcgatcagcgccgacaaaggcgagccgcagtggatgctcgacatgcgtctgcgtggattcaaggcgttcctcgaaaagcccatgcccgattggggtgtggatctctccggcttcaacgccgacgacttcaagtactacgtcaagccgatcgagaagcaggcgaagtcgtgggaggagctgccggacgacatccgcaacacctacgatcgccttggcatcccggaggcggagaagaaccgcctcgtctccggcgtggctgcccagtacgagtccgaggtaatctacaactccattcgtgaggacctgaagaaacagggtgtgatcttcgtcgacacggacaccgctgtgcgcgaataccctgaactcgtcaagaagtacttcggcaccgtcgtgcccccggaggacaacaagttcggcgccctcaacaccgcggcatggtccggcggctcgttcgtatacgtgccgaagggcgtgcacgtggacatcccgttgcaggcgtacttccgcatcaacaccccggccatgggtcagttcgaacgtacgctgatcatcgcggacgaaggctcctacgtgcactacgtggaaggctgcaccgccccgatctggtccgaggactcgctgcacgccgccatcgtcgagatcatcgtcgagaagcacgcccgcgtgcgctacaccaccgtgcagaactggtcgaacaacgtctacaacctcgtcacccagcgtgcctacgtgcgtgagggcggcacgatggagtgggtggatggcaacatcggttccaaggccaccatgaagtacccggcctgcatcctcgccgaaccgtacgccaaggcatccaccatgtccctcggcttcgccggcaagggccagtaccaggacacgggcgcgaagatgattcacctcgccccgcacaccagctccaccatcgtcgccaagtccatctcgcgcggcggcggccgctccgcctaccgcggtctggtcaaaatcgtcaagggcgcgtacggttcgtccaactcgaccgtgtgcgatgccctgctggtcgacgacttctcccgctccgatacctacccgcacgtcgacgttcgcgaagacgacgtctcgatggcccacgaagccaccgtttccaagatttccgaagaccagctcttctacctgatgagccgaggactcacggaggaagaggcacgaggcatgatcgtgcgcggcttcgtcgaaccgatcagccgcgagctgccgatggaatacgcactcgaactcaacagacttgtggaacttcagatggaaggatcggtgggctgattccgatgaccgacaacacaacacccgtcaaggaaatcaagattccggtcgccgaccccaacgacccgtacgcgattccggccgccatgccgtcctccgtggaccatgccgtgcgttcgttcaacgcaggcgactatccggagcccagccgcaagcaggacgaatggcgctacacgcctatcgagcgcatcaacgagttcttcaccgtgttcaagccttccggcgaaacgcagatcgaagtctccatgattgacggctcgccgttggccgaaggcgtgaagctcagccagatcaagctcggtgaaggcctgtccggcactgtgtccaagcccaacgaccgcgtctccgcagtcgaatgggaatccggccacaccgcaaccattctggaactgtccggtgagatcgcccagcccgtgctcgtcaaggtgcacggcgcgggggaggaccttgacgccttccatctggtgatcgccgccgccgacaaggctcatgcggacgtcgtcgtggaacacgacggtgacgcacgactggccgaaggcgtggaaatcaccaccggcaaggactcgcacgtctccaccacgttcgttcaggaatgggccaaaaccgccaagcatgtggccaaccaccgcatccacgtcggcgaaggcgcatccctgcgccactccgtcgtgaccttgggcggcgacatcgtccgcatccgcatggatcaggacttcggcggcgaacaaggcgacctcaacatgctcggcatctacttcgtggaccccggcgagcacatcgaacaccgcacgatggtggtacacaaccaccccgactgcaagtcccgcgtggtctacaagggcgcgcttgacggcaagggcgcgcactccacttgggtgggcaacgcgctcatccagcccaccgcccccggcaccgactcctacgagctcaaccgcaacctggtcctgaccccgggtgccatcgccgattccgagccgaacctcgaaatcgaaaacggcaacatcatcggtgccggtcacgcctcttcggtgggccgcttcgacgacgaggaactgttctacctcgaatcccgcggcatccccgaaaccgacgcccgcaagctcgttgtgcgcggcttcttcggcgaactcgtcgaggagatcggcattcccgccatctccgaacatctgatgaccgtgattgaccgccgactggcccgtggcgaaaacgacgccatggcacaggtcctcgaagacaagtaagaacagcatttttaggagcacaacaatgtcaacactcgaaatcaaggacctgcacgtccacgtcgaaaccaaggaaggcatcaagccgatcctgaagggtgccaccctgaccgtccactccggcgaaacccacgccatcatgggccccaacggttccggcaagtccactctcgcctacacgttggccggccacccccagtacgtggtcgactccggcgaggccctcctcgacggcaaggacatcctcaagatgactccggacgagcgcgccaaggccggcctgttcctggccatgcaatacccggtcgaagtaccgggcgtgtccatgaccaacttcttgcgcaccgccaagaccgaaatcgacggcgaggctcccggtattcgccagtgggccaaggacctgtccgcagccatgaagcgcctcaagatggacccgaagttcgcctcccgttccgtgaacgaaggcttctccggcggtgaaaagaagcgcgccgaagtgctgcagctcgaactgctgaagccgaagttcgccatccttgacgaaaccgactccggcttggacgtggacgccctgcgcatcgtgtccgaaggcgtgaaccgtgccaaggaagccaaccagttcggcatcctcatggtcacgcactacacccgtatcttgaagtacatcaagccggacatcgtgcacgtgttcgccgacggccacttcgtcaagaccggcggccctgagctggccgacgaactcgaagagaacggctacgaccagtacctgcccgagggtgctgattccgagtccgcgctggcctgagtccgtgaccgtgggagtctgacatgccctattctcgacacgctccgggccactcaggccaagtctttacggtcgcgaacaggccatgtcagactcccactcgtttcgtacaattgttacgtaagtaggggaacataatggttgattttaaggagattcggggcgagttcccgattctgaatcaggagattcacgggcacccgctcgtgtacctggattctgcggccacctcgcagaagccgaatgcggtgatcgacgccgaggcgaacttctaccgtacgatcaacgccggcgtgcaccgcggtgcccacgagctggcggcccgtagtaccatggccttcgaagaggcccgtgccaaggtcgccaagctggtcggcgcgaatacggccgaaggcgaagaagagatcgtcgtcaccggtggtgccacggccggactgaacctgctcgccaccgcattcggcaatgcatcgctgggtcgtgggggagaagccgccaagcgttttgccctgaagccgggcgatgagatcgtcgtctcgcgtgcggaacatcattcagtgctgctgccattccaggagctggcctaccgtaccggtgccaccttcaagtggatcgacctgaccgagaacggccgtgtgcgtacggacaacctcgacgaagtcatcaccgaacgcaccaaggtcgtggccgtcacccacgtgggcaacaccacgggtgccatcaccaacatcgcccctatcatcaagcgtgcgcatgaagtaggttcgatcttcatcttggacgcttgccagtccgtaccgcacctcaaagtcgatttccatgcgcttgatgtggacttcgctgcctggagcgcgcacaagatgtacggtcctaccggcgtcggtttcctgtacggtaagcgcgaactgctcgaagccctgccgccggccaacttcggcggctccatggtcgaactcgcctacatggaccacgaggcccaatacatggcccctccggcccgcttcgaggccggcacccagccggtcgcccaagtggtggccgcaggcgtcgccgccgaatggatgatgaacatcgggctcgagaacatcgaggcccatgagaagaccatcgccgccgaactgctgaagctcggcgacatcgatggcattcgtatcctcggaccgcgcgaaaacgtggaccgcatcggtaccgtggcgttcgacgtggccggcgtgcacccgcacgatgtgggccagttcatcgacgcccagggcatcgcgattcgcgtgggacaccactgcgcccagccggtgcaccgccacttcggcctatacgcatccaaccgtgcctcctccggtgtctacaattcggtcgaagatgcccaagcattggtcgaagcggccaagggcatccgtaagttctttggagtggagtaaaacagaacaccatgaacgaattcggtatgagcggggatgacctcgaacagatgtaccaagaggtcatcctcgaggcgtcgaaacatccgcatggcaaggaatcctttgcgcccaacgcggcggtcgaacagtccgcggacgcggcggccaatgtcaccgtgcaagccagccacgaatactgcacgcccggtgaatcgcaccagttcaacccgacctgcggcgacgaggcgaccatccatgtcgaagtctccgatgacgaaccgcacaccatcaagcgattggtgtgggacggccacggctgctccatttcgcaggccagcctgtcggtgatggtcgatctggtggacggcaaaaccgtggacgaggccatggatctggaacagacattccacaagctgatggaatcgcgcggtgccggtctggacgacgagaacctggaagaaaagctcggcgacgccgtggtattccaaggcgtgtcgaaataccctatgcgcatcaaatgcgctctgctaggctgggaagggctgaaggactccatcgccaaagccctcgctgcaaagaactgaggaaatatgtccaacgataatttggttcccgaaccgcagccgtccgttttcgatgccgtcaacggcgtcctgcaggacgaggaggccgctcgccgcgtgatggccaacccggccttggccaagggcttcccgaacggacgcccgatcgagcactctgctgcgtccggcgatgacacctgtgcgtgtggcggtcaccatggcaaatgcggttgccgggatgacgaacagtccgatggcagcgagattccgatcaaggcgattgacgatatcggccgcgccactgccgaagacgtgcgcgaggcactgcatcaggtgattgatccggagcttggcatcgacgtgatcgatttgggtctggtctacggcattgagatcgatgagctaggccgcgccattattacgatgacgctgaccacgccggcctgcccgctgaccgaccttatcgaggacgaatgcgcatccacgctggccggtctggtcgaggagttccgcatcgactggacgtgggacccgcgctggaccatggagcgcatcacgcccgaaggccgcgaccagctcgccgcccttggcttcaacttcgacaacatgccaaagtactgatagcgcttagtaagctccctctgatgagggagctctatacgagaaaagccccgcatgatgcggggcttttccaagtctggactggtcaatcagtcatcgacgatggtgttcttcgggacaaccgtaatgccgtccggcgtgacggtgaagccacgggccagatcgtgctcggtatcgatgccgacagtggagttttcggtcaggaccacgttcttgtcgagaatcgccttgtacacgcgggcgcggcggttgatgatcacaccgtcgaacagcacagaatcgacgatctgtgcccacgagtggatacgcacattgggggagagcacggagtggtgcacttcaccgccggagacgatcacaccgggggagacgattgaatcggtggcgtggcccagacggtcgcggcccgcgtgcacgaacttggctggcggcaggttgccggacatcgtgtaaatcggccaatcctggttgtacaggttgaactcgggcacataggcgatcagatccatgtgcgcatcgtagaactgcttaatcgtaccgacgtcgcgccagtaagcgtgatcagtgaccgtggaacccggaatctcgttcgagttgaagtcgtagacgccggcctcgttgcgggaagcgaagtacggggcgatgtcgccgcccatgtcatgcttggtgtcggcagccttctcatcgagagccagagcctcgaacagggccttggtgttggcaacgtagttacccatggaagccagaatctggttcggattgtccggcagaccggtggtggtggccggcttctcctggaagttcctgatcatgttcgggtgatcgggatcgacctcaatcacaccgaactggttcgattcctcgatgggctggcggataccggccacggtgaactcggcgccggactcgatgtgctgctgtaccatctgctcgaagtccatgcggtagacgtgatcggcgcccacgatcaccacgatgtccggctggacgtcctcgatgatgttgatggtctggtagatggcgtcggcggagccgaggtaccagtgcttgccgagacgctgctgcgcgggcacaggggagacgtacgagccaagcagcggggagaaacgccagacctgggagatgtggcggtcaagcgagtgagacttgtactgggtgagcaccacgacctgacggtacccggagttcaccagattgctcaacgggaaatcgatcagacgatacacaccaccgaagggaacggcgggcttcgcgcgatcgcgggttaacggcatcaggcgggtcccctcaccacctgcaagcacaatcgacagaatcttgggattcttggccatcgtaactgtcctctctgttactgagcgtctttcgacaccgcactgctgggccggatgcttccttgcattcggtttacatagttaataattgcagaaaaattcgaacatgcaaggctttcgccccccgcgtgccgtgaacttgcgatgaacagtttcgtagatttgtttaaggatccggccttttcggagcgcgtgcgattccttagcgtgtcgcgtagaacgccactgcgctggatgccgccacgttcagactatccacgccgtggctcatcggaatcttcacggtcaaatcggcgcgggcaatcgtatggtgggacaggccgtcgccctcggtgccgaagatcagcgcgagcttgtcgatatgcgtcggatcttcggcaggcgcgtgcagacggcgtgtcagctcgtccaacgaaatcgaacgatcctccaatgccatggccacggtggtgaagcccagcgacttcaactcgtcgatgccctggaacggccagtaatgcttgttttcggtaccgtcgtcgttgaacccggtgatacgggtccacggaatctggaatacggtgcccatcgacacacgagcggctcgtcggtacagcggatcaccgcaggagggtgtggccagcacggcatccacatcgagcgcggctgccgaacgcatcagtgcgcccacattggtgtggtccacgatgttttccattactgccacgcggcgggcgctcctgcagacctcggctacggagggcagcggccagcgtcgcatcgcgcatagggcgccgcgatgcagacgatagccggtcagtcgcttgagctgctcaggtgaggccacgtagacgggaatgtccgtgccccagcgcccgtcgatgaagtcgaaggtgtctttcatgccctccagccaaggttcctcgaccagcagtgacagcggttcgcggtcagcggccagcgcgcggtcgatgactttgggggactcggcgatgaacacgcccttggctggttccaagcgattgcgcaactgcatttcggtgaggctcacatacgcttcgacgcgcgggtcgtcaacggtgtccagcgtgatgaactgcattggtggcctttcgtgtgtgcagataacgaaaaaccccttgcaatgcaaggggtttatctgtgcccgagacgggacttgaacccgtacgcccgtataaaataggcactagcacctcaagctagcgcgtctaccattccgccacccgggcaggtgtcgtttggacaacgagtaaatagcttagcatgaaattacagggatgcaattcgcgcgtgtgcccggcgtgtcgcgtgtagccttgaagtcatgactgatgccctttttcttttcgacccgcaggtcgacgatgtcccggtgaacagcgacgaacttcacgccggctggaagctaaccctgcccgcgcacatcaagcgccatgctgtgcaggctatgcgactcaaggcgggggacagcctgcaactttccgacggcaacggcttgagaatccaggcagtgatggccgatcctgaagccggacttgctgaagttgtggaagtggggcgcgaacccgagccgctcacccgtttggcgctgattcaggcattggcgaaaaccggccatgatgagcaggccatcgatatggctacgcagatcggcgtcgaccaagtggtgccatggcaggcggaccgatccattgccaagtggaaggtcggccgtacggacaagaagtggaattcggtactggatgccgccaccgagcagtcgcggcgcgcttttaaaccgcaactggaggcgtgcgcgtccagcaaggaggtcgtggccatctgccgcagggcctgcgtgcatggcgatgtggtgattgtgctgcatcaggatgctaccgatacgtggtccggcgtggaggagaaggttacgcagttggtggaacgcacgctccaggacggccggccgcggactgtcagtgtggtggtcgggcctgagggcggcatcagtgagcaggaggtagctgatttcgtcaaggccggagcggtgagctgcgtactggggcacaatattctgagagccgcgacggccggtcctgtagcgttgtcgctgttgtctcgggtgttgggacgttacgagtaacgcccacgcgctaagctggtgcgtagcaacatcaaaccaaggagcatgatgagcgaatccgacgattgcctgttctgcaagatcatcgcagggcagattcccagcagcaaggtctacgaggacgagacgacctacgcattcaacgacatcaaccccaaggccaaggtccacgtgctcgtggtgcccaagaagcactacgccaacgtcgccgaacttgccgccgacgacccgaccgagctggcccacatcgtctccatcgcgcagaacatcgccgacaaggaatttcacggcgcctaccgactggtgttcaacaccggtctcgacgccggccagaccgtcttccacgtgcacgcgcacgtgatgaccggcgaaaagctcgacgagtagtaggggaatatccgcttcgtggcaacgactacacgtaccatcaccatcccgccccaacttgaccccgtcgccgtgctcggcccggttgacgaggtcattcgcgaggtggagcgcgcctttccggacctgacgattatcgtgcgcggcaaccgcgtggcgatcgtctcccgctccaagcagaccgaagctcaggccgcacaggccgaggatttggtcaacaccatcatccaagccgcctacaccgcgcctatggacgccgacaccgtgcgtcgcatgctcgaccagaacgtgctcaagaaccacgtgcgcctcgaacatccaggtcacggcccggtgcatgacaaactggcgcaatcgacctcaaacgaacgcgcccatgcacgttctgccggctcccacgacccgacgtaccgcaagcccacggttcccggcgtcatcacctttgccgccggcgtgccggtccgtgcgaaaaccgccggacaagtggcctacgtgaacgccatcgaatcgcacaccatcaccttcggcattggtcccgcaggcaccggcaagacgtatctggccgtggccaaggctgtgcgtgccttccaggacaagcagattcgccgcatcatccttacgcgcccggccgtggaggccggcgaaagcctcggctttctgcccggcacgctgaacgacaaggttgacccgtatctgcgcccgctgtacgacgcgcttggcgacatgctcggcgccgaccagctcaagcggtacatggacgacggctccatcgaagtggcgccgctcgcctacatgcgcggccgtacgctgaacgacgcgttcgtgatcctcgacgaggctcagaacaccaccgaacagcagatgaagatgttcctgacccgtctgggcttcaacaccacgatggtcatcaccggcgatatctcgcaggtggacctgaccgtgccgcgctcgggactggccaccatcgaacgcatcctgggcggcatcaacgacatcgcattcgtgcatctcaaaaccgaggacgtggtacgtcaccagctggtcggccagatcgtggccgcctacgaccgtcactccgccatcgccggcgaccaccgcgacatcgagcgcaagggccgccgcaaccataccgacttcgatgcccgccagcaagcggattcaaccaaccaaagtgagacagacgatgagcgttgacgtcaccaatgaaacccagtgggtcatcgaccccaaggtcttctccgatttgggtatttgggtactcgaccagatgcgcgtgagcacccagtccgacctgaccatcatgttcgtggatcccgatcccatcgccgaactgcacatgcgttggatgaacctcgaaggcccgaccgacgtgatgagcttcccgatggacgagctgcgcccaggcgacggcaaaaccgtgatggaaggagtgctcggcgacatcgtcatctgcccgtgggtcgctgcccaacaggctgccgcagccgggcacagcaccatgcaggagatgctattgctcaccatccacggcatcctgcacctgctcggctacgaccacgtgacccccgagcaggagcgccagatgttcggcctgcagcgacagctgctgctcaccttcttcgccctgcgccacgatgccaacgtgcaggccacgctgcccgccggcacacccgacgcgctggccctgtacgacgccgcgcacggtgctggccgcgacctcgattccaaataaacttccaaatcaatcacaccaaattcggattattctataccgttcaaggacattcaaggacaccgaaaaaacattatggagtattccagtaccacgctgatcgccgtcaccgtcattctcgtacttgtggcggccctgttcgtctggctttcgctgaccatggccgccgctgaaggcgccgtggcccgcgtaacgcgagccagcctcaacaatctcatcctcgaggtgcagaccgactccgaagcaagccagttcctcaagatgaagaagatcgacaagattcatcgcgtgcaacggctcatcgccgaccgttacgccaccgccggcagctgtgcgttcttccgcatcgcctgcaatgtgctcgacggcgtactggtgtcttccatcgcatccctgtggggtgcggaactgtgggttgaactgctcgccggattcctgttcgcgattatcgtagccgtggtctccgtactggtccgcccgcgcaccgccggcatgaccaagccggtcgacatcatgatttccaactcgcgcatcgtgtcgttggccaccaagctcacgccgttcgcacgcatcggtggcgacaagtccggttccaaggggccgggccgccgctccaaggactccgatctgtccgatgacgaggagcttgagaagattcagctcgagcagggcaaggccgccatcgaccgactggtggagtccaacgacttcgatccggaagtctccgaaatgttgcgcaacgtgctcaccctgtctgatacgttgactcgcgagatcatggtgccgcgcaccgatatgatctgcatggagcgcgactccacactgtcttccgcgctgaaactgttctcccactccggtttctcccgcgtgccggtgatcggtgaggatgtggatgacctgatcggcgtggcctatttgaaggacgccgtgcgcgccaccgccttcaacccggcggccatggagcgcacggtcgaatccatcgtccggcagccgctgcttgttcccgaatccaagccggtggacgacctgttccatgagatgcagcgttcccgccaacatgtggccgtggtggtcgatgagtatggcggcatcgccggcatggtgactatcgaggatgccatcgaacagatcgtcggcgagctggaagacgagcacgaccgcacccagcgtaccgagccggagaaaatcggcgacaacaagtggaagatgcccgcccgtacgccgattgccgatctggaggagatcttcgagatcgacattgatgaggacgatgtcgataccgtgtacggcctgctgaccaagattctgggccgcgtgccgattgtcggtgcttcggccgtgacgcgcggtctgcgactgaccgccgtggactccgccggacgccgcaagaaggtgtccaccatcgtcgtcgaaccggcgcacgtcgagggcggcgaggaaaatagcaggacccatgaggaaactgacggcgagcccgtcgaaggcgatgataccgccagcaaggagtgatatgaccgaccagaacaacagcacgaacgacgtcgatgacattgacgtcaccgatgcttccgatgttgccggcgttgccgaagtcgacgcgaccggtgaaacggagaatgtgaccaagcaggacgtgccgtatcgctccggattcgtggccgtggtgggccgcccgaacgtcggcaaatccacgttgatcaacgcgttgatcggcaagcagatcgccatcgcatcctctcgcccggaaaccacccgtaaggcgattcgcggcatcctgaccgccgaccacgcgcagctcgtgctcgtggacacgcccggtatccaccgcccgcgtacgttgcttggccagcgtctgaacgacgtggtcgacgaatccttggccgatgtggacgtggtggccttcctgctgcccgccgaccaggaaatcggccccggcgacaagcgtattctttcccgactgcgtaccgacttcgccaccaagcgtgaggacggtacgttcaagtggcgcatcccgctgattgccatcgtcaccaagatcgacgagcttggccgtcagcaactcatcaacaagctcatcgaaatcaacgatttcgccgatttctcggacatcgtgccggtgagcgccctgaagcacgacaatctggctgaagtgaagaacgtgctcattgagcacacgcccgagggcccgcagatgtacccggacgatcagatcagcgaggagcgtccggaagacaccatcgccgaactcgtgcgcggtgcgttccttgagaccctggacgacgagctgccgcattcgctggccgtggtggtcgattccatcgactatccggaagacaacgagaccggtcagggctatgacggcaaggcgcaggtcaacgtgtccatttacgtggagcgtgactcccagaagccgatcatcatcggcaagggcgcctcgaacctcacctacgtcaagaagaagctgcgcaccccggtcaaccgcatcgtcggccaaaaagccaagctcgacctccacgtcaaggtagccaaaggctggcagtccgaccccaagcagctggagcgcctaggcttctagggcgtatagacgaaaaaagctccctcgtcagagggagcttttgctatacggtttacttccgcttggtgtacatctgggtgttgaggagggtggagtagcgcttgatgaccttggggcgaatcaccttcatggaagcggtcatgaggccgttctcctgggtgaactcctcgggcaggatgatgaacttgcgcacggactcggcgcgggagacgccctcgttggcctgatcgacccacttctgcacttcggcgcgcacggcggcgttcttggcggcatcctccagcggcatgttctcgtccagacccttggcggccagccacgggcgcagcgactcctcgtccagcgtcaccaatgcggagataaacgggcgtttgtcgcccagcaccaacgcctgggagacgatctcgcaacgctggatgacctcctcgatcgggccgggggagacgttcttgccgcctgcagtgataatcagatccttcttgcgaccggtgatgtacaggaagccatcgttgtcgatacggcccaagtcgccggtggcataccagccatcttcggtgaacgacagctcagtggcctcgtcgttcttgtgatagcgcgggaacacggcacgacccttgacctgaatttcgccgtcctcggcgatgcgcagggagaatccggggaatgcgatgcccacggaaccagcgtggaacggcgtacccagcgggttgaacgcgcacggtgcggtggtctcggttagaccatagccctcgtatacaggcacacccgcgccacggaagaaagccagcagttcggggtcgagcggggcaccgccggccacaatccacttgacgcgaccgccgagcacttcgcgcagcgaagagtagacaatcggatcgaaggcagcgcggcgagtgcgggtcagtgcacctgccttgccattggcggagacttccttcatatagttctgcgcggccaccacggcggaggcgaacaccacgccctttggaccgtgtccggccttctgggacgcggcgttgtacaccttctccagcacgcgcggcaccacgatcatgagagtgggcttggccacctgcagatcgctgatcagcgtcttgatgccggtggcgatgtagatgcggacgttcgaggagacgacgatgtagttgatggcgcgggcgaaggaatgggcctgcggcaggaacagcaggatggtgttcctcttgtcgtgcagcagatcgggcatgtaggtcggcagattcagcgcggtctggcagtagtgctcatgggtcatctccacgcctttcggcgcggccgtggaaccggaggtgtacacgatggagcacaggtcggtcttcttgaccgaatcgatgcgctcgtccagctcctcgtccgagaccgtggtgccgtaggccttgatttcgtccaagccaccggtctcgatggtgatgatgtgctccagggacgggcactcttcgacggacccatccgccttcttacgcatgtccgtgtcctgcacgatcagcagtcgggcatcggagttgttgacgatattgcgaatctgctcggcggaatcggtgtcgtagatggtggcgagcacgccgccgcacgccatgatcgccgcgtcggtcaggtcccagtcgtaggaagttcggcacatgaatgccacggcatcgcccttcttcaggccgtaatgaatcaggcccttggccacggcacgcacgtcagccaggaactcgttggcggtgacggtcacccaatcgttgccggacttgtaggtgtacagcggctcatcgcccatacgttcggcgcggtccgcatacaggtcgtagatggacgtaccttcgtccagcggcggattgccttcggtggaggtggtgagcaggccggtgatggggtcgatgtcggtgacggtcaggtggccgtcgtcccaatcgtcgctgtgaggcaaagcgatattggtctcgaccggcacgtcggcgttggacaggtaatcgggctcgtctggagtgtcgtcgtggaccgggtggacgaagtcggatcccaacctgagcgccttacgggtgagattgatagtgtgctgcgtgaaggaattgataaccgacaagtcttgctcctgtaaacctttcagtgtcgtccagccatgaggcgaacgcttctcaaagttcaaattgtaatcgcccaaaccgaactcgtcaccttacgcaaccgtaggattctggcgggttaggggagtgcgtggcaaaatattgcacaggtcccgatattgttgagtaaccgtgagctacgaaacggtgattgtcgatagttactgagcggttggttgctgatcgatgccaggtgattgttggacgacttccgagcaattcatccgcaatgcacatggacacattcgtatttctcactaatttcgggttcgtttctgtttcgattggcggaatctcaagccatggtctttaccttccgactacactttctatgcggataaccatgtccattttgaagtagaacaagaaagggctctcatggcgcaaaacccagaagccaccgtggtgttcggcgttttgaatgaaacgtccgaaacggaatcccgcgtcgcgttgacgccggatatcgtcacccggctgaagaggagcggagtctcctcgattattgaggccggtgccggcattgccgccgaatacaccgatgaggattacgaaaaggccggtgcgaaggtgaccagccgcgacgaggtgctcgccgaagccgacgcgctcggttttgtggaccgaccgtccgccgagaccgtagccaagctcagggccggccagtgggtcattggcatgctcggttccttcaccgatgccgattacgtggccgcgctcgagaaggccggtctggtgggcatcgccatcgaaaagctaccccgtaagctttccagcgcccagtccatggatgagatgacctctcagaactccgtgatgggctacaaggcagccatcaccgccgccgatgcttacggttccttcctgccgatgatgaccaccgccgccggcacgattcgcccggctaaggcgctggtgctcggtgccggcatcgccggcctgcaggccattggtacgctgaagcgtctaggcgcggtcgtcaccgcgtacgacgtgcgtcccgcctcccagggcgaggtcgagtccctcggcgcgaagttccttgatctgggacttgacttctccaagggccagggcgagggcggttatgcccgcgcgttgagcgccgaagagcaggctcagcagcaggctgccgtcgatgagaaggccgccggctttgacatcatcatcaccaccgccaaggtcccgggccgcaagcccccggtgctgctcaccgcagccggcgtcaagggtctcaagcgtggtgccgtgatcgtggactgcgcagcatccgacctcggcggcaacgtcgagggctccgccgtcggcgagcaggtcaccgagggcggtgtcaagctgattggcgctccctacctggcctccggcgtcgccaccaccgcatccaacctgctttcgcgcaacgtggccgacatcctcgtgcacttcgtgcgtgacggcaagctcggccaggatctcaccgaagaactcgacgacgcgctggtggttgccggccgcgccgccgccccggcagctgctgccgatgccgagaagtccgagaagtaaggaagaaggaataccatgcctactctcgtcgtttccattaccctgttcgtcctcgcgctgctcatcggtatcgaggtcatcggcaaggtgcccgccaccctgcacacgccgcttatgtccggcgcgaactccatccacggcatcgtcatcgtcggcgttgtgatcgtggcagccgaagccaatagcccactggcctacgtgttcatcttcctggccgccgtgctgggcaccatgaacgtcgttggtggctacgtggtcaccgaccgcatgcttgagatgttcaagtccagcaagaacgagaagaagggggagtcgaagtaatgacctccgcaaccgttggcgccatcgacatcgtcgcatggttcgtctacctgttctccgccgtcctgttcgtggtcggtctgcatttcatgaactcgccgaagaccgcccgaaagggtaaccaaatctccgcgttcggcatggtcgtggccgtgctcatggcgttcatcgtgcttttcgccaagggcttcgtgaacattgtcgccgtggtggtgctggtcgtcggcatcctgatcggtgccgtggccggtgtcgtctccgccaagaaggtgaagatgaccgacatgccgcagctggtttccgtgttcaacaccgtgggtggtggcgccgccgcactcgtggccctgaacgacatcctgaccaaggaaggcaccccggacatcgtggtgctcatcaccgctggtctcggtatcctcatcggttctgtgaccttcaccggttcgctcatcgccgccggcaagctacagggcatcaagtgggtcaagaagctgaacctgccgggcaagggcgtatggaacattctgttcgccgtgctgtccgtcgcctcgctggtcatgctgtgcgtccagcccgaacagcgcctgctgtggtcgattctgaccaccgtgttcgccctgtgctacggcctggtgttcgtgattccgatcggcggcgctgatatgccagtggtgatctccgtgctcaacgcatgcactggtactgctgtggccatgtccggtctggcgattgacaacgttgccctgatcgtggccggcgcactcgtcggttccgcaggtgtgaccctgtccatcctcatggctcaggccatgaaccgtccgctgctctccgtcttggccggtggcttcggcggtggtgctgacgccgccgctgctggcgacggtccggaaggcaccatgaaggagaccacgccggacgatctggccgttcagctcgtctacgcgcagaaggtcatcttcgtgcccggcttcggtctggctcaggctcaggcccagcgcgagctcgccgacctcggcgaactgctcaagggccatggcgtggaagtctcctacgccattcacccggtcgcaggccgtatgcctggtcacatgaacgtgctgctggccgaggccaacgtgccctacgaggagctcgtggatctcgatgagatcaacccgcagttcccgcaggccaacgtggctctggtcgtcggcgccaacgatgtgaccaacccggctgctcgccgtcctggcaccccggtttccggtatgccgattctcgacgtcgacaagtcccagaacgtcgtggtcatgaagcgtggccgcggcatgggctatgccggtatccagaacgagctctacttcgaggacaacacccagatgctgttcggtgacgcgaagaagagtctgcagtccgtcatcgccgccgtcaaggaactgctcgcgtaaccattcttggctcccctcacagaggggagccaagctctatatctactacagcccaaacacccgcttaacaaagccgttaacgcgacgccaatagcggtccggatcggtgctggcgctcatcgtgtggtcggcgccgggaatcagcagcttctcgcggtcgatgctggcgcaggcgttgtaattgatgtccagatacttcggattgacaaaagtatccgctccgccgtgaatgaacatcatcggaatagtcgcgtgccgtaatgccttcacacaggaggcgtcctcaaaccggtatccagccttgcgtttagacacatgactggccactttgaccagcagcacggccaacgagtgcggcaaatggaacatcgcctcggcattatccgtaaactgcgagaccacggaactgtatccgcaatcggaaatcgcggcgacgacgttgcgggggagtcgcgcatcgccggccgtcatcatcaccgtggcggcgcccatcgaattgccatgcagcagaatgcgtgcatccggatcagctgcggtgatcagcgaaacccagcccaacagatcgtcgctttccagcaatcccatacccacgtaacgcccttcgctcaattcatgggcgcgctgcgcgggtagcaggaccgtaaaaccgagttgcgcatagcgatgcgcccatttggccatttccgcgggctctccggtatagccatgacagcagatcgcgtatagatgcggctgtgggtcggaacaatccgggtccaacagccagccgtggagtttccatccatcatggctgcgcagcgtgaccgattgcttggcctcctcgaaccaccgggtggcctcaagctgctcggacatgtcgaattcgatgcctttcggcgtctcctcgtgcggcatgttgaacatcgaacgtttggccttggtgtccagcgcgaacatgaacatgacgttggcggccgcggctgtgacgccggctccggtggcggctatcgcggcaagtgccgcagccatacccctgacaacgcgagtgtgtgcggcgatgacgtcatggccatcctcattgatgacgtcgtccgaacgagtcatatcaacctcccgatatggtactcaccatcgtacgttattatcgaaatcatccccaacttcgtgaaagaccgtacactgagtgtcgctgagcgtacggttttcacgaaatggcgaacgatttcgtgaaaaccgtatgatgagaacgggtaagcgtacgttcttcacaaagttagggattatttcgcggaaaccgtacgttgacgtagctgggacggcctatatgcagtgtcatcgaagcatcattacgcaaagtccggggttggcgtatacttgacaattgttgctttggcgagggaagtgtgcatgctgacacatgacacagattccgttatcgactcggcgtatttcactccttgtagggtgtctttcggcgcgtcgtggcgtctgagcgagacagtacgaaacgaagatacaaggagtatccattatggctaccaccattaagcttgagggcgaggcccgttccgagttcggcaagggcgttgctcgtcgtctgcgcgttgccaacaagattccggccaccatctacgccggcggcgaagagcccgccttcgtgactttgccgatgcgcgagaccaccctggccctgcgtcacaccaacgccctgttcaccatcgccttcgacggcaacaccaagatggccgtcgtcaaggacgtgcagaagaacccggtcaagcgcatcatcgagcacatcgacttcctcgaggtcaaggccggcgagaagatcgacgtcgaggtgccggtgttcgtggaaggcaccccgaagggtgctgccgtggcgttcgtcgacattcaggagctcaaggtccgcgccgacgtcaccaacctgcccgagaagatcgtggtcagcgtcgaaggcctgaccgacggcaccaaggtgttcgccaaggatgtcgtcctgcctgagggcgtcgagctggacgtcgaggatccggaagagtccgtcgtcaccgtcgaggtgccggaggatgccaccgagtccaccaccgctccggaagctgctgccgccccggctgacgccgctgctgccccggccgccgacgccaagtgagtcggtcgcttcgatagcgaacaattcagaacataactgaaacgtggaagcccgcagccgttgagaacggtgtgggcttcttcgttttttcaccatgtgaactctgccacacgagtaacacatgggtgtgcaaaagtatgcaacagagttcgcgccacaagcgcacagcacacaccccatatggtggctttcgggccgccaaagtcaagaagaagtagctagtgatgactgaaaacacgcaccacgatccggcagcactcgacaagctcaccgaaccgttcaccgtactgccgaacgacaaccccgcatccgatgagaagcgccagtccctcatcgacaagccggctttcggccaggtgttctccgacaacatgacccacatgacttggaccaagggcgaaggctggtccgaccgccgcgtcgaaccgtacgcaccgctcaagatggacccgggtgcttccgtgctgcactacgcacaggagtgcttcgagggcctcaaggcttaccgtcatgccgacggctccacctggctgttccgcccggatgcgaacgccgagcgtttccagaactccgccaagcgtctgtacctgcctgagctgccgattgacgacttcctcggttccgtggccgcgctggtcaagcgcgacgccaactgggtgccgtcccgccgcgagtacacgctgtacatgcgtccgttcatgttcgcttccgagccgttcctcggcgtgcgcgccccgcaggaggtcgactactgcgtgatcgcctctccgtccggcccgtacttcccgggcggcgtcaagccggtgagcatctgggttgaagacaagtggttccgcaccggccctggcggcactggtttcgccaagtgcggcggcaactacgccgcctccctgctcggcgagtacaagggtgttgagaatggctgcgagcaggtgtgctttgtggacgccgccaccaagacctaccttgaagagcttggcggcatgaacatgatggccgtgcacaaggatggccacgtggagaccccgtccctgaccggcaacattctgccgggcgtgacccgtcgctctctgattcagctgctgcaggacaagggccacgacgtggtcgagaccatgatcgccctcgaccagctgctcgaggacatcaagtccggtgaagtcaccgaggtgttcgcttgcggtaccgccgccatcatcaccccgatcggtcgcttcaagtccgagaagttcgacgtcaccgtcgccgacggcggctctggcaagctcacctgcgaactgcgcgacgagctgctcggcatccagctcggcgaagtcgaggacccgcacaactggatgtggaaggtgtgctgaactagcaccttttgtttccgactaagaccccttagaatgtcaacaattccaaggggtcttggcgtattggaaatgttcctggctagagaggtacagatggatttagcaacatttcgcaacaaataatatgatttaggtcttctgcacgttgcgggggttggttatggttcatccagatgagaacaggagcaaacctatgagcaagatgagtgacatgacggaatactatgcttcagcctaccgtttgccgtcaggcttcgagcattgctcgaaactgaagccggtggcagaggcagcgacggcgttgcgtcggtggtgagacaagacatgagcttctggcgacgctgggggatgttcaatgtcagtaatggttcaaggtttggactgctgacgtcgctgagacaccttagcgtcgttaacgggtcaggttctggcgatcaaacgacggtaaaaaggggcttagcgtcgttagctgtacataagttggcacggcaacgacactggagcgcgtgatcgtcggtgccgtgccaaactttggccaacctccgacaaatgagaaggactaacgtcggtggctgctcaaagtttggcgcgctggcgacgctgtaagaaaaaaagtgtggagtcgaaccggcaatagcatttattcggtttgttctctagtccaattgcgtcaggcaaggcctgttgtaggctcgggtacgacgggctgtagcgccgaataaggatgaacgggaacagaaaacgaagacggactgagacgaaccgaagcggtaccagaggggagcggctcatgcaggtggtgttggagaacaacatcgtttttgtggtcatcgagtatttagcaatcctgtgttggggattgtcgggcggacttgccgccattcgcaagggctacgacatcttcaccatcatgctgtgcggatggcttaccgcactcggcggcggtcttgtgcgcgacgtgatactcggtgccctgccgccggtcggcatcaccgacaaaggctatgtgctcaccacgctgttttccggcattatcgtggtggtggcccacccggagatcaccaaactcaaatggacgatgactgtcatcgatgctctgggcctcggactattcgcagtcagcggcaccgcaaaggctctggcctacggttcctcaggcatgacagccgtattccttggcatgttcacagcactggccggcggcctcattcgtgacatcttcatcggcgatgtgccaatgattattcgagacaaacacctctatgccgtgccctcgttcatcggttgcattctgaccgtgcttgtatggcgtggtgtgcactacggttggttcgacatgtgctcggaaatgctgctcgacgtgctgatcgtcatcatcgtggtggcgctgcgcctgctctcggtcggcttcaacgtcaccttgcccggagccgtcgagcgtcatcgcgtctacctgcccagcgaaagccgatatctcaagcgcccggtcatccatccgcacgccgataccgtcgatcccggcgataccaccaaggacgaagaagacaagcctcaggatgattcaagaccgcctcagggctaactgccttcaaagaggtacatttggccttctgcaaaatgacaactgctttcaaagaggtacctgaagcacgaaacgtcgagtataagcgttgcaatgacggcgtttatacttgggctttctcggattcggtacctttctgaacggagatgtcatttcgcaagaccgccaatgtacctctttgaacggagatataaaaagtcccgcaagccagatgacttgcgggacttgctaaaaccttaagaggcttatgctcacagagcgttgatcgcaacagcgaggccggacttgcggttggcggcctggttcttgtggatcacgccagcgccagcagccttgtcgagcttctgggcggcaaccttgtaggcggcctcggcggcagccttgtcaccggcggcgatggcttcgcgggtggcgcggatggcggtcttcaggccggacttcacagccacgttgcgaaggtgcgccttctcattggtgagcacgcgcttcttctgcgacttaatgtttgccacgtttactccaaacgatgtgtgttataaggacatacaaaaggtagaggatagcatgagccccggaaaaacccgcgcaatgccacgccgaatacagtccctcggctacactaggtgaagtttgagtatatgccaagaggaggaatgcgttggtcgtccaacacaatcagccgggttccacggatcagtcggtgattcgcaacttctgtatcatcgcgcacatcgaccacggcaagtcgaccgtggccgaccgcatcctgcagttaagcggcattgtgcccgagcgcgagatgcgcgatcgcttcctcgaccgtatggatatcgagcaggagcgcggcatcaccatcaaatcccaggccgtgcgcgtgccatggacctttgacggcaccgaatacacgctcggtatgatcgacacccccggccacgtggacttcacctatgaggtgtcccgcgcactggccgcctgcgaaggcgcggtgctgctcgtcgacgctacccagggcatcgaggcgcagaccctgtctaacctgtacatggccatcgaccatgatctggccatcattcccgtgctcaacaagatcgacctgccgtccgccgagccggacaagcatgccgaggagatcgcaggtctgatcggctgcgagccgagcgacgtgctgcgcgtctccggcaaaaccggcgaaggcgtggccgacctgctcgaccagattgtcatggacgtgcccgccccgcacggcgac

SEQ ID NO: 3720 - DNA, 35341 bp, Unknown
  R150_10m  MAG No. k141_9507
ggccaacgccgttgagaaagaggaagaaaaaaggatatagaggcttagatgctgccgattattcagcgttcttcacggccgtcgcaatggacacggccgggtccaagaacggaatcagcgtggactggaaggcgtggtacaggtcggacttgcccggccagaccgtgccgatcacgtggttgttcttgtcaagctgatggaaccaggaaccgccctcgtggtcgatgacatgctcatcgacatactgggcgaatgtggcgtaccagttggcgtacatctcctcgccggtggccgcatacagtgtggcggaagtgttcaacgattcggccagcgtccaatgcatgcgatcggtgaccacgggcttgccgttccagtcggtcgtgtaggcgagtcccatggtgccgtcggcgttccatgcgtcggccacggcacgcgcgaacagatgctcggcggcgtcgacgtacggctgtgcgccgtcaaggttggcgaaggagcttaacgcccactgcgtgatcaagcgggcccattcgatgccgtgacccggcgtggcgccgtacggcttgaactgatcatccttcttgtcgacgttgcattcgaggtccagcgaccaatcggacttgaaatgttcggggatgcgccactcgttgtgcttcgcccagccgatcacatgatcgatgatgtgtccggcgcgtactcgataggcgttgttcccggtggcgtcggccacggccaggaacgcctcggtggtgtgcatgttggcgttgagaccacggtacgggtcgagctcggtgaattcggtattccaggtatcgacggccaaaccgatctcgtcgtcccagaaatgctcgtcatatgtggcgagcgcctcatcgagcagttccttggcacccggacgtccggccagcagggcggaggacgcggcgagaatcacgaaggcatgcgcatagcagaccttgcccggcgcatgggtgccgtccgcgaacacctgcggataccagccgccgtgctcgtcgtcatgcagaatgccggtcaatcccctgagcgccgcgtcggccagctcgcccgcacccgggtatccgagcatggcaccaatcgaatacacatgggccatacggctggtgatccacgtctcgacgccgtgggaggggtcgagggtgccgtcggcgttcagccagccggaaccgccatccggcgctgggaagcccttgccgaacttcagcagctcgtaggtttcggaagccatgaaaatgcggttggcttcggtgccgagcgtataccgtgggttattggtcataatgattgttcctttccttaacgagaacatgcggtgggtgcgcaatgagcattcagcgggcacgtcttagtgcttcacacgaatgccgaaatagtccatgaccagttcgcagaacatcatattcgaccagctgaaccattcgcgcgtgtacttggtcggatcatccacgtcgacgccttcgtgcatgagatgtgtaccggcgtcggtggctacaagacggtcgaggatatacgccttgaagtccttgctgtcactggtcatcgcctcgatagacagcgcgatcggccacacatagcgcggcggggtgtgcggtgagccgatgcccttgagatactcgccctcgtaatagtacgggttttcgtcgctgagcagcgtgcgtcgggtcgccagatacgtcggatcgtccggtgcgcagtaccccaagtaaggggccgccatcaaggagggcacattgctgtcgtccatgatattgacgtgacccaggccgtcggtctcgaacgcgtaaatcgtctcgccattgcggttcgtcgttttggcgtgggcttcgatgccttcggtgatggtgcggcgcagctcgccggcacgggcggcgatatcggcgtcatccagaatctcaccgccgaagatgcgttccagatagcccatcaccacggcggcgaacatgttcgagggcaccagatagtggtaggtgcaggcgtcgtcgctggggcggaagccggaccaggtcatgccggtgtacgccaccggcgaccccttgccgtcattgctcagcgattcggtggggatgtccgtgtcgcggatgaagaaatacggggagcgttcatgatgctgctcggtctcgaagacgtcaagaatcttcttgacgccggcaatgaattcggcatcgaagtgatcggcgttgccggtgttcgcatacagcatccaagccaactggatggggtagcacagcgaatccacctcgtacttgcgctcccaaagccaagggctggagaaatcggaccggtcgtccttgtcccaggaggcgccgttcggttcctcgttgaaggcattcgcatacgggtcgatgatgatgtagcggaactgttgccgtatcagaccggcgatcaggttcgcaatatcgctgtcttcggcggcaagggccagatacgggcgcaattgcgcggtcgaatcacgcagccacatggccgggatatcgccggtaagcaggaatgtggtgccgtcatcatgccgtttgaccgtggtggtcagggtgtcggcaaagcaggcattgaagttctcggcccaggcggcgtgttcggtgccacacaggtccgtgatgtgctgcatgaaatccgagaccgacttcggtatcgcggtggtcgtcataaattcaacttctttgtttgagggatatacatatcaagggaacagcattattctaaaccgctttagttcatgacacgcgaaaggatgtgaagagcatgagtgtgagcgcaccatatgaaaaaccggtgagatttcctgttcggagaatctcaccggttgcgatcagtcgattcgtgaagtcgcacgaatggcggataaggggatgggtggattacttgccgatttcagccagatagtcgggcatctcggccgggtactgcggccaggcaccggcctgggtgcagacgtaggcggcggtgttgacggccttgcggtgggcttctgccagcgtgtcgcccagcaggatgcgggcggtgaaggtgccggagaaggagtcacccgcgcccacggtgtcgttcacctcgacgtgcggagtgtccagcgtggagacctcgcccttgcgggagatgatggtggagtaggcggagccggcggtcagaatcacgtagtcaaggccgaattcctcgatgaaccagcgggaggcgtcttcgccggaggtgccgcggatgtcgaacatgtcgcgcagcagcaggagttcctcgtcgttgatcttgaagacggtggccgccttgaggagttcctcgatgaggtccttggagtagtggtcgccgcgcaggttgatgtcgaagaacttcatcgcgcccggcttggtgtgcttgagcagctccgtgatggtggcgtgcgattcgggggagcgcagggccagggtgccgaagcagacggcgtcagccttggagaccacgtcgatgagctggcgggtgtacaggatgtggtcccaagccacgcccttgacgatggtgtactccgggatgccgttcttcagcgcgacctcgacggtggaggtcggccaggcgttgcgctggatgacggtgttgatgccggcctcgttggccttggcaatcagttcgtcgccgagctcatcctcgccgaccgcgctgatagcccagccttcggtgccgttcttcatcgcgtggtaggcgaagttgacgggggcgccgccggctcgcttgccgctcggcagcatatcccacagcagttcaccgaggctcagaccgatcggggtagtcatggttggtttcctttcctttgtttcttttaccgggtgtttcgtatggaacatcttgtgatgtcggcgcttggtttaggagacgtcgaagaacatcgaggggtgttcgaggaattgggtcaccgccactgctgcggcaccggagaccgccgcgtcggcggacagggtggataggctgatggaagtggaggcattgatttcggggatggcacgttcggccaccgtggcgcgcgcctcatcgagcagtatcgggccggcttcggacacgatgtcgccgatgatgatgtgctcaggattgtatccattgaagatggtgacgcatccgtagccgacgtatcgggcgacttcgcggacaatggcgattgacgcttcgtcgccgtcgccggctttggcgaacagggcgcgggcggcttcggtgtgggtcatatcggccgcgccgggaaccacggtgccatcggcgatgagcatgtcgtgaatggcgggggtggagcagtagcgttcaaggcagccggcgttgccgcaatcgcaggggcggccgttgacgtcgatggagatgtgtccgatttcggtggcggcaccgaggaagccgttgatgagacgaccgttgtcgatgacgccgaggcccacgccttcgccgaccagataataggcgaggttgccgtcggtgtgcaccgacgggtcgaagagataatgtgcgagggctccggcgcgggcgtcctgttcgatgaacacaggcacgcggaaagcggtggcgaattcgtcgatgaagttgattttgcgccagccctgcatgctggacaccacggcggtgcggcctacgttacgcaggtaggggccgggcaccgccatgccgatggccacaatggacgggtcgttgccaagcagttgttcgacgcgctggtggatggtgacgatggtgtcgttgatggtgttgtcgtacaccgtgggcaggttttcaaagctcagggtgttgccacacaggtcgaacacgccgatctgcaccagcgagcgggcgaatttgatgccgatgatgcggaaccgcgtggtgtcgagtttgagaccgatggaacggcggttcttggaaccttccaaatcgccggtctcttcaatcatgccggcctcgataaggcgtgcggtgattttggtgatggccgcgggggtgagttccagtgccttggcgatttgcgcgcgggagctgatgccgttgtgatacaggtgcttgacgatgcgggagcggttggattcggagacactggcttgggaagtggcatgggtggtgtttgttgccatcggtcttaagtcctccttgtctgcaccgttgcgagttgttccgctcgtctttgaatctgaacttgattaagatattaacgctgttaattgattgacgcaatcaatatgtcattcggtgtgtcgtgcatgtgagtgtcgtcttggggggaatttgttaagatggttgtcaatagtcggatgcacactgatatcaagcgaaacgttcgatgaagaacaggggaggactgatgtctgaaaacactatgaacaatctcaaaatcggtgttgacgtgggcggaacaaaaatcgaagctgtgctggttgacgcaatgggcacggtattgggttccgcccgtattcccgccaggcatggcaacgatgccgtgatcgaagacatcgtcgctgtagcacatcaggcagcgggtgagcgttttgacgaggtgagggccatcggtgtcggtaccccgggcacggtggattcggccagcgggcatgtgggcaatatcgtgaatctcgacgtggtctcgctggatatggggccgttggtctcgcagcgttcgggcgtgccggcccatgtggaaaacgacgtcaatgccgccgccgtcggcgcggccaccgtattgggcggtgcggacggcatggccggtaccattgcgttcctgaacttcggcaccggactggctgcgggcatcgtcgaaaacggcgttctgatgcatggctatagcggcgcggccggcgaaatcggccatatcccagtcgaacctcatcgcctcaagtgcccttgcgggcaatacggatgcttggaaacagtctgctcgggcgcatccgtggggcgtctgtggcccaacgccgacccgccgatgcccgacctgattcgtcgcgcgaaaaagcgggaggccaaggccgtcgatgtgctggacatggtagtgcgcgccatcggcgacaccatacaaatcctggctcagtccgttgatccgcgactcatcatcttgggcggtggcatggccaaaaccggcgaaccattggtcgaggtgatcacggctgagctgcgccggcgcgaatcgcaatgccgattcctcgaaacgctggacctgccggcccggctgcgtctggcacctgtcggccaaccagtcggagccatcggtgccgccatggcggcgtagtctggcatagtgccggggcatgggagatgaggcctcagatttgtctccgaggccccatctcccacgcagtcctatatcgctttatgtcgtgctgtgccgcgcttggtcttgcgcgtttcgttgccggggtgaccggcttttatttggccaagtgttggaagaccacggcgatggcctcgccctgtacggtgatgtcaggtccgcattcgcagcgccgaatcaccgtgtgtttgtggaaggacgaggatgtggcggcatccagatattgctgggccgcgccgatgaacgtcgcgttgatgatgttcggctggccatagacgcatacgtctgccatatccaaaaggcccacaggcatggccagggcttggccaagatagcggcccgcccgagcaaggataccctgatgctgctccacgtctgctgcgctgagttgcttcttcaatgcggttccggaaatcatcgtctccaagcaaccgtgcttgccgcaagggcacagcggcccgtcaagatcgatggaaatatggccgagctcgccagccgcgtgcagttcgccgattaccggcgtgtccgagagcagaatcgccgaaccgatgcctctttcgatgcgcacgaaaagcatattcggcccgccttggccaaagaaacgttcggtgagcatggctgcggtggcgtcgttgctgacgtttacttcaagtccgaaatgttcggcgattggcgtggacaggtcgagattgttccagccgcgcatcgtggaggagcggaccacgccgttgtctaccacgccgggggaggcgactccgatgccgatgacctcgccatcggacatgcccagcatcttctcgataagttcgatgatcacatccacggaaacgaatgagccggtgttcagggtgacttcggcgtgacgcagcggctggccgagcagattggtgactgcgccgtgcagcaggtgctcctgcgtcaggtcgatgctgatgatgcgcagtcgatcgatatcgatgctcagcagtgtgcctcgtttgcctttgccgccgctgggtgcctgaccggtctcgcgcagcaatccttcctccagcatctgaccgaccacatcggaaacggccgcgcggctcaatccggtgcgtcggccgagctcggcgcgcgaatactggttggtggggaacaacaacctgaagataagttggcggttcttgcggcgcacatcggcgggggaagccttggccgcatggtcgtcggtcgttgtgttgagaccgagatatgacatgtttcctcctacctgatggtgagcgagtggacggcgattgttgttccatacacagcttagacggtgaagcgcaatttcgtcgttgaaactgttatgaaacttcactaataaattccagtgtacctgtgtgaagcgtcaggaaacaccgtgagtgttcataaggtccaaaattgttactatcattaacaaatagcgaatcaccaatcggcgctacgccgaacggtggttggaacgccgcgcgcacccggacgtgacaaggatgttgccattatccgcaagacgggcggcggtacagcgactcgcatcgggcgggccgcacggaactggaggaaaccgatgccggaaatcatcattgtcaagaacgaagccgaggccggcgagatttacggccgttgcgtggcggacctgatcaaagcaaagccggacgccgtgctgggcctggccactggctccagcccgctggccgcctatcaggcgctcgccaagatcgtcaaggacgaggccattgacgtttcgggcgtgcgtggtttcgcgcttgacgaatacatcgggctgccgctgacccatcccgagtcctatcatgcgaccatccatcgcaccgtggtcgaaccgcttggcctggacccggccaaggtccatgtgcccggcgacgtactcaacggcactccgctcgaagacggcgacaaagtcgcgctggccggcccggcctatgatcatgccatcgaagccgctggcggcatcgacgtgcagatcctcggcatcggcaccgacggccacgtcggcttcaacgagcccggttcctcgctggcctccggcactcgcgtcaagaccttggccgaacagacccgcatcgacaacgcgcgcttcttcgacaacgacatcaaccaggtgcccacccactgcatcacgcagggtattggcacgatcatgaaggcccgtcacctcgtgctgctggcgttcggcgccggcaaggccgaagccatcgaggagacggtggaaggcggcttgtccgcgttctgcccggcttccgcgctgcagatgcacccgcacgccacgattatcgtggatgaggaggccgcctctcgtctgcgccacaaggactactatcgctacgcctacacccacaagccggcctggcagggcatctgagttatcgtgtgctggcttccctctttgtgtgaggggagctgtcgaatgtaatgagactgagggtggttatcggcggcggcatatgtgtattgcttcccgattggaccaccctcagtctcgtttcgcgagccagctcccgttggcgggagcgcatgagcggtaaggagaacaacatgtctgataggaacgagatagtctcgcgcgtgaccgcggcactggagggcaagccggctccggtggcgattcgcaacgcgcgcaaggtggatgcgtgcggcgaacggcgcgggtattgggtcgtctccgatgccgccggcgtcatcgtggcggccggcacgggggaggaggccttcgagcactactgccgcacggtggggctcgacccggccgatcgcaacgcggtcatcgacgccgaaggccatattctgacccccggctacgtggacatccacgcgcacggcgcatgggagaagagcttcgacgacgggtcggatggcatcgatgtggcgcgggccggccacgccgtgcacggcaccacgcgccaggtgctctcgctgatcaccaatcccgtggacgtgatctgccggaacatccgcaccgtccgcgccaagatggagtccggccgccccgacatcctaggctgtcatctggaaggtccgttcctggctctggcccgcaagggcgcacatgacccggaatgtctcaaggatccggtacccgacatcgtcgacgacatgcttgaggcttcaggcgcggcgaacggcaagattggctgcatccgccagatcaccatcgcccccgaactaccccacggcatctccgccatccgccagttcgccgctgccggcgtggtgccggccgtgggccactgcgacgccgactacgagaccgccaaagccggcttcgacgcgggcgcgggcatcatgacccacatgttcaacgcgatgaacggcctgcaccaccgcgagcccggtccgattccggccgcggtggaggatccgcgcgtcaccatcgagctcatcaacgacggatttcacgtgcaggatccgatggtgagcctctccttccggttcgcgcctcatcgtacggccttcgtaaccgatgcaatggccgcgaccgactgcccggacggtgcctacaagttgggtgcactggacgtgaacgtggtcgacgggcatgcgcgtttggtctccaacggcgccatcgccggctccactctgctgctggaggtcgccgtgcgccgtgcggtgtgcgaactgggcttgagcccggtggacgcggtcgaggccgccacattgacgccggccaaggcgttcggcttcgaccggccgaacccggtcaccggggtgcctatcggcctcatcgcccccggcttcgccgccgatttcaaccttgccgatccgaccgattggacggtcgaacaggtgtggtgcgcgggccgcaagctcaagtagcagtaggccgaccggttgacgaatggaaagcattcgtctacaagcatgttcaaatggtgacatgatagcatgttcatctcaccatttgaacgttattcacgtcgtaatacaagaatccgtaatactgctcgataccgcataaaaccggccatggtcgccacaagcgaaacataagtcgatggctgtggaaacgcaggagtaacacatcctcaccatagtcaggcggtaatccacgcccgcagtgatggcgtggaaacaagttatgagagaggattcctgttgaattccaagaagattctggccgccgccgtctccgtggccgccatcgcatccctgaccgcctgcggcggtgtgaaggatgacaccaccgcaggcgccgattccggcaacgccatcaccatcggcaccaccgataagatcaccagcctggaccccgccggctcctacgacaacggctcctacgccgtgcagatccaggtgttcccgttcctgtatgcccaggactacaacacctccgagctgagcccggacatcgccgccgatgacggtacctggaacgatgacggcaccgaattcaccgtcaagctcaaggacggcctgaagtttgccaacggcaacgacctgaccgcttccgacgtcaagttctcctacgaccgcatcaagaagatcaacgacccgaacggcccgagctccctgctcgccaacgtcgaatccgtgaccgctaaggacgacaccaccgtggtgttcaaggattccgtgcctttcgacgtgactttgaagcaggtcatgtccagccccgccggcccgatcgtcgatgaggataccttcgacgccgacaagctcaccgacgccgacaccatcgtctccaagaaggccttcgccggcccgtacacgctgaccgccttcaagatcaacgagtccgccgcctacgctaagaacgactcctacaagggcctgaccccggccaagaactccgccgtgcaggtcaagtacttcgccgacgcctccaacctgaagatggccgtccagcagggccaggtcgacgtggcctaccgctccctgagcccgaccgacatcgaggacctctccaaggactccaaggtcaaggtcgtcaagggcccgggcggtgaggagcgcttcatcgccttcaacttcaagattcagccctacggtgaatcccagcccgacgccgacgctaacaaggccaaggccgtgcgccaggccgtcgccaacctcatcgaccgcgaagagctctccaccaaggtctacaagggcacctacaccccgatgtactccttcatcccggacggcctggccggtcacgatgacacgctgaagtccgcctacggcgacggcaacggcaagccgagcaccgagaaggccaagaaggtcctcgccgatgccggcgtcaccaccccggtcgacctcaagctccagtacaacagcgaccactatggctccgcctccgccgacgagtacgcggccttgaagtcccagcttgaggaaggcggcctgttcaaggtcgacctgcagtccaccgaatggacccagtactccaaggaccgcgtggtcaccgacgattccgacggtgtgtacccggtctaccagctcggctggttcccggactactccgacccggacaactacctgtccccgttcttccgcgacggcaacttcgtgaacaacggctactccaacaaggaagtcaacgacctgatcgtcaagcaggccggcgagaaggatgcctccgcccgtgaggacatcctcaagcaggtccagaaactcgagaccgaagacctctccaccatcccgctgctgcagggtgcccaggtcgccgtcaccggcacctccgtgaagggtgtcaccctcgacgcttccttccgcttccgctacgcctccgtcaccaagggctgatccagcatgagctcccctctttgaggggggagctgtctggcgacggcagactgaggggagcccaactcgtatgactcccctcagtcggcttcgccgccagctcccctcggagaggggagcctttattgctttatataccgattaccaacaccaaggagcatcgcgtgtcagacagcgccacagcgacctccagcaccactccggcgaaagccaagacgaagaagaaccgactgtcaggtagtttcttccgcttcgtgctgacgaggttcctcctcattatccccaccgttttcattctggtcaccatcgtgttcttcgtgatgcgcgccaccggcgacccgatttccgccgccctgggcggccgcctgacacccgccgaactccagcagcgcatccacgcggccggctatgaccgcccgctgatcgtgcaatacgtcgactatcttggcggcctgctgcacggcgacctcggcacgacgctgaccgataaccagccggtgatcagcatccttacgcactacggcgccgccacattcgaactggccttcctcgccctgatcgtggcgctgatcgtcggcatcggcctgggccgactcgccgcccgcaaacgcgaccgtgccgccgacgccggcatccgcatcttcgccatcctgtgctacgccaccccggtgttcttcctcggcctcgtgctgaagctcatcttcgccgtctggctcaacatcctgccagcctccggccgctccgacctgaactccgaaatgcagttcacccgtctggtatcgccgaccggcttctacatcatcgacgccatccagctcggcgacatgaacgtgctcgtcgacgtgctgcgccacgccgtgctgccggccgtcgccctaggcctgctgaccgccggcgtgttcatccgtctggtgcgcaccaacgtcatctccacctacaattccggctacgtcgaggccgcccgctcgcgcggcgtctccgaaaagcgcctgctcaacaagcacgcctggcggccggccctgatcccgatcatcaccgtcatgggcatgcagatcgccctgatgctcgccggtgcggtcctgaccgaaaccaccttcgaatggaagggcctgggcttcatgctgtcccagtacctgaaggcccgtgacttcgtggccgtgcagggcatcgtgatccttatcgccatcatcgtggccgtcgtcaacttcctcgtcgacgtcatcgccgcgcttatcgacccgagagtgaggtactgagatgaccaccgcatcctccgacaagatcaccgtccccggtgacgaccgcctcaccaagctcaacgtcagcaccaagacgccgttctggaccaagattccaatcatcaaggaactgcgcgtggcggtcggctggcagaagggcatgctgatcaccggtctcgcgatcaccgcgttcttcctgctcgtggccctcttcgccccgctgatcgccccctacggccacgcccagatcaaggccgccgacggcacgtccttcccggcgcaggccgcgccctccgccgaacacatctggggcaccaccgccgccggattcgatgtgttctcccgtgtggtgtggggtgcccgcaccgccgtcatcgccatcgtcgtggccgtgctgctctccatcttcgccggcgtgctgcttggtctggtgtccggctactacggtggctgggtggaccgcatcctggtgatgatcgccgacgccgtctactccttcccctcgctgctgctcgccattctgatggccatcatgatctcccacggccagtccggcctgtggagcggcatcctggcctccggcatctccatcaccgtggtgtacatcccgcagtatttccgcacaattcgcgccgaagtgatccgcatcaaggaatccgcgtatgtcgagtccgcgcgcgtggtcggcgcctccacctggcgcatcatgaccaagcacctgttcaagaactccacccgcacgctgccggtgatcctgacgctgaactcgtccgaagccatcctgaccctcgccggcctgggcttcctcggcttcggcatcgagccgaccgccgccgccgaatggggctacgacctgaaccgttcggtttccgacgtgaccgccggcatctggtggaccgccgtgttcccgggcatcgccatcgtgcttatcgtgctcggcatcacgctcgtgggcgaatcgctcaacgatctggccgacccgcgtctgcgcgcccgcaagtccgccggcgaagtggtcggatcgatcgaagacacgtccgtcgacccaaacgagaagccgtccgcacgcaacgaggtgatcgccgaactcgacgcgaacgtcgacccgccggccaccgtcaccgaccatgacccgaccatcgtcgcctccgaatggaccggcgaaggcaagccggaaggcaaggagtgagagatgagcgaagacaacaagaatctcgccgatatcaaggacctgtccgtctccttcatgaccgacgccggttccatcaaggccgtcgaggacgtgaacttcaccattccgcgcaagaccgtggtcggcgtggtcggcgaatccggttccggcaagtccgtgaccgcgcgctccatcatcaagctgctgccggagacggccaccacctccggtgccgtctacctgtccaagcgcgatggctccgattcgctggacgtgctctccctgagcggcgaacagctgcgcgaagtgcgtggttccgaggccgcgatggtgttccaggagcccaattcggtgctgaacccggtgtacaccatcggctggcagattgaagagggcctgcgcgcccacggcatgaaggacaagaaggaactgcgcgccaaggccatcgacatcctgaagaaggtcggcatcccggatgccgaaacccgcgtggactactacccgcaccagttctccggcggccagaagcagcgcatcgtcatcgccatggcgttggtgctgaaccccggcctgattctggccgacgagcccaccaccgccctcgacgtgaccgtgcaggccgaaattctcgacctgctgcgcctcgcccgtgacgagttcgacgcctccgtgctcatcatcacccacaacatgggcgtgatcgcggacatcgccgaccaggtggtcgtcatgtaccgcggccacgtggtcgagcagggcgacgtggagcagatcttctaccatccgaaggacgactacaccaagcgactgctgggtgccgtgccgcgcatcggtcagaagctggtcgtgcgcgaccgcgagggcaagccgatcgagcgcaaggccgattggcgcgaacagccgatcgccgttgaggccaagaacctgaccatcacgtacccgggccatctcatgcagcccgacttcaaggccgtggacggcgcgaacttcaccatccaccgctccgaagtgctgggcctggtgggcgagtccggttccggcaagtccaccaccggccgtgccatcgccggcctgcagaaggtgtccggcggctccctgaacgtgcttggcatcgagatgaacggcgtcaaggagcgtgacttcaagcccaagcgcgcggacattggtttcgtgttccaggatccgggctcctcgttcaacccgctgatgaccatcgcggagaatgtggccgagccgctgctcgtgcaccacaagtacggttccgtggccgaggccaagaactatgtgggcgacctgctggagatggtccagctgccgcgcgcctacatgaaccgtttcccgcatgagctgtccggcggccagcgccagagggcgtctttggcgcgtggtttggcgttgaagccgtcgctgctgatcgccgatgagccgacttctgcattggacgtgtcggtgcaggccaaggtgttggagctgttcaagcgactgcaggcggaaatcggcttcgcgtgcctgttcatcacccatgatttggcggtggtcgatatgctcgccgaccgcatcatggtgatgcataagggccagatcgtggagcacggcgatgccgaccagattatgcagcacccggagaacccgtacaccaagaagctgctggcctccctgcccgtgcccgacccgcgcgaacagcagcagcaccgcgcccacctccacgagctcctagcccaagaggcgtaatcgcatagcattggagctccctcgtcagagggagctaactttatatccgctagtactgctgcccatcgaactggaacagggcgtgggcgtcgccgtgctttttgttctcgatgtaagtatggaacagctccagccgctcgctcgtgctggccgccaggggagtgggcaggtcatccagatcgaaccagccgacgctgaggctttcctcgtcgcccacgaacggctcggcattgccgccgggcttcagggcgcacaggaacgaatgatccatgtacatggtgttgtcgccattggcgtaggtcagcaccttgtttgacgaggtgacggccaccaaatcggtgacgatggcatcgatgcctgtctcctccttgatttcgcgcaccaccgtgtccgccggctgttcgcccggctcgttgatgccgtagaccatcgcccattctcccgtgtccgaacgacggcccaacagcagttgaccatgttcgttcagtacacaaccggtcacgccattgagccatagcagatcatggccgatcttcttacgcaattccaacacaaattccggagtaggcacattgcctccttagtagaaaaaaggagctccctctgatgagggagcttaagggttacttggcttgggcagcctgcttaatatggtgcgcttcgcgcatgatttcattttcctcgcgcttgtcagcgttcggcgtcgcctacaatcagtccaccggactgattgctttacggctccgcatccacgcttcgacgtcgtcgatctgcttcgggatgccggcggaaatccattcggggccgttctcggtcatgagcacgtcgtcctcgatacggatgccgatgccgcggtattccggcggaatcagcagatcatcctcgcggaagtacagaccgggctcgatggtgaagatcatgccgggcgtgatcttcgcgccctgataggactcatagcgggcctgcgcgcaatcatgcacatcaagacctaggtggtgggccacgccgcaggcgagccaacggcggtgctgctggccttgcggagacagcgactcctcgacgctcaccggcagcagaccccaatcgtgcagacgttcggcgatcacacgcatgcaggcgtggtggatgtcggagtaggtggcacccggcttggcggcttcgaaaccggcctgctgcgagtcgagcacggcctggtacagacgcttctggaagtcggtgaacttgccgttggtcgggaaggtgcgggtgatgtcggccgtgtacagggaatcgacctcaacgccggcatccaccagcagcatgtcgccggtcttcaccacaccggtattgcgcatccagtgcagaatcggggcgtgggggccggaggccacgatggagtcgtaaccgatggcgttgcccagctcacgggacacggcgttgaacgcgccttcgaggatacgctcggaacgcggcttgtcgagcgcggccggcagtgcggagagcagacggtcgaagccgtgcttggtggcgtccacggccttgcgcatctcgttgatttcgtagccgtctttgaccatgcgtgcctcggcggcgaactcgtgcagcttgtcgtcggatgcggagttcttgtccggatcggcgaaaccgttggcctcgcggatggactcgaccatcgaggtgatttcgggatcggtctcgctgaccacgcgcacacgcacggcgccggcctcggcacccacgtccttggacagggcgtcggccagctgggcgatgtcgtgggtctcgatgccggtcatcgcctgcatctccttgaggccagcacgcgggccaacccagtattcgccgtagtgggcggacatgaagaagtcctcggtggagttgtcggcgcgaggtgccacgaacagttccggagtgtgcgtcttgccggcggcggcttcgggggagtcggggtcgaccgggttcaggaccagcacggcgccggcctcgtaatcggaacccagaccggtgtagtaggcgaacgtggtgtccgggcggaacatgtaatcgcaatcattgttgcgcaccttcggctggccggccggaatgaccagacgctcgcccgggaaggctttgcccagcgcctcaaggcgggctggcgtgaacttggaggattcgagaggcttgatctccggatcatcgtcggcccagccggacttcataaactccttgaatgcagccgactgcgggcgcagcgagcggttgttcacacggtcgctcatcgactggttcgcgcccggcgccgtagcgcgctcctcggcctcatattccttgtccttggcggtgatcacttcacccattgccactctcctgtatgtagttgttgtcgaatcatcgattcccacctcatactagtcggctttatgcgatgtgccacgattgacggctgacggtaaaaccaagtacggaatttggacggtcttccggacatgcccatatggcgagtgcatcgggctggaatgcgggcccgtttattgttctcggtagggaaggaggggcatgggctggagcttgccgattgatattggcatattttgcgggctgaatccatgtgaacccatgcgatgaaggttcatcgcatcacgggacccgctgctctgcggatgcctccatctggggcactctggctttgagcagttttacccgcagcggagtgcgttcgatgacgtcggcgtatgtgaaatggacgatttcggtggcaccggctcgtttcagtccctcgtcgcgtgctcgttccttggccaccacctcctgaatgctgcggttatcggtcatggctgggtccacgtatttttgtgtgccgtcatattcggccactatcacgcgcccgtcatcgagcttccatacgaaatcaacgcggtgctcggtattcgtctgagggtcggtcaccgttacctgaatacgcggcgtgaggaagcgatcctcgatgatggtgcctcgcgcgagggattctccaccattctcgctcctttcgtttgcatagcgcagcaggcggaatactcgggcataatcgattctccattgaacgcagtcggcggctatctcttccttggttattcccttggcaagggccgagtcaaagatcggcaacgcaaaccgaaaatcaaggtctatagcggcctcgaccaaggttctagccggtgatatcagggataggccggaggcctcgtaatgtgtcttcggattgttcatatcgggcatatagacatgtcgtaagcgctgatggcattgacgagatccatgatcggaagtcacgatggttatgcagccatcatgcaaatgccattgatgttcgaatccataagcacttactgccaccaagccgccaaaaacccactgaggatgctcttgcgcaagagcgcgggccatatgcaacgttcgctccggtggcgtcaaaccatcccagtatgcggtatttgcataaagactgggaatgccgtcatacactttcaacaactcgccactctgggcacggcggcgtagagcggtctgttccgcttcatttcttgaatagacgcatctcagctcattctgcgcggctgatatgagcgaggccactgctttgtgtgtcttcatgacgtcgagcgtagccggaacgaagcagcgtaagtatggatttcagccattgtggttctagcctcggagcttggctgtcttggagtgagatattcccgataatttcaaggtattaggccactaattcggaatagtggataacatgcaaaacttatccaccatcagtaatgtcattcgaacaacgtgctttggggattcgaacaagatatcatcggcgaaggcggatgtagctggtagagggcggcgaattgacggttaacagtgcttatgctttgtacgccgtcggtgctggttcagatattggctggcttctgtctgagtgtggaatctagcgtcggcgtgagtccaatggtcgtatcgtggccgacgatttgctgcgatttattggcggcatagatccagggcttggacggctgccgacggtgagagcagtcataacagtgaatgagcctctgcgagttcaaaagatgatgtagaggacgtttgtgagagtcgtttccggggcaagacatggtcgattgacgatgttgaaatttctcagcgacggcagaatggcatgccttggcgaggaggcgacactgagaggcgatggagtcgggattaatccaggttttggccagctaccgactcgcaagagcatcatagcgtcggtgtaccgccagaagctggcactgtaccgacgctgaatagcatcagcgtcgccggacatacaagttttggattgcagccgactaagaatgggatgccgacggcaagagccgcattgcaactatatgagatggcttcactgtgcgcgctgcaggaaaaggccgcccgcgcggcggcgacatatgagacggtttcactgtgcgcgcacgataaaccaccccggcggctaggatagagggaattgagggagtgcggctccacgcgtgaaggcaagaatcccgaaccatgcagggcaaacctgtgcgaggggagcttcctgcgcatgcggaagcggaatatatgcgggcatgcgtagacatgacgagaatggcacgaacacgtaagtggcatacgcactccgaacggttcaacagcaacacgagcagaggtcagaagaggatatgtcattcgagcatccgaatcggaacaacgagagcatgcgggacgtcgaactggacatcatgagccgcccgccggagcataacaccaccaatctggatctcgaccggatgaacctgatgctcgacatcctgggccacccggagcagtcgttccgcgtgattcatatcaccggtaccaacggcaaaggctccaccgcacgcatggccgaggccatctgccgcgcctacggcatgcgcaccggcctgtacacgtcgccgcatctggagaagatcaacgagcgtatcgccatcgacggccagcagctgtccgacgacgatttcatcgacatctgggaccagaccaaggatctcgtggccctggtggacgccaagatggaggagcaaggcaagccgaagatgagcttcttcgaggtgctcaccgccatggccatctggaagttcgccgacacgcccgtggacgtggccatcgtcgaggtcggcatgggaggcctgtgggacgccaccaacgtgctcaacgcggatgcggccatcatcggcccggtggacatggaccacatgcagtggctgggcgacaccgtcgaacagatcgccaccgagaaggccggcatcatcaagccgaactgcaccgccatcatcgggcctcagccgcatgaggaagccgtcatgccgattctcaccgaagccgccgaacgcaaccacgccatgctcgtgcgcgacggctacgaaatgaccgtgtccgaccgtatggccgcagtcggcggccaggtcgccaccctgaccacgcccaacggcacttacgagggcgtgccgatcgccaagttcggcgagcatcaggcccacaacgcgcttgccgcgcttgccgcctctgaagtggtgattccggtcaatggcccgctggacggcgacttggtgggcgaggcgttgagctcggtcaagattcccggacgcatcgaacagatccgcacctcaccgaccatcattctggatggcggacacaacgtgaatgccgccgaagccctacgcaaggccatagaggaaagctacgacttcaagcagctggtcggcgtggtcgccatgatgcgcgacaagcaggtcgaggaatatctgggtgttctggagccgatcctgagctccgtggtggtcaccgagaactcgtggcgcgagcgtgtgatgccggccgatgagctcgagaagattgccgtggacgtgttcggccgtgaccgtgtgatcaaggaggcgaacctgcccgacgcgattcagactgccgtcaacatggtcgatgccgaggacgagctgggcgtgggctacggccacggcgtgcttatctgcggcagcttcgtcaccgccggcgacgcacgcctgatgcttgaggagcatgccagccccacgatgaggcaggccatggccgtccatcagccggcggtcgacccggacggttcggatcagccggcagacaaggccgaggatgaggccgccgacaacctcgaggattcggtgagcccggacgacttcgacgtgttcgacgtcctcggcctcggcaaggaacaggccagtgacgtcggtaacgccggcaccggcacggccagcgccgacacaggcgccgtcaccgacgattccgccgacgcccggtaacccgaatccaaggcatatcggatacccggacgcccgacatacggaaaacagtctcacgccatgtatctcaaggaactcaccctccgcggattcaaatccttcgcctccgccaccacgctgcgcttcgagcccggcatcacggcggtcgtcggccccaacggttcgggcaagtcgaacatcgtcgacgccctgacctgggtgatgggtgagcaaggtgccaaaaaccttcgcggcacttcgatggaggacgtgattttcgcgggcacgtcctcccgcccgccattgggccgtgcacaggtgagcctgaccatcgataattccgaccacacgctcgatatcgattacacggaagtcaccatatcccgcaccatcttccgcaacggcggctccgaatacgcgatcaacggctcgcaatgccgtctgctcgacattcaggaactcctttccgataccggtcttggccagcagatgcacgtgattgtgggtcagggacgattggatgcgattctgaaggccgacccgtccggccaccgcgcgttcatcgaagaggccgccggcatcctgaagcaccgcaagcgcaaggaacgcgcgttgcgcaagttggccaataccgaaacgaacctgagccgacttgacgatttgctgggggagattcaccgccagctcggccccctcggacgccaggcacgcatctcccggcgcgccgacgcgattcagatatccgtacgcgacgcccaagcacgcctgtatgccgaagacgcccaacgctcgatgaaccgccgcgacacggtacgtcaagagcttggcgatgtgcgcaaccagctggccgtcgcccaacgtgaactcgcccacgtcaaagtacgcatcgaacaggtcgaggcgttgagctctgaatccagtccgaccatcgccaaggccaaccaatactggcatgaattctcacagacccgtgaacgactgaacgcgctcgcccagttggccgaagagcgcagccggtcactcaccggccagatcgtcaccaacttcggtgaggatcccggcatgctcatcaaacgagccgaggaactggagtctcaggccgcggcacaaaccaaggccgtggccgatgcacgcatcgcactcgacaaggccaccgaggaacgcgccgacgacgagaagaagcttgcctcagtccgccagaccttgacggaactgcgcaaaaccgcacaggagcgcgatgcgcagatcgcccgactgcgcgaactcatcgcccgcgaggaatccgccgtgcaactggcgaccagccgcgccaaggattacgcctcccaacgcgacttgctgacttcccagcgcgacgatgcccagcaacagctggacgcattgcgcagcgaagcagactccattgccgacgatgacggtgccgcattggacgccgcgcgtgcaacgctcgccgaatgccgcgaacgactgaacgaactcgccgataagcagcgcgagatacagtccaagatcatctcgctcaaatccaaggccgatgcgcttgccgacacgctaggcagccgcaatgcctccggatcattggaacgcgacacggacgtggcctcgcttggccgactcaccgacttcatccatgtggccgaaggctgggaagaagccgtggcccacgcgctcgaccagtatgccagcgccatcgtggtgcccgaggcaggcaacatgttgcacgccctcgaacgcgctcgggaagataagctcggcaaagccgtggtgctgaccgcgagcattgccggcgatcccgccacagagccgggcacggagtcggaggagagtagcgccgagaacacggcggccgccccgcgatcgggcagcgcgctggcagcactcgtcactgcgaacccggatgccgagaacccggcacaggccgaagctgtcgtgcacaccgtgcgtctcctgctggctgatgtagccatggccggcaccgccgacgaagcacagcacatcgtggcatccggcgaagccatgcgggccgtcaccaagaacggcgagaccttcacacacggcgtggcggcggtcggcggctcttccatctctcaatcggacctgtctctggccgcccgtcgagacaaagcattggcacaggtcaaacagttggccgcccaagacggcggaatggctgagcaagtggccgaggccaaagccaaacgcgatgaagcggcccgactcgtcgaccaggaatccgccaaacgcaccgaagcccggctcaaagcccaacaggcggagaaatctctgaaatccgccacagaccgcgtcgcatcgttcacccgtcagcttgagcagctggataggaaaatcaccgagacccaagagaatcgcaacgagcatcagctcaagctcgacgatctcaatcgcgctttggcatcggcccagcaatccacagcggaacatgccgatttcgacgaacttgatgaacgtgaacgcacgctggagcgcgaactgaacctgactcgcgagcatgaggtcgccgcgaaaatcgcgtggaccgaagcaagccgcaaaggggagtcactgagccgacaggccgggctgctgcgggacaacgccagagaagccgccgaacgccgcgcccgcatcgaggcgttgaacgatcgcagacgcgagcaggccgcacacctgcaaggcgtggccgatgacgcgcgagcagtggccgccatggtggaacatacgctgcatgacgtggccgccaaacgagacgagctgcaggccgccgcctccagccatgacgaggaactcaaggccctgcgcgcgcagcgcaaccagatcgagcccaaggtcaccgatctgaccgggcgcgaacatgccttggatgtaaaccgcgaacggttggccgccgaatccgggcagctcatgcagaaagtgtccgacgaactcggtctcactttggaggaattggttagtggttacggccccgaacagccggtgcccgtgctggatgatgagggcaaccctgtgccgttggatgagacggaagctgaggctgggaccgaagagggagaaaccgggggagaggccggcaccaacggcgattccgcccgctttaagaccgtgccgtataaccgtcaggagcagaagaagcgtctcgataaggctcgccgcgatctggccgcactcggtaagatcaaccctttggccaccgaggaattcgaagcgcttgaggagcggaacaagtatctcaatgatcagcgcaacgatgtggtcaaatcacgtgacgatttgatgcagctcatcaaggatctcgattccacgatggtccaggtgttcaaatccgcgttcgacgataccgccgaggcattcgagcagatgttcgccacgctgttcccaggcggcaccggacgactgcgcctggaaaacccggaagacatgctcaccaccggcgtactggtcgaggccagcccggccggcaagcgcgtcaaacagctgagcctcctgtccggcggcgaacgttcgctgaccgcgctggcgctgctgttcgcgattttcaccgcccgccccagcccgttctatgtgatggacgaggtcgaggccgcgttggacgacgtgaacctgacccgtttgattaatgcgttcaatgagctacgcgcccatgcgcagctcatcatcattacgcaccagcaacgcaccatgtcgattgccgacgcgctttacggcgtaaccatgagagccgatggcgtaacagccgtggtgagtcaaaaactcgaacgataaacgaatggttcccgctggcaggaactggcgccacaggtgacagagggcggtccatatcgaaagaccgccctcagtctcgcttcgttcgacagctcccgccagcgggagcggggcggtattagcgcaatgccttgcgcacgccctgtacagtctgcagcgtcttgtagaagacctttttgatgggtacgtcgcgggcgggggccaccggggtgatttcctcggtgaacttgcacttgaactcgttaaggcccttgagagacggcgcgaagtcggagccaatgcccatgagatcgtattcagtaataccctgcgagcctaggatgcagcattcggaatacagcagcttgtcggtcacatgcagacgcataacctcgttgcgcatgccggcatagtagcgcaccgcatgcgtgccgttcacggtgacaatcgaccatgccaccacacggtcttcaatacgtgcggcgaacacacggcaatggtcggcacccaacgcgccgatcatatcggaatagtcgctcatcggagctggcgtgactccatcgcgctggccggtctcgaccatcacatcgtaatattcggagaaatcggccagcgccttatccgtctcatcggcaacctcggccgggcactcacgcagagacttgcgcacgtcacggcgtccacgacgcttcatccgagccagaatctcatcatcgccaccggtgacgtcgatgaccacggtctggtcgtacggcactgtggacagcaccttctccgtaccatcggcgaaccaggtgtcgatacgcaggaacgcgatgttcttgtcggccttcttgacggtgtccacgatggcgtcgacgacctcgcgctcctcagcctcggtgggcttggcgacccacgccggcccgtgcatcgagcgcagataatgataaccgtgcgtctcaaaatcgataaaggagatcacggcgaccaattcaccatcacgcttgatcagataatcgccccatggcgtgcgtccgtcgatatccgcctgaaaaccagaccaaaccttggtctgttcgataggcaacgtgatgccggccttctcggcttcggcttccagtgtggctccgtcaactttctccaacgtgatcattacgattcagctatcctttttcgttcgtatccgtatgtcgtgtttctggtttggtcgtattgcgcgtgatctgatgtgggccaatcgggatccgatcaggatctgattggccggaatcccgtcacaagccaaacatgcgttcgacgacgtgatcgtcgccgtcgaacggcacatgcttgtgatggtccttgatccaacgctcgttgcccttgccgatgatcagcaggatgttgaatcggtcggcgtgcgcacgggcatcgtaaatggcgttggtgatggccgtcggacggtcggaaatcaccgtggaggccacatccttgttcgtgatgtagccttgcatttccatgcagatgtcgatgaacggctcggtgtccgtatcttcggcggtgaaaatgaagttcgcgatacggttctcggcagcctcgacgatttccttacgacgatcgtaggccttgttgccggccgatccggtcaccagcgtgatacgcgggttttcctcgccccaacgctcgtagacgaagtcaagcagcgcggtgacggatgcgtagttgtgcgcataatcaacgatggcgagcgtgttcgactgcgggtcgcggaactgttccatacggccggcgatacgtacggattcgatggcgtgcagtgcgtcggcgtcatcgagcgatacgccagccgcatgggcgatggcgatggccgccgccgcattgaggtagttgaagtcgccatcgatggacagatggtagtcgccaagggtctgatctccgtcggcgatgtggaaggaggcgtgctccgggtcggcgggccaggcgacgacgtccgcactggtgccggcattatccgcgtcatgcagggcgaaggtggtcacgccgatgccggctgccgccgcgtcctcccgcaacagatcggcgtgcagactgtccgcgccgagtaccagcgacttcgcgttggcgatgatctggcgcttgcaatacaggtaatcctcgaacgtggggtgttcgatcgggctgatgtggtcgggggagatgttcaggaacgcggccacatcgaaagtcaggccatagacgcggtccaccttgtacgcctgggaggagacctccatcaccagatactccatgccgttatcggccgcctcgcgcatcatgcggaaggcgtccatcgattcgggcgtggtcagatcggactcgacgtaggtgtggccgtcaaggcaattatcgaccgaggagaacaatgcggccttgccaccggagacggcgttgataagcgcctgcgtgaagtacgaggtggtcgtcttgcccttggtgccggtgacgccgatgaccgtgagctcgttctgcggatatccgtagaacgcggcggacagcaggctcatcgccttgcgtgcgtcgttgacgatcaggccgggggtggcggttgcggctgagtactcggtttcggccacgtatgcggccaggccggcttcgtcgatgccgttcagatactcggccttgaatcggcccttgcagcacagcagggtgccctgcgtgaccttgcgggtgtcgtaggtgatgccggcgaacggttcatccgccgaagcgatacgggccgggtcgtcggtccagacatccccttggatgatttcacgcagcagatggtgttccttgagcaggtcagcggccgaagccaaagtcaaagccataattgtttctccctattatctagccgatacgccattctacaggtggggtgtagcgtgttgtgactcatacgtcatcgaccacgatatgggcacatgatttgattagaatggtgaaccgtgacgacaagcgaagcaactacgcaatccgggcagtcagccggatcgggcgagtccatggcagccaagcgcgccagattcgagcagctcgccatgcccgccgtcaatgcactgtaccggcaggcgatgaggctgaccaacaatcccgatgacgcgcaggatctggtccaggacaccttcgaacgcgggttcaaggccttcgactcatttcagccgggctccaacttcgaggcgtggatgaccaccatcgagcgcaatgcctacttcaaccagtatgccaaggccaagcggcgcccgcagcgtgccaacgactccactggcgaatacgacgattgggacatttacgatgccgccgaacatacgtcgggcgggctcaagtccgctgaagaggagtatttggacgccttcgcgcccgaggaaatcatggccgcgctcgccaaactctcgccggaacgccggcaggtgttcatcgacgccgccatcgacggcaagtcctaccagcaggtggccgatgagcagggcgtgaaaatcggcacggtgatgagccgcctgaatcgcgcccgcacgcaactcaagcgtgagctcgcctcgtatgcgaaagagcgcgggtacgtgactggttcgtcggctggttcacggactggttcgtcggctggttcaccatccgcgaagttgagcgaaaacgttggtcgaatcgccgattccggccataatgaaagtagtgaacaaactgttggcagcaatggcgacacgcaagccgtagtgagacatagtcatgcgactcacgcccacacgccacaacagtcaagcaagctttcgggaaaggagatctgatgaacgatcagccggtagagcgtactcgccatatctccataacccgtacggcggccgatggcacggtaagccagaccgaagtgcatatcacggcggtgcatcatcgttcagtagataccggctcggccgctgcgtcggtccagacagacgtgcatatcgttacggagggcgactgttttgacccccgtacctgctgcgacgagcgtgaacaggcgttgattgccgcgttgcgtgcctacttgcgcccggatgtggcacccgaatgtctgatggcccggctcaaggccacgcttgatcactgctgcggcgaagataagtaacgacatatacaacaaggcccgtctgatgtatcatcagacgggccttgagcgttctataagaaacgcgaagaatcaggcgttaggacgcttgccgtggttggcggccttcttacgacgatccttgcgcttacgtccgcgcatgcccatgatggactcctttgctgcagtaaaaaaataagccttcggaattatgccacataagtacgacgtgatgcaacacgggtgtccatgtggcgatgatcgtcaggcttggttattcggtttttcagatttgttcggcgtggaaggtgaccacggtggtgtagtcatcgcccggctcgagcacaaccagatccttgccggtgcggaaggcgtcggcgtaggcggtcatcggttcgacggccacgccggcctgacgagccttcccgccgatttcgttgccggtgcacacctgccaggagttgatggtcttgtcgccggtcagcgtgaccttgatgccgtcggggcgggtgaacacggcggaagtgctgccatcttcgccgcggttggtgatatcggtccaggcatcgtcgaagccacgtccctccagcgtggggttatcgcgcaggtcgaagatgccggaaaccggctcttcaccggtgggcagcaggtgttcgtctacggtcacgtgggtatcgcagtgcagctcaagacggcaggactcgttgtcggcggtaatggcctgaccggtggcgtgcttgccgttggccagccacgggtggatgccaaatgcccatggggccttcacgctgtcgttgttgtgcacggtgaaggtttccgtgagaccgttctcgtcaagtgcataagtggcggtgatggtgatatcaaacgggtagccggcgatgtcgggggaacgccaggagagcgtcacatgtgattcctgcaaatcaacgagctcccacatgtagcggtaggcgtagccgtgcagggaggattggcggtcgaactcgtcgatcggcatctggtagtcttcgccatcgaaagaatactgaccattggtcacgcggttcgggtacggtgccagcacccagccgttgcagcaggggatgaccttgttcgggtcgaaggggacgatgaggtcttcgccgcgccacttcagctcgcgcaggctggcacccagttcggtgacgacggcactccattcgccggacgagatgacatattggttaccagtgcgaggcttcaaagccatagtgcacactcctttgtgaaacagattgttaccgctcacaatcgtatcgcataagtcccaagacgcggcggcacataaggataaaaaattggctcccctctggaggggagccagcgtaacggaactacttctggactacttcgtagcggaccacagtggtgtagtcgccattgggggcgagcgtcaccaagtggtcaccagtgcggaaggcattggccggggcggtcatcggttcgacggcgataccatacggatgctcggcgaacggcgcgccagtggcggtgtagcactgccaagcattgatcgtctcatcgccaatgagcttcacttcaataccgtccgggcgggtgaatgtggtggtggtcgtaccatcggcggcacgctccacgtcgacccaggcatcatcaaaggcgcggccttcgagcgtcgggccatcgttcaggtcgtagatgccggtaaccggttcggtgccggtgggaatcagcgcctcgttcaccgtcacatgactggcggccttgatctgcaggtggcaggcggcggagtcggagtcacgctcggcggaagtcgcgccctgcttgccattggccagccacggatgcaggccgagagcccacggtgccggctcgtcgccatcattgcgggcattgacggtcacggtcatgccgttgttgccgagttcgtatgtgacggtcacggtcacatcgaacgggtatccgtccaggttggggaagcgcagtgaaagcgtcacggcgctatcggtcaacgattcaagcttccacatgtagtggtaggcgtatccgtggttcgcgttgttgcgcggtgcgggatgatattcgttgaccggcgcgcagtaatgcttgccattgaaatcgtattcgccgttttcgatgcggtttggccacggggccagcacataaccgttacaggtgggggtcaggtcgttgactccgaacgggcagaaaatttccttgccttgataatcgaatcggcgaatcttggcgccgagttcgcagatgacggcggaataatcgccatagtgaatcgaatactgatttccggtgcgtggtgttttactcgtcatggaatcactcccgtagtgaggttggtgggccggtagctcctgctatcgctggccccagtctagcgcgtctcctctatcgaggcggggattggcgatagccggcatataataaacaattcgtacagacacggtagcaatacgtggagtgacgagtctcacaccatcatgcgagaagcacgtggattccttggaaaccggtgattcgtgggagacgcggaatagttgtgacggcagattcctgtaatccctgccttacactggaaaaacactattgacgttcaggaggttccgatgaccaaaagcgttgtgctcgctgatccgcgaggcttctgcgcgggtgtggaccgtgcgattcttaccgtacagaccattctcaaagccgcggaggcttccggaaagcggacgcgcgaggatgggctgcccccggtatatgtgcgccggcagatcgtgcacaacaagcatgtggtcgaggatttggccgggcaaggcgcggtgttcgtccaggaattggcggagattccggatgctgctgcccaagcgggtattccggtggtgttttccgcccatggcgtatctccggtagtgaaggcggaagccgaacgtcgtggcatgcatgtggtggatgccacctgccctctggtgggtaaggtgcaccgtgaggtgctgcgtttcgtgcgcgaggggtatgaaatcgtctatatcgggcacaagggccacgatgaagcagtcggcgtggtgggggagaaccccgaacatgtgcacttgatcgagcatgaatcggatgtcgattcgttggattttgcgcccgacaccaagctggtgctgctctcgcagaccacgttgagcgtggatgagaccgccggcaccattgccgcgctgaaggccaagttcccgtggattcaagagccgccgagttcggatatctgctatgccacatcgaatcgtcaggctgcggtcaaactggtggcccagcagtccgattgcgtggtgattgtcggatcggccaactcctcgaattccgtgcgactgatggaggtggcgcaggagggcttggggaagcgcggcaaagcgtatcgcgtggatgatgccagcgagcttgatccggcgtggttcgtcggactggagtccgtgggggtctcctcaggtgcctccgtgccggacgaactggtgtccggtgtgattgacgctctgcaaaacttgggtttcaccggtatgaagtccgtcgaaaccatcaaggaaaacatgcacttcgtgctgccgtcggagttgcgcaggaagaagtagtcatccttggctcccctcaccgagggaagccaagaacggtcaccacgtgccgattggtgcggcaacggcgttcaagaccttgagcaggtcctgcgggttcacgcctacggacagtccgcgtttgccgccggagaccagaatctggtcgaattgcagggcgctttcatccaacacagtcttatgacgtgtcttctggcccaacggcgagatgccacctaccacatagccggattcacgcattgccaccttgggatcggccatagaggccttcttggcacctacagccgcagccagggccttcaaatccatatgtccgctgaccggtaccacgcccaccacacgctccgaaccggtgtccgccatcaacgtcttgaacacctgatgctcgtcgaagccgagcttggtggccgcctccacgccgtagccgtcatccatatggtcgttggagtgctcgtattcgtatacgtggaattccacgcccgccttctccagttggactgtcgccggggtggaacccgcgcccttatcatgcttgcttttctttgccatgattaccgttctactacgaagagacccccgcacaaggcgggggtctcacagcttagttctcaaacgaaccgtagcggcctagaccgcagtggttcactcggagatctcagcgaagtacagcagggtacggatcatgttggaggtgaagccgtactcgttgtcgtagaaggacacggtgcgagccagggtcacgccgtcaatggtgttgacgtcggtctgggtcgggtcgaacacgccaccgtgggtgtcgccgaggatgtcggaggagacgatgccctcatcgttgtagccgtagtaatcggtgtcggagaaggcagccttgaaggcttcgttgatctcgtcggcggtggtctcggtgttcagaacggtggtcagctcggtgacggagccgtccggaacctggacgcgctgggcatggccctgcagcttgccgttcacggacggaacgaccttgccgatggccttggcagcgccggtggagtgggcgatggtgttgatggcggcggcgcgcaggttgcggccggtcttggtgccacgcgggccatcgagcagcatctgggtgccggtgtaggcgtggatggtggtcatgaagccggccttgatgccgaacttctcgtccagcagcttgaccatggcggccatggagttggtggtgcaggaaccggcggagacgatcacgtcggaagccttgaggatgtcgtggttcacgccgaacacaacggtcggggtggtgtcatccttggccggggcggagatcaggaccttcttggcgccagcgttgatgtgagcctgggacttctcagcggaggtgtagaagccggtgcactcgagcacgtactcgacaccgtcgttcttgacccacggaatgttgttggcgtccttctcggcgtagaccttgtattccttgccgtcgacgatgatggagtcttcggtggccttgacgtcaaccggagtgccatcgtcatgacggaaggtgccgtgggtgctgtcgtac

SEQ ID NO: 3721 - DNA, 4247 bp, Unknown
  R150_10m  MAG No. k141_9516
aggagccgtgggagaacagctcctcgccggtcgacctgggtctgaacaaggccgaggatgaggccgatggcgaggcggaagccgccccggccgaagcctgatagggcggtctttcaacgcaagaagccccgcaaccgatggatgtcggttgcggggcttcttatgttctggttcccctctccgaggggagccgccccaccgactcagtcagccagaggagcagtgtgccagatatgcggagccgttaagcgggaagcccggcgggcttcccgtaggcgacgccgagcggcgacagccgcgaggtagaaaccagcacgtagccggcgcgctgctccggcggccgtcaggccagaggagcagtgtgccagatacgttccaaatagtcttccatggagcggtcggagctgaagtagccggagttggccacgttgagcagggccgtgcggttccattcgagctcgtcggcgtagagggcctcgatctcggactggatgtccatgtaggcggagaagtcggccagggtcatgaaccagtccttggtcagccagtcggccacgagcggggagtaggcgttgcggtcgccgttggagaaggtgccgtcggccaccagatcgatggcctgcttcaggcgcggatcggcctcgtagtaggaggcgggattgtagccctcggcgtacttcttctcgacctcgtcgacggtcatgccgaacaggaagaagttctcggcgccgacgcgctcacggatctcgacgttcgcgccgtccagcgtacccacggtcagggcgccgttcagagcgaacttcatgttgccggtaccggaagcttccttgccggcctgggagatctgctcgtcaagctcggtggccgggatgaggttctgagccatctcaacgttgtagttcggcagcatgtggacggcgagcttgcccttgacggccggatcgctgctgatcacgcgggaaacgttgttgatcagctcgatggtcatcttggccaggtagtagcccggagcggccttggcaccgaagaacacggtgcgcggagtgatgtcctcggccttgaccttgccggacttgatgtcggcgtagttggagatcacggcgagaatcttcagagactggcgcttgtactcgtgcagacgcttgaccatggtgttgaacagggtgttctcgtcgatatcgatgccgtagtggtccttggcgaagcccacgaatgcgtgcttgttggccttcttgacggcggcgaacttcttgacgaactcatcgtccttggccagcggctcgaggcccttgagcagttccagatcggcgacccacttgtcggtgcccaggccctcggtgatgaggtcggacaggcgcgggttggcgagcttgacgaagcgacgcggggtcacgccgttggtcacgttggtgaacttgtccgggtagacgtcggagaagttcttcagggtgacgtccttgagcagctgggagtgcagctcggcaacgccgttgacgtgggagccgccgtaggtggccaggtaggccatgcgcacggcgtcgccggtgtagatggccatgtccttgatggtgtcggcggcaacgcccttggccttgagctcggcctcgaactgcgcgttgatcttctcgatgatctcaaggtgacgcggcagcagctcgccgatcaggctggccggccagacctcaagggcctccggcagcagggtgtggcaggtgtagttgaaggtcttggtggtgatggaccacgcggtatcccagtcgtagccgtactcatcgatgaggatgcgcatgagctcggggatgccgatcaccgggtgggtgtcgttgagctggaagacgatcttgttcgggaaagtcgtcagatccggcttgtcctggcccgggtagaagacgcggatggcgtcgtgcagggaggcggagacgaagaagtactgctgctcgaggcgcagttccttaccgaccttggtggagtcttccgggtagagaatcttggagatgttctcggccttgacctgcggggccacggcgtccatgtactcggaacggttgaaggcgagcagatcgaactcgtcgtagctcttggcggtccacaggcgcagggtgttcacacgctgggacttgtagccgggaaccatgtagtccaccggcacggcgcgcacggaccaggccggttcccaggtcttggtgccgtcggcgttctcgacgaccttgccgccgaaggagaccttctgatcacggttgtagtcggtgtgcccccacggctcttcgttggccagccagtagtccggggtttcgacctgtttgccgttctcgtcgaacttctgcttgaagatgccgtacttgtactggatgccgtagccgaaggccggcacgccgagggaggcgagggagtcgatgaagcaggcggccagacgaccaaggccaccgttgccgaggcccggctcgtattcggcgtccacgatgtccttcggcttgaagccaagggcttccacagccttgtcgaactggtcggtcaggccagcgttcagcagtgcgttctccagctgcttacccatcaagaactcggcggacaggtagccgacggccttggtgttgccgttgacggtgtcggcctgggtcttgaaccaggagtcggcaaggtggttgcgcacggccttggatgcggcgacatacacgtcagcaggggtggcctgctcggcggtgacgttttgagtgtatttcagttgttcacgaatctcgtcggcgaattgttccgccgtgacaggagacttcggtgcggtgatttcggtcattctgactttccttccgggataagtgcccgtgtttattatgccgcgcgataggtatcgtcgcatagacgtaagcatgaactctccgtaacgacgatggcggagcgttcttgcatacgttctcattgagagcgtatcacatatctcacggttccgcatcctacagtatgccatcgtttgcataccttgcggtttcgcgtgccggtgccatgatggagcatatggcagtaattctcgaaaaagacttgaaacgagggcacgacgcactggtgcaatggcgtgccgcagccctggaactggccgacaacacaccacatcgcctgaccacctcccccgttctgccgcgcccggtgtgggcgatggctgtgcgctactcgctgttcctgctggagcggcgcgcgcccggccctggcgtggaggtgcgcgttgcgccgtggggtgcggtcaaaatcctggacggcccggaatcggacccgcacaacctcactccaccggacgtcatcgaactggagcccgaggtctggctgcgactggcctgcggcatcaccacctgggcggaggaaaaggacgccggccacatcagcgcggtcggcgagcgcgacgacctaagcgacctgctgccgctgtaatcgccgccgcaggccgcccatcagaactgtgcgatgctccaacgctggatgtgctcggcccagtggtccggcgtgggcagggtgacgaggctgcgcatcgtcagcgcatagagggcggcggccaccagcacggtggccagaatcaggcaggtcggaccgtagccgatggtctgcataccccagccggcgagtgccacggccacgccataggcaccgtactgcaacaccatgctgcccgctccaacgcggccgagcttgtccttgcccaccaaggtattgctgaggcctccaagcaccgcgttgcccgcgggcaatgccagtaccgagcaggccacaaatatggccttgccaaccatggagggcaccaatgcggcaccggtgaatcctacagccagcaagacgaacatcacgcccaccagtacgccgccggacacacggttgaccagttgcgaggccatcagtgcgcccagcaacatgccaacggcggaggcggcgttgatggatccggcggatatcagctggctgccaccttgggagatgtccagcgcggtcagcagtaggaaggcattgctggcaccggtcaccatggccgctgcgatgatgagatggcgttggaaccggtcgcacagcagccagatcatgccgtccagtgcgtcgcgccagcgtggggcggagtcatcggcatcatcggcgtccgagacggccccgacctccgaaccggtatcaacattgcccggacggccgctatcgctcacagtcgcacgtttccaatagcggcggatacgccatgcggacaccatgcccagcacgctcagcaccgcgctggtcag

SEQ ID NO: 3722 - DNA, 55572 bp, Unknown
  R150_10m  MAG No. k141_9671
agaatgtcattcaagatacacaaccgttgtaaggaggagttgtggcagtaattgaaagcgtgtacgcgcgtcagattctggattcccgtggcaacccgaccgttgaggtctacctggagaccgaagacggcgctcagggcaagggtctggttccgtccggcgcctccaccggtgaagctgaggcttgggagcgtcgcgatggcgacaagtccgtctacggcggcaagggcgttcttaacgcggtcaaggccgtgaacgaggtcatcgctccgaaggtcatcggcatggacgctgctgaccagcgcgctctggacgacctgatgatcgagctcgacggcaccccgaacaagggcaagctgggcgccaacgccatcctgggtgtctccctggctgctctgtacgcttccgccgagtccgccggcctgccgctgtaccgctacatcggcggcaccaacggccacatcctgccggtcccgaacatgaacatcatgaacggtggcgctcacgctgacttcgccaccgacattcaggagtacatgatctccccgtacggcttcgacacctactccgaggctctgcgcgctggcgttgaggtttaccacaccctgaagaacgtcctgaagaaggaaggcctgaacaccggcctcggcgacgagggcggcttcgctccgaagatgaagtccaacgaggactccctcaagtacatcatggacgccatctccgccgccggctacgagcctggcaagcagatcggcatctgcctggatgtcgcctcctccgagttctacaacaaggagaccggcaagtaccgcttcgacggcgaagagcgcgactccgcctacatgctcgactactacgagaacctcatcaacgagtacccgatcgtctccatcgaggacccgttcaatgaggaaggctgggaagactgggctgccatcaccgctcgcctcggcgatcgtctgcagttcgtcggcgacgacctgctggtcaccaacccggctcgtctgcagaaggccatcgacctcggcgccgccaactccctgctggtcaagctgaaccagatcggttccgtcaccgagaccctcgacgccatcgagctggccaccgccaacggctacacttccatggtttcccaccgctccggcgagaccccggacaccaccatctccgacctggctgttgctaagaacacccgccagatcaagaccggtgccccggcccgtggcgagcgcgttgccaagtacaaccgcctgctcgagatcgaggaggagctcggttccaccgctcagtacgccggctacagcgccttcaaggcctgcaagaagtacttggccaagtgagctgaaacgcccgtaaaggcgtgagtttccactgaagctcgatacccgtcgtgttcgtcaagtcgaatgcggcgggtattttcatgtgacatgagcaagtcgtcccgtaccggcaaacctggcaaaaccggcaaagcacaagtcaggaaaaaagggtcggcggggcccatagcgttcttcgtctccctgttcatcatcgcactcggcaccatccagctggtctccaccttccacacttatgccctgaacctggccgagctcaatggcctcaagcgtgaggaagcctcgctgatcgcccaaaagcaggagttggagaacgatatcaagcgttgggatgacaaggcctacatcaccgcccaggcccgtgaacgcctcggcttcgtattccccggcgaacaggccgtgcgtgtgctgcatcccgaagccgtgaccggctccgatcgcgaatcccagaaaacggaagattccaataccagcaacaaaaaagtcctgccatggtacagcgaactgtcttactcgctcaaaaaggccgatgagcctgtgaccgatagcgagtccggcaaatccgatacttccggttcctctgactcgtcatccaacgactcatccaagcagtccgataagtcagaccagaacaccccatccgatcagaacacccaacagaacacaggggagggaacccaacagtgaccatcgatatcgccgccaaggctaaggcccttgtcgacaccatgcttgccgagcccgccaacgaccatgacatcgacctggtgcagcgtcagctcggccgatacccgcgcggcatggtcgccgtgggggcgcgatgcgtctgcggtaggccacttgccgtaatcacccgtccggtgttgcccggcggaatccctttccccaccacgtgctatctgaccggtccggaagccgtcaaggccgcctcccatgtcgaggccgccggcgtgatgcagcaatacaacgatatgctggccgctgatgaggagctcaaggccgcatatgagcaggcccataatctgtatctggcattccgtcacgaactggcaggccgtcttggcgacagtgaggagcatattgaaggcacttcggccggtggcatgccggtgcgcgtcaagtgcctgcatgccctgctggcccagtccttggttatggggccgggcgtcaaccccattggcgatttggtgctggaacgcgtcaaagacgagttcgatccgaccgtctgccgttgcacactggacgattgatcaacagatgagccaccgcgaacagcccattcatacgcactaagggatacgaggagaaggcaatgagcaaggaatccgtaaccgtcgccggcattgattgcggcacgaactccattcgactgaagatcgcacgtgtcgatgccgatggcatgcatgaggtggtgccgcgcatcctgcgtgtgatccgccttggtcaggatgtggacaagacccatcgttttgccgacgaagcgttggaacgcgcctatgcggctgctcgggaattcgccggtgtgattgccgagcatcccatcgacggcctgcgtttcgttgccacctccgccactcgtgacgcggaaaaccgtgaggagttcgaggatgagatcgaacgtatcctcggcgtgcgccccgaagtcattcccggcactgaagaagccgacctgagcttcctcggcgccacttccgtggtcaatcgcgacgatctgcccgccccctatctggtggttgacctcggcggcgggtccaccgagctggtcatcggtggcgacggcgtcagtgcgcccaccacccaggttcagggcgcattctccatgaacatcggttccgtgcgcatgaccgaacgtcatctgaccaacgatccgccgacccaggcgcagatcgatgaggccgttgcggacatcgacgagcatatcgatgaggccttccgcaccgtggacgcaggcaaggcccgtaccatcatcggtgtgtccggcacggtgaccacgatgaccgccttggctatgggattgaaagaatacgatcacaccgtggtcgacgggcatcggttgagccttgaagacgcctatgccgtggacgacaagttccttaggatgacgcgcgccgagcgccgcgaatacaagaccatccaccccggccgtatcgatgtggtcggcggcggcgctgtggtctggagccgtgtgctggcgcgtgtcagcgaagccgccaaggccgatcatggtgaagccatcgattcgttcgtcgccagcgaacacgggctgctggacggcattgtgctcgattatggtcgccggttgctggctcaatagcgtaagtggtaagtgcctccagcgggctgagccgttaagcaaacagcccggtgggctgtttgcgttatatgcgacgccggcgacgctatcgctaccggctgctacaaacagcccactgggctgtttgtaggcgaagggagcggctatgccgcgacggctgcacgaagcgcagcaacccgcaagcaatgctcagggcaggagatagcttataatagaaaagttggcctccgtggcgaaatggtatacgcagtcgacttaaaatcgatcgcttcggcttgtgggttcgagtcccaccggaggcaccttgaaatcggcctgtggccgatgccgttttttgcggctgtgccgcggtctctcccccagtcggcttcgccgacagctcccctcgtcagaggggctcgcagcttactatgtggagagcttataaggccgaaacaaaaggccgttaggctatgtggcgttgtgacgatgtacctgatgaaacgaggaatccacatggcttcacgctggaccgatgtcgaacgagtcgaacaaggcgccctgcccaccatgcttgcccaagccgtcattgcgggcactgcactcaccgttggtgccatcgcctgctcgggattctatctgtccatgatcggcaatgtggccgcactcctgccgtgggcgactatcgtgatactgatcgccgtggcgttcacctacatcgtcggcttcgccctgttgtggtgtgccgaagccctgaccctgcgtgccaacgacaaactcaagccatggctgtacggcgtcgtcggattaatcggctacggcgtgtggggcatgttcgtgatgagcacgatgatgaacacgctgaaccagccgctgaacggcgtggtgttgtcgaacagcgatgtgatggccctgaccgtcaactacgcggtgttcggcttcatcgccttcctgctggcacaggcgtacgcgcccaaaatcgccaccaagaagggactgaccatcgggctgatggtggtgcagatcgtattggccatcatcggtatcatcgtactggttatgatgttctccgcactatctcactgactgacttatcgctcgccggcacgacgcgcgcggccatcatcgcgcaaagcgaaagattccgggcgctaggctggaatacgatatcgtgatggcatgacgcctggtgacaccggcatgccgaaccagcaggggagaaggagccaaatgttcagtgtgcttgacatgttcaccatcggcgtcggaccttcatcctcgcacaccgtaggcccgatggtcgcggcacatgcctttgcctcctcgttgctggccgaccatttggtcgatcgcaccgcacgtgtcaaaatcacgctttacggttctctggcgctgaccggtctcggccacggcaccgatcgtgctgcgatggccgggctcgaaggcaatctgccggccaccgtggataccgaccacatgatgcgcatccgcgagacctgcgcgttggacgatactctgaacctcgccggcctcaaacgcatccatttcgactacgaccgcgacgtggtgttcgaacaatggaagcgcatggccgcgcaccccaatggcatgcgattccaggctttcgacgccgccgcaagcttggtcgacgaacaggtctggtattccatcggcggcggattcgtgcgcaaaggcgctcccgaagacccgataatcggcattcatgaacgccctccggaaggcacctcctttgccgacgcggacgaatcatcatccactgatttcggcgtcgaggcaccctacccgttctcatcatgcgccgaactggtgtcgttgtgccgggaacatcatctcagcatcgccgaacttgtatgggccaacgaaaccgcttcacgctcaggcatccaggtccgatccgatattgatgccatctggcgtgttatgcgcgcctgcgtggaccacggatgcacctcggcggagcccacattgcccggtggccttgacgtaccccgccgcgcgccgaagatgtatcggcgtctcgcttcgaattccgatgtgctgcgccgcgacagccggcgcaaagacgccgtgctcgagtcttccgacgccgcatgggtggatctcttcgccttggccgtctctgaggagaatgccggaggcgggcgcatcgtaaccgctccgaccaacggttccgccggcatcattcccgccgtgcttcactattactggcatttcgtggacaacgccaatgaacagggcgtggtcacgtttctgctgaccgccggtgccatcggatacctgttcaaacgcaacgcctcaatttccggtgcggaagtcggttgccagggcgaagtcggctcggcctgttcgatggcggcggccggacttgccgcagtcatgggcggcacgccggaacaggtggagaatgctgctgagatcggcatcgaacacaacttgggcctgacttgcgatccggtgggcggactggtgcagattccatgcatcgaacgcaacgccatggccgccaacaccgccatcaacgccgtgcgtatggccatgctcggcgacggctcacacatcgtgaccctcgatcaggccatcgaaaccatgaagcagaccggtgaagacatgatggccaaatacaaggagacctccaagggcgggcttgccgtcaatgtcgtcgaatgctgattgacatgtctggtattcaccagcatgatgaccggaattgacgtatacggccagcgtgtcgtatcgcacagggatgaaggactaccgccgattcgccgatggtgctaaggtagggcgcattgtgtctttgaaggaggactaatggcagatcagatgcctcaggtgaacgccgaattcggcaccacgcccgttatcgagttcccggcgcccgaagccccgaagggcctcaaggttgtggagctgaccgagggcgacggcccgatcgtgcgtcgcggcgacaccgtcaccgtgaactaccacggcgtggtgtggggtaaggacaccccattcgactccagtttcgaccgtcatcagcccgccagcttcggcatcggcgtgggacaggtcatcaagggctgggaccagaccgtgccgggccataacgtgggctcgcgtctggtggtttccattccgccggaatacggctacggttcccgcggcatcccgcaggccggcatcggcggcgaggacacgctggtgttcgtcatcgacatcatttccacccgctgaccataggtcagcacatgacgaacgccggggtcatagccggcgttttgtcataaataacgaaaattgtttcagcatcgacaacggttcaggaggacgatatggctgaggacaaggtctacctgctgacgcaggaagcatacaacaagatgaaggaagagctcgcccatcgtgaaggcgagctgcgtgaggaaatcgcgcacaagatcgccgtggcgcgtgccgagggcgacttgtccgagaacggcggctaccaggccgcccgtgaggcgcagagcaagaacgagggccgcatcaccgagctcaccgtcaagctgcgcgattccaagatcatcgagaatgccccggaaggcaccgtgggcgagggctctgtggtgaccatcgagctcaacggcaacgagatgacctacgtgctcggcagccgtgacatcgtggccggcaccgactacgacatcatgaccccggattccccgattggcaaggccatcgaaggtgccaaggtgggcgacgtcgtttcctacaccgcaccgaacggccgcgagctgtccgtgacggtcaaggccgccaagccgctggcctgagttataagtgactagtatgcccccgtaggcgggggcatacttatatgtcgtagcgtttattgccacagcgagacgatcaccatgtagatggccaccatatggcaggcatatccggccaccgttccgcagtggaaaatctcatggaagccgaagacgcgaggccaagggtcgggcttgcgcaaggcgtagacgatggcgccgaggatgtagcaggcaccgccggcgcacagcagcaccaccacggctggccccgcatacggcgaattccagaacatcaccatataagccaggccgtagatgccgaagatgatgtacaccaccgtatacagccagcgtggtgcattgatccagatcacatgaatcacgatggcgatggccgtgcacgcccacatcgatatgatgatcacattgcgccagaacggttccagcgcaaacgaaaccggggtatacgtgccagcaatgagcaggaagatgttgacatgatcgatacgccgcagcacatcggtgacgcgcgggctccaatcgcccagatggtagcaggccgaattggtgaacagaatcagcgacgctgtcatgaacacggcacacgcccacttcagactcgcgccatgtgccaggcatataagcacgatgcctgccgccaatgacaggggagcggcaatcgcgtgaatccagccgcgcatcaacggctttggtcgtccgtgcacgtcgagacgaatcttgcgttccacttccgcaggggcaatgccctcgattttcagcgcacggtgctccgctttggcgagcttgtgccgggccttctcctcggctttggctcgaatggcctcggccttgaactgggccttggcccgtacggcatcagccttggcctgcaacgcctgttcgcgcgcctcgatagccgcctgacgcttggatgcgatggtggcatcctctgcaatcgtcgcgctgttatgagcgtcgtgatgcatcgtcttttccgcgtcgtcggttgttgatgccatggtgatgcccccgtttcacgagttgacgatacgcttcttacgctgccgtaacctacgttagcgtaacttttatgcttgtcaatgccgactcacacgaacactattacccaatggtggcgatactatggaatccgaagatgagaacgtcacagcaataaggggttcggtgatggtgtattgcacggagtgtgggtttgccaacgagcaaggaaatgccttctgttcgcagtgcggaagcccattggagcagcccgaggccaatccggcggcccctgcctatgacgataacgcgctgacgctggtgaagcagccggcggcgccgttgcccgccgtcgcgccgccaacggcgccgggttccgcggcgccgggttccgcggtgccgggacccatgaccgctggccctgcggcacctgcttctcctgaacctcccgccgggcgtcctgacggcgatcacaccaaagcggtggtgattgtgctcatcgcgctgatttgcgtcgtggcgttggtcatcggcttgttcgtcacccatagcatgggattgtggggagctcagccgcaggcgcaaacatcggtacagtcgaccgggtccgatgcgtcggattccgccgatgatggcacgacggattcctctgacgccaagtccaaggccaagaagaacacgtctgatagcgccaaagacaagaacagcgacgattcgtccaagaaaagctcgacggagaagtcgaagccttccactccggtgatcacatccagccagttgtctgacatcgcggattcatactcgtcctccgatgtggccgtctccgccatggtcatcgatggaacatacgccgattcctcagaggacgccaccatcgcgaccacgtcgcagtccggcaagcaattcgtggctgccggtctctatctgccggtctatcttgcggcccaggacaatggcgatgacaacgccaaagcgcaggcaaacgcgatgatgggttccatggacaacaatgccggcaatatggcggccgcggcggtaggtggctggagcggcgtcaattcgtgggcatcttcgcatgggtataagggcacctcgttcaaccgcgatttcggcgatgtggcggccagcaatgccggttatgagaattacggttcctcccgcgatgcggcccgcatgctcgccgcagtggacgccaagggaggcgcgtcattgatgaacgtggacattgcttccgaaggcgtaaccattccgtccgacatgatcgtgcatgcccaccgaggccaaggcatccaggacacctggaattacttcgccatcgtcgaagccaatggtcataaggccgccgtggccgttgtcacccaatatcaggggcagtcggtggccgcggacctgatgagccgggtgctggccagtgttgacaagacattggggcagtgacggtggctcggcataccaagcatagtagcgacacgcgtgcaacaggcagcgtcgtgggattgatcctgatcgccgccctgatcgccgctttggtaatcggcgtcggtggatggatgtacgcgcataacggtctcggcgcatcgcacgccaaaacatcgcccgtcgcctcggcatcggactcaccggcaacagcgtcggcatcgtcgtcaacggcgtcatcgaaacacgaacaacgccctgtgcatgacaccttggagcgcaaggcggcacctgctcccgacctgaccacggtggcggaagagaagcggatgtcagatgtgtcctcggcggtcacggcagctgtggccggcaatggaggcacctggtcggtgtatgtcgaggatctggccacgggcaaaaccgtgagcgtcggcggccagcccatggtggcggcttcggatatcaaactgtacgtgatgcttgccgtgtatgataagcaacatgccggcaccttggccgcgggcgggcaagataccacctcgctgatcaaccagatgatcaccgtcagctcgaacgctgccaccaatcagctggtattgatggtcggcgatggcgacatggccacaggcatgcaacgggtgactggtacggccgcccgatacggcttcagctcatccaagcagttgcgggtgttgtccgatgccggcacagacgggaccggcaccgagaactggacgtcggcttccgattgcggcagattcctcgctgcattgtaccgaggcaaactggtttccgccgaagccagccgctccatgcttgacgtattgctcgggcagacgcgacgcgccaaaatacccgccggagtaccgtctggcattcaggtggccaataaaaccggtgaactggccggcgtggaaaatgatgccgccgtggtgtggggcaaggccgcggacggaacagaacgggattatgtgatggtggttatgacctcgggagtggtctcgggaaccgcgcagcagcagatcgccgcattgtcctctcaggtgtatgaggcgatgaccgcctgaacggcgggcagccgtgcaacgcgattggtgcggtattgaagatgcgatgtcgtaatagtcgtcatacttgcccgtgtggcttgccgcaatggcggcgacgtgtctgcgtatgataggggcatggctgatttttcacacatccttgcaacgcgccccgacttcgacgacgaggaccgcgagtggctgcatcatctcgttgccgattggcaggtgatcgccgatctgagctttgccgacctgctgctgctggtacagaacggtgacggcaaatacgtggtggccgaacaatgccgcccatccaccgtgatgacgctacgggcggaagacgtggtgggaaacgtcatgccggatgacatggtcggcgaattggacgccgccatgctctccagcgtggtgttccgctccacggtattgagaaccgtgggcaaggcgaccgtctgcaacgtgtacgcgccggttcggcacaatggcaagaccttgggcttggtcgtgcgtgagaccaatatggccacacgagaatccaacggtcgatatgagtcggaaagcattaacgcgggcaaacagctgtacgagatgattccgcgaggccagttcccctacaaggattcggtgatgagccagcgccatatcgctcgcgtggcggacggcttcatcatcctgaccatggacggcgtggttcgatacgcagccccgaacgccatcagctgctttaggcgtctcggcctgctgaccaccatgcctggccattacctcagcgaactcggcacacagctgttgaaggagaacgaccccgttccggaaaccctgccgttggtgctggcgggcaaagccgcggtcgactccgaactcaacgccaaccgttccgccgtctcgatacgctcgctgcccttatatgacaacaacggtcgtatcggagcgattctgctatgccgtgacgtcaccgagctgcgccgtcgtgagcaggagctgcagaccaaggacgctacgatttccgagattcaccatcgtgtcaagaacaacctgcaggccgtctccgcattgctgaggcttcaggctcgtaagaccaagtcggatgaggtcaagaaggaattgcaggaggcgcaacgccgcgtgcagaccattgccatggtgcatgagggattgagccagaccgccgacgaggtcgtcgacttcgacaaggtgattgccaacctgctgcgcatggccgtggacctagccacgatgaaagaccagcacatcgatatcaactacatgggcaagttcggcatgatgcccgctcaggatgccacgccgctgtccctcgtgctgaccgagctcatcaccaattcggtggagcatgggttcgaaggccgcaaggatggccatatcacgatttccgtgggccgctccggcccgaacctcaatgtggtggtcgaggatgacggttccggtctcggctccgaagaacagggaggattggctcgttcttccggttctggtttgggcacgcagatcatcaacacctttgtgaccaatgatttcggtggttccgtgcattgggagccgcgccgcggaggcggcacccgcgtggtacttgatatgaagctcagggccgctcaggatgagtgatgcgaagcccaaaaataaggaaaccctcccaagtgggagggtttcctagtatgacgaagcgataatcaaaacatcagatttgcatctgcatggcctgagaacggcgggcgcgcatggcgcggcgcttcagcgcacgacgctcatcttcgctcaagccgccccacacgccgtaatcctgattggtgtccagagcgcacttcaggcatgcatcaatcaccttgcaggtgcggcacacggccttggcctcctcaatctgctgataggctgcaccggtgttgcccaccgggaagaagagttccggatccttgtcacgacatgcggccttggctcgccaatcaaaagcgctgctcattgcttgcctcccttaaaagccccgtggctggtgttgttccttaagtccagtaccaaggtaaccacgaaccgtggtgattttcaagaggtttcgccgagaaaaaaccgaagttttcacgaagcgcactgcaccagacatgccgatgtgccctcgatgagcacggcccggcccgcgttgtcggcatcgatatgactcatcgtatccaataggcgagcggggactccggccataaggtcagacgttcgttccccgcacgggaacacgattctggtattgcaatgctctggtatacgtatcgggcgaatcgtgctgacggcgaataccacgctgacggactcatcggccaacgcatgtgtgaaagacagcgcctgctcgtcggtgcggaatgggtcgaacaactcatcggcgtcgtcgacgaaccacacgatatgcggaggcggtggtgcatccgagctggcatacggcgtgcagcggccgttgcgaagccattgcgatccccatacccggcgatgcggggaactgacacgtaccgccaagccatcagccatgctggcgtgtcgagccaatgttttcagcaacgtggttttgccgcgcccctgcgggccgatgacaccgatattgccaccggtgagggataccgtcgcttctcgcaggttgatgccatcgtcggcaagtccaaatcgaatgcgttgcggtgcgtgattggccacagtccggtcttttacgtgccggggaagtggcgcggtaaacagggacggctgcggcgggctcccgacgaaccgcgatgcgaacgcgatctggcggcataccgcatcgatatcgcgcgccgttgcacagcggaatgccgtcacctgttcggaatcgttgcagaacgccgcaccgggcattgccggactgaggtcggcggcacgaccatcaccaagcagctcgcatgattgcagacggtcccgaacccgtaaacaaatgctgacggacatattcgccttcatatcggcactgacctgacccatcggattctgcgtacaggcgatcagatacatgcccagtgacctgccgagcgaggcaatacgcaccagacgattcacataatccgggagctggtccttcagggcatggaattcgtcaatgaccacgatcaggcgcggtggcggattgaccatatcacggatatcggaagcatggacagcggcggacagctgttcacggcgtgtcagttcggcttccagcgcacgcaacgcgcgtacggcatgcgccagatccagatcgcatacgctgcccacggtatgcggcaaccgttcgagtttgcggaacgcggaaccgcctttgaaatccaaaaacacgaaattcagatgctcaggcccgttcatcgaggcgagcgccagacaccagctttgcagcaacacggatttgccggaaccagtggtgccggccaccagagcatgcggcccctgacggttcagatcgagcctcagcggctcgcttccggtcatgccgatcggcaccgcaaggtcaaggggttcaagccaatggcccacaatggtgcgccatggcaggcgtgcgaagtgcagcagcgattctatcggctgcgacggcgcatgacggaggtctgcggcgcgggcatcggcatcgtccgtgataccgatatcgatcgttgcctgttgcggggcgggggtcttctccgggcccggaggtggggggagcgccagcagcagtgacacgagacaggcgaatatgcccggtgcgatcatggcggcgaacagccattgcccgtgcaacagcagtatgaccatcatcaatgcctgcgcgatcatcgggcacgccgcggcaagcatggtcaggcgggcgcgcaatggcggcgcgcccaaacggtgcttcgcccgggatacggcggatgccgtgtgggcggaatgtcgcttcgaatcgttctgctgtgatgccatgcttccagcgtgggggaacgcatgccgaaagcgcaagccgaatcaaggtatgtggttctagcttgccgagttatacacatgacattttgaccgtgcatgattggctgcgtgggcaacggcggcgatcatgcgccgacgatgaagccgatgggctccgggaaagcgtcggtcagccttccgccagattgcccacggcgccggccttatgcgtgccgtcggcaagctgattgaacagttcggtgttcctggcgtcatcgagcagcaccgaggagccaacgccatcaacgtaataatctgggtcggaccagtacacgctgccggagatgccattcgagccggtggcgcttttgaacgccaacgccatggtgagcaacgtgtaagggttggttttttcatccacggtgagtgcgctcatcgcggcattggacactgccacgactttggacggattggtcagggtcccactgctggaagcctttttgacgatggccgagatgacctgccgctggcgttcgttgcgtccgaagtctcctcgcgcgtcggcgtatcgcatacgagagaaggacaatgcagtggaaccatccgtcgtatggcatcccgccttccagttcagtccggaataggaatcctgaacatcctcgtcatagcacagttcgataccgcccaaggcgttcaccacgttctgcagaccgccgaacttgatctgcgccacatggtcgattttctggccggtaatctgctcgacgttgcttaccaaggctttcttgccggcaatctgcgccaccgcattgattttcatgtactggtcatcgacgttcataagcgaatcgcggggaatggaaatcagcgaactcggcccgcttttaggcttgatcagcaccagaatcgtatcggttctgaagcctgagatattgtccacgccgccgtaatcggtggaaccgtctcgctcgtcggagccaagaatcagccaggtcgaggccggcgtgttgggggtgtcggtcagccagtcgctccggttcagtttgctgtccacccattgccaggcaccgaaaacagaaagaatcaacgccgccaccagtaccgcaatcgcgcataagatgatgcgcaaggcgcgcggccggtgtgccgttaccgttttcgccgttgccgccgccggccggccaatatggctgaacttcgtggacacgtttgctgctggcgatgagggccgggaaaccggcatatccgacggattgcgcacggcgttgcgggatgagccggaagacatccgcgctcgcgacggcggaatgctgcgcggtgcggcggcatccggagccgtgctgcgggtggcacgtccggttttcggagaaaaactgggcggagtccgcctgccgttgtccgtgacgttggcgcttgccgtgacgttggcgcttgccgtggcgttggcgttcggttgaggctcttcgatgtcatttcccgtgacggacggacgggccgatggagcctgacctgactgacgtgaggcgcgggcaggggcgaaggagcgtggcacctgcccggaaggtcgggtgcgtcgatttcccgcaggaatgaagcttggcgggttgatatgcggatccgccccacctgattcctgcgtcataacccctcctgaaactgtcgattgtctgaatgacactttgacacagcatccgccgggtgttcctgcgctatggtgttcctgcgcaggaacggcacaatatcatgtgcaacggcatcagggcatcgtgtccgcgccatagcacacagttccataaaaatgatgtaatgacacgagaaagaatttgacaaaaacgaaattgcatgtgtgtaatttagtccgtatgaaaagctcaataggcaaggagaatcgcatgtggggtgtggtcgacgattcagccgaagagccatggcatgaattgtggggactattccgacctgatggcgatgtatcttggcagcacaaggcgttgtgcgcgcaaaccgatccggaggcgttcttcccggaaaagggaggctcgacccgtgatgccaagcgtgtgtgcgccaaatgcgaagtgcgtgaacaatgcctgaaatgggccatcgaccatgatgagcgattcggtatttggggcggtatgagcgagcgcgaacgccgtcgatataagcgagagcaccgggagcaggcgtagttccacacacacccccttcaagtctggtgcgtacactgggagtttatgagtccgacaggtaatagcgatattcatgaggcgttggccgacgccatgtcttctcgaccgtatacgcataggcaggatgtggataccggcattacggctgtgatcaccgttgaggaggatatgcgtttcctccggtctacattgcgttcggtattgacgcagaatgttcttccgggagtcgtcatcatcgccgacgcgaccgggcgcgccggttcgaggataaccacttcgttcgaggtcattccctcgccatcggggccggtagtggaggtgccgcagtccaagcatgtgaccattcacatcgtttcggccaagggcgcgcgttccttcggcgatgcggtcagccgggcgttggatcgggccgatttggatgacgctccccgcgcattgtggttgctccatgatgattcccgcccctcggatgcctcatgccttgaacgattgcttgaggcgtggcgcaatacgccgggggccagcgtgctcgggtgcaaacagtgtgattgggaaggatcccacctgcatgatgtcggtatgtatgcaggccgacacgccgtgcattccctggtggtcgatggagaacccgatcaggagcagtatgacgggcgacaggatgtgttcgcggtgtcgctggcgggcgcgctggtgtccatgtcgcaattcacgcgactgcggggcatcaatgcctggctgaccacctacagcgaatcggtcgatttctgccgccgtgtctgcctgagcggcggacgcgtggtggtagtcccgcaagcggagatatcacatcgtcgcgcacggtatgagggcattcgtacgcgaggcggggagccgcttaaggaagatcacacggtcaatcatgcgatgacggtgcatcgctcccaacagcgctatctgtacactgacctggccatgtcgtcctggattatcgtctggctgtggaggctgattcgcagttttggcatggccatagccatgatgttcggcaagaagccgtatgaagcatgggtgcaattgtgcctgccatggttggctttggccgatatcgcgggaaacatgaaatcgcgcaggctggtggccagacagtcgaaggtcgccgcatcgtccctgcaggttttgttcgccgacagtcggcagatcaagcagttccatgatcgtcgggatgcattccaatcccagcagggcagagtgctgctcagtccgctggaacgtgcccatctgcggacacgcaccatatatcgctggagcgcagccgtggtgatggcgctggtgtgctttgcggccatcgtggtgatgtattggccggtgttccgttcgatattctccggtggatcgttgtattccgatgtgttgctttccaccggtgccagcttcactcaactggtgcagtccgccaccacgccatgggtgtttggcagcggcaccggcattcctgcgccgcccacgccgtggctgctggtgctgatgctggcctcgctggtcacgctcggccatgtgaccgccgctctggcgatgatactgtttgtggccgcgccgctgagcgcattgtcgttctgggcgctggcgggcgtattcacccgctcggacgtggttcgtgtgctgggaggactgttgtgggcatccaccggcattatgttcggctggtatgcgcaggccaatatgccgatgctcaccgtaatggtgttcctgccggccgcgttcgcattcgtgttccgtgccgtgggcatgtaccataccgaagacccgctcaagccgcgcacatccgttcaggccgcggccatcgccgcactgtgcttcatccctgtggtggccgccgaaccgcagctgctgttcgcgctgatcgtcgtgttcctgatgttcctgctgttcgtgcgccgcaagcgcgccatgctgttgcttattccggttcctgccgcctttgcggtggcccctacgctcgtcaatgcggtgcgttacgccgatttgggcatgtggcgtcaactgttcggcgacatcacagtgccaacgtcatccgccaacgggtcgccggcgtcgctgagcctgcttgaggccgcacagcgtgcgctgggatggcaaatgggatcgactgagcatgccgatttggcggtcactgtgctgttcggcgtcatcacgctgctcgctcttgcttcgctggtgctgccgttcgcgttgcggacctcgcggctgatgtgggtggtaatcgtttgcggaggcgcgctcgccctgatttccagccgtgtggccatagccgtggatgccgatggcgtcgtggccggttccgcacagcctggcatcgcgatgatgatattgggcttccttgcctgcgtgtgcctcgtcgccggtggggcggtgaagcgattccaaccgttgcatgcgtccggcagcgatcccgcaccgaaaagggaccgtctgcatgtgctcatcgtgtctggccgtgtggtgcttgctctgatactggtgtgctgcatcggcatccaatgcatgtatggcatcgaacgtcataaggatgcgggactgggcgtgtccgaaaacggcctgcccatggtcaccaccgattatctggaagccagtgccgatcatcgtgtgcttgccgtgagcgcggagacccgcaacatcgtcaactatgcggtgatgcgcaccccgcgcggcgatctgatcgacagttccccggtccagcgggcgcgcctgctgtccggcaagcatgatgcggttgacgaacaactggcccaggcctgtgcctcgctgctgtccaatcccgacgaagaggccatcgcggccatcagcgcgcttggattcggcggcatctacgtggttcccgagaccggcgattcctcgaacgacatgccgtatgaacagttgagcgcgaatatcgccgcatcgaacggcacccagtccctggtctccacggatagcggcagctactatcgtctgacgctgcgtagcagcacctcacagcaggtggatacctcatggcagcaacgtgcacagcatagtgtctggagacacgtctggctgatatgcctaggtgtgatcacggcgttgtactgcttggtcgccatgcctcgcagacgaccgtcctacggattggaggagcaggcatgagcaacaaaacttctggtttcaaacgtgcgatcggcatcgtgctcggtgtgatcaccatgctggtgttgattgcgctgttcgtcgttctcgtcatggcccccatccccaatatctgggtggacaaggtggccgcttccgataatgccatcgaccagacagttagtccgacccagtccgaaacctactgcccggcacctataggattggccgataccggcacgtacggcgacagcgccttccaggccactgtcggcaatctgagcacacaggcgcgctatgcggcgttcggctccgtctacagcgccactgtctcggcgatcgggcaaaagtccagttcagatgacgtgactttgaaagacgccgatccgaccgacgattcctcggtgaaaaccggtgctcagaagatcgatcagggagctcgcctgatcaatacccgtatgttgcaggccgcagctggcaccggcaccgtcggcaccatcgcatcatgggccgatgacggcgatgtgagaggcgtatcggcggcatcctgcgtatcgacctcgctcagccagtcgttcctgctctccggcggcacgaccggtaccacacagcagctcatcgtctcgaatccctccaccaagccgaccaccgtcgacattgccgtctggggttccgagacagccgggaaaatggcattgtccacacaatccacgctgtctgtgccggccgagggggagtcctcgatggaactgtccgccgcggtcgatgggcagcatggtctgttcgtgaccgtttccagcaaggagactcctatcgcgtccgtggtacgtacggtgaccatggatggtctgacaccgaagggttctgatttcgcgctgccgctgccgaccgcctccaatgcatcggtggcgccgtccatcactgccggcgatgcggtcaccgcttatctgttcgccaaggcagacaccagcaccgggctgtcatggattaccgacaaaggattggttcccgccaaagatgccaccgtcactgccgataaggtgacggcgatcgacttgggagaggctcctgatggggcgttgggcgtgatgtccaccgcagaggatgccgtgtcgttctccgtcaaggccacacgctccggtgactccggccaagccgatttcgcattggtcaatgccggcgagccatccgaattctcggggttggcccttcccgacggagtaaaggcctccatcacgctggccaatacgtccaatgcgcgcaggacggtcaccttgcacgcctacgatgatgccggtgcttcggtgacctccgaggaaatcacgctggatgcgaacgcggcgcaaacgattgagaccggcaaactttccggcgatcatggcaccgcggtcgtgctgatgttggaggactcatccaagaaagtgagctggggagcgcgtttcagtcacgattcgttgcaagacaaggacatcgccggattgtccgccatcgacgcttcaacgctgatgcccgccacggtccatgtctgggctcggaacgattcctccatcgtcaagtagagcgcgctcgccgaagcatcggtctgatgatgtttcggcgccgatatagctgcgggggccgtgccactgtcttacttgaagtggcacggcccccgcaatactgtcacaggccccaatcggggtcgatttcctcgggcctgcgcccatacaattccgctatgcgagccaccagctcatccctgacggccaactgcaattcgagcttggtaggtgcctcggtctgcaacggcatacggtagagcacgactcgtgcgggaatgccgtggctggcggggaagcactgggacgtcatattcggctcggtctgccaaggcgtcggatccgaaggcggcacatcctccaccgcgaactggagcggacgtatcagttccggccacgcttggccgagcctgcgaacctgggccgccaccatatcgtcgaacatgccggtgcgagtgcggtaacggggcagacgggtgccgaacatcggggttcgtgtgccgcgaccgtggcggttgcggtagattcgtgcgttccaaggtggctgaagcatggttcccaccataggacatggcggaggcaacatgcgttaggattggttcattggctgtgaacattcgtcaacgagggaggcgcgacaaatggtggtacgttcgtggtccgaacttgatttcgataatgtctgctccaacgccaaggtgttcggtttcgatttggacaacacgctggccagctcaaaacagccgatgaggcccgcgatgatcgaacggttctgtgcgctgctcgaccatacggtggtggccctgatctcagggggcggcatggcggtggtcacctcacaggtgctggatgtactcaccccgaatgccaggcgcggcaatctgcatgtcatgcctgcctccggctcccggtattaccggtgggatggcacgcaatgggccttggtgtatgcgcatgatctgtccgaagccaccgtggccgctgtctcggaaagtcttgagcgacatgcccgggaactgggattgtgggaacagcaggtatgggggcctcgaatcgagaacaggggcagccagatcaccttctccgctctgggacagttcgcacccgtagcggccaaacaggcatgggatcgcgataacacgaagaaacaggcgctggtcgaagcggtcaaggccgatctgccgcacatgcgggtcagggccggcggctacaccagtgtggatgtcagcgaatgcggcatcgataaggcctatgccgtgcgcaagctgacgcagacacttggcatacgggccgatgaagtggtgttcgtgggcgatcgcatgacgcctacgggtaatgactatcctgcggttgaggccggtgcgatcggtgttcgtgtggagaatccgcaagacacggtacaactgctggatgcactgcttgcgcgattcgatactccagcttgatggtgacgcgttatggacgggccgagcgtatacaagtggtggcatgcgatgtgggcacaggcctgcaatctgctgtttccacgcggctgcgctgggtgtgacgcgccggatgaggtattgtgtgcggcatgtcgggccttgttcgcacaatgccgggagcgggatacagacggtggtggcggagcccgtatatggtccgcatcgatttaccagggagcggcgcgtcgtgccattctcgactggaaggaccacgacgataccgagcttgacggccctttcggccgcatcatggtgtcgctgctgaacaagacgccaatatcatcatcatgcttggggcatcgcgtattggtggttccggtgccgtcatcgcgggcgtcaatgcgccgaagagggcgtgcccatacggcaccgttggccaaatcggtggcaggggcattgcgtgggtacggtgtcaatgcgcgaccatgcaatgccctgagctcctccaccaaggcacgctccgtgcagcagacctcttcggcacagcgtgcccgtcgtatcaccggtcatgtcagggtgaagcgtgatctcataggccatggcgacgcggtgcttctcattgatgacatcgtcaccacaggtgccaccgtgcggcaatgcgttcaggtgtttcagcaggccggcaccaaggtggtgggcgtgctggtattggcggatgccgtggcgcgacggtccgatgacgatatcaacgggtgaatgacatcggtgacgatgccccagatagcaggcgaagcgccgttgctcggcatgtaatcgggatatcgaggattctcggcgtgcaatatggtgatgccggcccgtgaaaccagccgtttgatggcgatttcatcgtccatgacagccgcaaccacatctccggggactggtgccaacgaacgatcgacaatcagcagatcgccgttatgaataccggcattgatcatggaatcgccggccatctgcatgacaaacagcgtggtgtcgtgcggcatggttcgtgacttggattgctgtgtcatgctgtgcctcccaccctgtattcgaacatctgttcgaatacagtatacggtaggacggcggacaatatcagcgttcggcgacgtgatatttaggcaggatgatttcgaaatcggcgcctcgcgtgtcatcgaccactttgacggtgccgccgtgcaattgggccgcccaacgtgcgatggacaggccaaggccggtgccgcccgactcggtgccgggacccgtcttgcctttgacaaagcgccggaagatatccgaacggtcggacggtgcaatctgggagccgaaattcaccacattggtcacgatggtgccttggctgtcatcctcatgggcatcgaccagcacggtggtgccgtcggccgaatgcttcagtgcgttggcgatgatgttggtgaacagctggcgcaggcggtcctgatcgccttccatcgagatgtcggccggcacggtgacgcggatgtcgtgggcgtggccgccatcggcgatttccaacggctcgatggtctcgtcaagaaagtcggcgaagttgaacttttcgatattcagactcgccgcaccggcctccatacggctcaaatccaacaggaaggcgatgaggtcggagagacgctgcgtttgggtgaggatgctctccagattggcgggagtgggctcggtgacgccgtcggccatgttctcgaccatcgcctgcaaagcggaaacgggcgtacgcagctcatggctcacattggctatcatgtcgcggcgcattttatcggcatgttcgagttcgccggccatctcgttgaacgagcgagccagctggccgacctcgtcatgacgatcctgatcgatatccacgcggaccgtgtaatcgccatccgccatggcttcggccacatcgcgcatctggcgtaagggagcggtgatgccgcgggagaagaaataggtgatgcccaaggccaccaccaaagtcagcggcatggcgatccaaccggaccagccgaatttcaggaggaaccagcacatggcaaacgcgatggcagtggcgataacgatcagtacgctgagttccagcttcagagaggagaacaaatcaaccggcttgacgcgaggtttcatcgcatcaagccgggattgctgttgttttttggatgccatcacgcggtcggcggctcgaaagcgtagcctacgccgtgcacggtgcggatggtatcggcgccgagcttatggcgcagcgccttgacgtggctgtcgacggtgcgggtgccggatgcgtcgacccagtcccagacctcttcgagcagcttttcgcgggtgagcaccgacttcgggcggcgggccagcgtggccagcagatcgaactcggtgggggtcagatgcacctgctcgccgttcacggtgacgatgcgctgggccgggtctatgaccatcgaaccgaagtcgagcagcttctcgttctccgaattcttggcgatgaccttcgcacgctccacgcggcgtagcagcgccttgcagcgggcgatgagctcgcgcatggagaacggtttggtcatgtaatcatcggcgcccgctcccagaccgatgaccttgtcggcctcgtcatcacgtgcggtgaggatcagcaccggcaccggacgttcggcgacgatgcgtttggtggcctcaagaccatccatgaccggcagcatgatgtccatgattaccagatcggggcgtagctgggacgcggcctggacggcggaagcgccgtccccggccacgcgagcggtccatccttcagcggtgatgcgctgggcaatggccgtggcgagcgtgggctcgtcctcgaccaccagcaccatgcgcggtgtcgtattctgacgcgctgtggtattgagcataaataaaccggttacctttcagcctgttgaccagttcagtcttccggcttcaagaatacaactcccagagccggaacggtgatcttcgccgagaacggacgcgaatgatattcgccctcgaccgcttcgaaggtgccgttgtggatgtcggagccgccgtacttggcgtcatcggtggtgaacacttcggtccacttgccgccggtgggcagcgccacctggtaatcggaccaggcttcaccggagaagttgaccaccacggccaaggtctcgcccttggtgccgatgcgcagaaagctcagcgtgttgtggtcggcatcgtcgctggtcagccactggaagccggccggatcgaagtcctggctccaaagtgccggatgcgccttgtagaaggcgttgaggtcggcgaccatggtctggacctgacggtgctcctgccagttcaggcaatcccaatcgatggaggcgtcgtgatcccactcgccccactgggccagctcgttgcccatgaaggagagcttcttgcccgggtgagcccactgataggcgaacatcgaacgcacgccggctagcttctgccagccatcgcccggcatcttgccgtacagggagcccttgccgtacacgacttcgtcgtggctgatgggcaatacgtagtgctcggagtaggcgtacaccatggagaaggtgatttcgttgtggtgccacttgcggttgatgggctcctcgtgcagatactcgagggtgtcgtgcatccatcccatgttccacttcataccgaagccgatgccgccggcggaggtgggggcggtgatgcccggccatgcggtggactcctcggcgatcatcatgacgccggggttgttcttgtacgcggtggcggtggcttccttgaggaagtcgatggcctccaggttttcgcgtccgccgtagatgttcggacgccaatggccgggttcgcggctgtagtcgaggtagagcatggagctgacggcatccacgcgcagcgcatcgacatgcaggtcctcgagccagaacagggcgttggccaccaggaagttgcgtacttcgcggcgtccgaagttgaacacataggtgccccattcggggtgttcgccgcgcagcgggtccgggtcctcgtacagcggggtgccgtcgaagcggccgagtgcgaaggcatccttcgggaagtgggcgggcacccagtccatgatcacgccgatgccggcctgatggaactgatcgaccaggtaacggaagtcgtcgggggagccgaggcgggaatccaccgcatagtagccggtgacctgatagccccaggagccggagaacgggtgctgtgccagtggcatgaactccacgtgggtgaagccttcctgcttgacatagtccacgagctgcttggccaggtcgcggtaggtcagtccctgcttccagctgccggcgtgcacctcatagatggagaccgggccatcatgcgggttggtggtgcggcggtgctgcatccaggcgtcatcgttccactcgtaggtggattcggtgacgatggaggcggtgttcggcggaacctcgtgctgacgctccatcgggtcagccttcatctcccacgtgtaattggcgttcaggatctggaacttgtaggtctcgcccgcgccgatgccggggatgaagatctcccacacgccggaggagccgagctcgcgcatggcatgacgacggccatcccaggcgttgaagttaccgaccacgcgcacggcatgggcgttcggggcccacacggagaacgcggtgcctaccacctgctcgccgggcgtgccgtctgcgccgcccatcggatcgtcatagcgcagcacgtgcgcgccaagcgcctcccagagcttctcgtgacggccctcgccgaacagataggtatccatgtcgccgaccgtgggcatataacggtatgggtcgtcctcaatgagcactgcgccgctttcccactcggtcctgacgcggtagtcgggaatcgtgggctgcttcttggtgccggaggccggcacggtagccacgaacacgccgttgtattcgtgggtcatcgggtattcgccatcctgggtgaggatggtcacggacttggcaagcggacgcagcacacggattgtggcggtgtcggcatgcttgccgatgccgagatgcccgccgagaactccgtgggggttgtagaattcagcattgctcaccgcatcgaggtcgccttgggcgacaggcacggtgacggtatcttccttgatcttcgtttctttagccatgacccaaagtctacgtgcgttggagtcgaaaacgctacattggcgcgtcgaaaatggcgaattcttgcccttttcggtgtgtctccgtggttgtgagcgctctcataggggcggtccagaccgcatggcataattattcgagtttttgtgtgtaagccgtcagttctcggagggtacatgtcttacaaagtcggcgatatggtcgtctatccgcgtcatggtgcagcgaaggtggaggccattaccgagcggacggtcaagggagtgacgcgcgaatatctgcagctgtccgtactctcttccgatggtttggtcatcaacgttcccgtggacaatgccaggaaggtcggcgtgcgtgacatcgtctccgcatccgaagtggccaaggtgttcggcatcctgcggaccccgatcatcgagaaagagatgaactggtctcgccgttacaagctgaacgtcgaaaagatcgccaccggtgacgtcaacaagatcgccgaagtggttcgcgatctcgcccagcgcgatgtcgacgagcacggcctgtccgcaggcgagaagcgtatgctcaccaaggcccgcgccattctgacttctgagatcgccttgtccgagaagatcgacgaggcggaagcccagcgtctgctcgacgtgaacctgggctatgagcccgctcagcccggtgacgacaagcatcacaccgccgagcccgaagaggccgcggccgatactttggctcgtgtcgaagccgagaagaagtccaagaagaagtgatttgattgttttgaggccccggtcgcgtccttatgcgatgcgccggggcttcgtgattcataatcgtttgctgccgttcatctgggcaatgccatcgaagggaactgcatggggtctgcaggagtgctgatagggcaaggttttgacgctcaccgttttgcgcctgccggttcaggccgtgaactgtggattgccgggctctactggccggtgcctgattcatgcagcgaggccgatgccgccaaatacgagggtatcgaaggcgattccgatggcgatgtggccgcgcacgccctgattgacgcgttgcttgccgccgcccgattgggagacattggttcactgttcggtgtcggtgcggacgcgcatggtgccggaaggcatggcatcgatatgctgcaagaagttgtggcgcatctggcatccaacgggtatacgccggcatcggcctcagtggcgatcatcggcaaccgcccgaaaatcggcacacgccgtgctgaagccgaagccgccctgtctgcggcggttggttgcccggtatcggttaccgccaccaccaccgaccatatgggattcactggccgcggcgaaggcatcgccgccatcgccaatgccttggtggagaagatataacaaagcccccgctgtgaatttgccagcgggggcaagaaaaatgaatgagattacttccgcactgtctccacggccttggcgatagcccagaacagggtggaaagcgtcacgataatgaagctcgggggggcggggaacatcgccgacagcacgagtccggcccaaatcgacaccaggcacagcacgctggcgatcaccatcgccttgaatggggagccggccagaatattggcggtggccgcaggcgtgatcaccagcgcgaaaatcagcaaggtacccactgccggcacggcaatggtgattacaccggccataatcgccataaacgccacgttcatcagcccgatcggcacacccttggcctgtgccacctgctcatccaacgagctgaacagcagcggacggtagatgatggccaacaatgccagcagcaatacgtcgaacacggcgaagccgatgatctggccggtggtgatggtcaggatcgagccgaagaggatcgactgcatctgctgggaggcggaactcgacaatcgcgcgaagaacagacccaagccggtggcgaaggccagtacggtgccggttgcgatttcacgctcggaaacgcgcttgcccaaagcaccgatcaccagtgcgccgcccagtgcgaacacgcccatgcccagtgatacgggcaggccgagcaacaccgcgccggtcgcgcccggcagaccgatatgggccagcgcatgggccgcgaaggtggaacgacgggcgatggtgaagtatcccatgacaccggcggccagggcaatgcacaggccggcgatgaaggcgttggtcatgaatggagcggacagtgtgtccagccattcggaatcatacgaaaagttgatggtgctcatgtccctgtattttctccatgcctgagctgcagcccgttgacgggctgtggatcggctagcttgatgttatcgattctcggcgctgttggcggcactgccattggtggcgttgccgtgctcgtgatggtgcaattgcgccacttcggctgccgtgtgcatatcctgcggctggtcctggggctcatccggcgtcggggtcacgaacatgtcaccctgcggagtggtgaccacctgcacctgtgtgccgtagaggtgggtgagtaggtcggagtcgagcactttgtgcatatcggcgtagtgcgggtgcccatcgagcaagtagacggcaccggtcagaatcggcaagagcatattgagatcgtgcgcaaccacctggatggtcatgttcagttcacggttcagcttggccagcacgtgtacggtggcgcgttgactggccagatcgaggttggccaacggctcgtcaagcatcagcagttgtggatcgcacaccaacgcctgggcgatggccacacgctggcgcaaaccgccggacagttcggacagacggtactgcgccttgtcggcgatgccagtgaactccatcgcctcgagcgctttggctttctggaccttggtgatggggtggatgccgaatcgggtgccggtcaggcccagcaacacggattgttcggcggtgagattggaatcgacattcgccacatagctctgcggcacatatccgatgcgtttgttcatctcgcccgcaggcttgcccagtacggtcaggctgccatggcaaagcggcaaaagtcccagctcggccctcatcatcgtggttttgccggtgccgttggtgccgacgatggccgtgaccgaaccggtgggaatggcaaaggtgccatgttgccagatgatatggtcaccacgcttgatggcggcatcgctgaacacgatgcaatcggaagtttcactcataacgcccgattgtggcaaacgatgctgacaatcgttctcaatatcgtgtacggatggtgacaaccaaagaaaagggttgtgcggccatctcgacaatggtcgcacaacccttctcgtgcaaggcgtctatcggcattgcatgaatccgatgccgttgtcctttgcttctaactatttgccggagtcggtctggtcgttgccggaggcatcgccggaatcgccattggaggcatcggcctttgccgaatcctgagacgagtcactggatgtggccgccttgcactgacggatgtacttgggctccgtgctggaaccggtgctggccttggaatcgtgcgcattggcatcatccgtggcggcgccgtcggcgctggaatcatcggaattcgcgttgccgtccgtggcgtcttcgcagccatagctcggatccaccgcgtcgatgatggtgttgatgagctggttgatccaggcgttcagcgtgtcggtatccttgggcatttgttcggagacgtcgactaccggcacatcggcacgaccggcagcgccagtgatcatattggtcgcgtcactggcttcctgcgtgttgttaaccagcacatccacgcccttgtcttcgatgagtttctggaaagactgcaggtccgcgggggccggttcgccgccggaagcggtcgattgcgtataccccttgggcgtctgattcttgaacccgagatcggccatcagataatagaccacgggttcggtggctgcataggtgaggtcggagtgggatctggtgaactcggacgcccatgtttccagcgatttctcatccgcctgccatgccttgagccgcttctggaaggccttcttcttgctggggagtgcctttacatatgcatcggtgatggccgtggccatgctggatcgagcgtctttggagaaccacagatgcgggttatcgccttccatggcacccatgacggaagcggcggatacgatattcgtggtcttggtcatcgatttggtggcccaggaatcgtaacccgcgccgttggccacgatgatctgggccttggacagcttggcgacgtccgaggtctttggctcgaaatcgtgggcatccacattggtggagttcacgatggacgtgacttccacatcatcgccgcccagctcggcggccagcgagccccattgattgagggaggcgaccacattgatcggcccggtcggtgcgggaacactggtcttgttgtccggctcggtttcagtgggggaggtggctgcgcatgcggcggtcgcgaacaacaggacggcgctcaggccggctgcggcgagtcgcgtaagtcgtgtgatttgagtccccatggcacgccttcttcgtgagagcgaacgatatataatcctgacttgttccaacgatagcctatcgtttcgatagaatgcaccgaaactacgggggagggcgttgatgtccacaaaaatcgacggcaaacgaatcgcggccgggatcaagaccgaccttgccgaacgggtgagcaggctcaaggcccggggcatccagccggggcttggcacgttgctggtggggtcggatcccgggtcgatgaagtacgtggccggcaagcacgccgattgccaggaagtgggcattacctcagtcaagaaggaactgccggcggacgccagcttcgacgacatcgccgctgccgtacgcgaactcaacgaagatccggcctgcaccgggttcatcgtccagttgccgttgcccaagggcatcaacgagaacgcgatcatcgacatgatcgacccggccaaggatgccgacggcatgcacccgtacaacctcggcgaactggtgctgcatgtgcgcggcgacatttcgacaccgctgccttgcactccgcgcggtgtgctcgagctgctcgacgcctatgacattgatctgaacggcaaggaagtgtgcgtgcttggccgcggcatcaccattggccgcacgattggtctgatgctcacgcgcaacgccgtcaacgccaccgtcaccttgtgccacaccggtacccgggatgtggccgaccacatgcgccgcgccgacgtgatcgtcgccgcaatgggttcggccggattcgtgacgcccgacaagatcaaggacggcgccgtgctggtcgacgtgggcgtcagccgcgtctacgacgaagaagccggtcgctaccgcatcaagggcgacgtggacaaggcctgctacgacaaggcctccgcctacacccccaaccccggaggcgtgggccccatgacccgagccatgctcctggccaacgtcgtggaaatggccgaacgacacgcctagagtttcctaggaaatttgggcagagttgcttgtattgtgaatatccgtatgcctgtaagggtgtgcgtataactgaatatcgagaaattatccatccactattagaaaccatatatttacatggcagagaacaacactgaagtcaccaaggtcgccatcaacgacatcggcaccgaagaggacttcatcaaggcagtcgattccaccatcaagaacttcgatgatggtgatctggttgagggcaccgtcgtcaagatcgatcacgacgaagtcctcctggacatcggctacaagaccgagggcgtcatcccctcccgcgagctttccatcaagaaggacgttgatcctgacgaagtcgtcgaggtcggcgacaccatcgaggcccttgtcgtcaccaaggaagacaaggaaggccgtctgattctgtccaagaagcgtgcccagtacgagcgcgcctggggcgacatcgaaaagatcaaggaagctgacggcgtcgtcgagggcaccgtcatcgaagccgtcaagggcggcctcatcgtcgacatcggtctgcgtggcttcctgcctgcctccctcgtcgagatgcgtcgcgtccgcgacctctccccgtacatcggccagaagatcaaggccaagatccttgagctcgacaagaaccgcaacaacgtggtcctgtcccgccgccagtacctcgaggagacccagtccgaggtccgcgagaccttcctgtcccagctcaagaagggccagattcgtgagggtgtggtgtcctccatcgtcaacttcggcgctttcgtcgatctgggcggtgttgacggcctgatccacgtttccgagctgtcctggaagcacatcgaccacccgtccgaggtcgtcaaggtcggcgacaaggtcaccgtcgaggtgctcgacgtcgatctcgaccgtgagcgtatctccctgtccctgaaggcgactcaggaggatccgtggcagcgcttcgctcgcacccacgttcccggccagatcgtcaagggcaaggtcaccaagatcgtccagttcggtgtcttcatctccgtcgaggacggcatcgagggcctggtgcacatctccgagctcgccaaccgtcacgtcgagaacccggagaccgtggtcaagccgggcgaggccgtgttcgtcaaggtgatcgacgtcgacctcgatcgtcgccgtatctccctgtccctcaagcaggccaacgactccgtcgacccggcttccgaggacttcgatccggccatctacggcatgccggccgagtacgacgagcagggcaactacaagtaccccgaaggcttcgacccgaacaccaacgagtggatcgccggttacgagaagcagcgcgaggagtgggagtcccagtacgccgccgcccacgagctgtgggaggagcacaaggagttcgtggccaaggagctggagaacgctgccgaatccgcagccgccgacggccagggcccgaaggaagagaagccggtcgaggagacctccaactactcttccgctgctccggctaccggtaccctcgccgactccgatcagctcgccgccctgcgcgaccagctgctcggcaagtgagttcgccatcgggcgactgacgcctgacgtatagtcaaaacccggtctcgcttcggcgggccgggttttgccgttgtgtgcatgaacctcgaaacatggcatgatggggggagcatgattcgaataggattgaccggtggtattgcggcgggcaaaagcacggtgtccacaagactgcgggagctcggcgcggcgcttatcgactatgacgagctcgcgcgccgagtggtggaaccgggcggcgtcggtcttcgtcgtatagcggaatgtttcggccccgacgcgctgaccgatcaggggcggctcaaccggcgatggatcgccgagcacgtgttcgccgggcccgactcggaacggatgcggaggaaactggacgatatcgagcatccgttgatctatgatcttgcgctgtcgcgggagcggcaggcggtcgcggacaatccggatgccgtggtcgtgcatgatgttccgctgttggcggaagtcctggacgccatgcccatgcgattcgaccatatcgtcaccgtcgaagcgcccgaacaagtacgggtcgacagaatggtgtcgacccgcggcatgacgcgagatgatgcgcttgcgcgcattcgccaccagtccagcctggaacaacgccgtgtcatagccgacgcggtgatcgattccacgcagccgatgggtcgaatgctcgaagccgtcgatgcgctgtacgaacagtggctggcggaatcataatgcgatgatgcggtcggcgagggccgcggtctcctcgttgtgcgtcgtgtagatcacgatcgctccgttgtcggcgaaatcacgcaggtgacgcatgaccatggcgcggttgtcggcatcgagggccgctgttggctcgtccgccagtatgacgcgcagcgattgacggatgagaagcctcgcgattgcgactcgctgttgttcgcctccactgagtgtgtagataggtctattgccgtagcccgtcagattcacggcccgcaatgcgcgtctgatgagccgacttctatctgccgatggtattccgacgctgcgcagagccagaatcagatttctgttcaccgtccattgctccaccagggcgtaattctggaacatgaatcccatgacgttgcggtgcatgagccgtcggccctttctggaggcaattgtttgcccatcataggtaattgttcctgaacttggctcttccaaaagacctaggacattcaacaaagtggttttgccgcatccgctttctccggttagggcaaccatgtcaccgggactgaacgtcaggttcagtccttcccataaggtgcggtcgtcgattcgatatgtcagattatgcgtgatcaataaggcgctcatgattgatgttccttacgtggtaagtgattgctgatacaggtttgtggatggcgatcagggatgtttgatactgtcggcgcgcagccgcgaatcgtaaagcactgtggttgccagcgaaacgacgatgaatagtaaggaaaccgaggtcgtggaaacggcgttgtaacctcctatgagcaactggatcggaagagatgcactgcataacgccgctgctaggaacagtatcgattgaaaacggagatatgacggcgctccatgcatatattccacgaacataatttgacgtcggagtgtgcatagtgtcaaagccaccatgattgcgccgcccagcagacatgttatggatatgcaagctgtgatggaaaaatagttcatttcctgagttgttcgtgccaaacgagtttgtatctcgtcgtgccgattgacgaccgaagccaccaaagagtccacgcccttttcccgtaggatttcgagcagctgatggcgggagctgtaatcgaaggtcatgccgccggtggacaccatcgatgtagtggtatcgccagagagcagtgacgggtcaatgacaacaacaggaacagaggaaaggccatcggtgttggaaggggtgtcaaatgccgataagacagcatctcttggtctggattcaatggagatgctcgtgcgattgatggcgggcagactctttccctcttctgccgccaaactttgctcgaatgagtatgcgcgaagcacattgttcgtaatggattcgctgttccattgttcattctcgggcataatcacactgattcgtgcaagtgtcgtgttgtttcgtataagatgatgaagccttgccgtacgggaatccatgaggatgcagggctgtgggtcttgcgagctatccacccacgtgcatcctagccggaatgaggcgaatcgcgtatgttctgattgggaagtttgttcgacgaagtcgttccatgagggcatggaacgagctcggttttgatcgctgctataccacagttgcaattggaatccgtcgttggatgacaattgatgctccaatgttgttttcagtgtttgggattgccgccatttgaagttcgtaacgttcaaactggcagagctgagagcgagaacgatgattgccatgatgcagccggaagccatgagaaaacgtaaagggcgctttccttggattaatttgagtgcgttcggcaccagaacccttactagagcaatcgacaatgacaaggcaaccaatgccatgcacgttgtggcgatgatgatggagaggaatacctgaccggcgaatcctaagggagaagcgaaaggccagaagatcgcaccaatggaaatccaagtcatccatccgatgcagacgcagatgatgaaaaagaacgcatgccgcaggaattgcctcataataatgccggttgttctcatgccatgcaaggcttgtatcgcgcaaacgcgtgaagctgtcgacacggaaagcgcgccggacacaaatactacagcaagtccggcgaatatgacttgggcgatggaattggagaagaattgtttggtgatttgtgtgatgccgatgggggttgctctgttaagttcgaatccttggcgccgtatggatttggctactgaagcggtatcccgtggtgatccatagagaagccatcttcccaatgggtcggtgaatctgtctccgcgttgcacacgtgtgcgcggcccgaacccataatccgggtatggcgaattcgcatgcatgccgttgccgtctaatgcgccgaaaatagaaattacgcgtctgttggtaccgtgaccgtccggctcataggagactctcgcgagtccgacatgatgggtcgctgcgagaccggtcaatgtcgatagagtctgcccgtgcgcgtcggaaattccaatatcgtagctagggccggagggataggtttcttcgttattctgcgcatagaatcctgctgcgagagtgatgagagccacggccaatatactggcgattttataagtccagtgcatgatacaccttattcccggtaacaatgtgtttgtgcggcggacgataggaagttcgctcgccgcacattattgcgcggctgttttgccgcatataacacggtaagacgccaatgaggagcgaacgaagtctgtgtgacgggaatcgtcacagtgttacgatttcgtttgacggaggcgatttggggagggggtacttatgaagaacgggcgcctgattcggcttgccttggtggacaacgatcgttgctctgcggagatgatggctttgcttattggcaggacgattcccgaggcgcatatgctatgggttacggataatcccagtcttgccttggaacgttgtctgttcgatccgcggaagccggacatccttatttgcgatctcatgatggacgggctgaacggagtgcagctgacggaacgtattcgacagcggaacgtgcaggttggcgtcatcgtagtcacttcgtatgacctggcaacctatggtgaggatatcgcgtgttgcggagcccaagcgttgatttcgaaaagagatttcgcagcgaccatacgcgaggcggtcaaatcggtgtttgacgggggaacataccctcatggttggggtttgcatagccttgaagagacattgcatacggtggatgccgcacagccggaagcggatggtgccaggctcttctccgatcgagagctggcggtgttgcgtctctatgcacatcatgtaccgaccgttgaaattgcgcgccgcttgggaatcggtgtcgaaactgtgtacagctatgtgaaacgagccatgcgcaaggtcggggtgacgaggcgcggcgaactccttgattactgtgagcgataccatgttctgtgacggcagccgttttcttagacgtcgcttccgcgatttcgggaagtcttggcatggcgagaagatcgcggcgctagcctgcgccttgtgcatagccgctgatacggtcatcgaatcgtgtatcaatccggtttgggatgcgtgggccctgtgggtgggtctgttgttcgtcatcctgtcgttgctctgcgtggcattcccgttcggcggcaatatcgcgttggcgatctcatggtgcgtggtgttccccttgccggtggatctgtccatgtcggtgagcgtggtgatagccgagccattaatcgtcctctcctatcaacgcatatggtgcggcgtggtgttggcggtgactgtgaccgtatctcgcgtggcgcagctgatatggcagtatgggttgccgatgggttgggatgccggggcgttggtgtccgttgtgccttggaccgtcatgccggcgttggcgtgcgttggaatcggtctgctgctgaattggcatcatcgtgagggggagagggagtcggaagcgcgtggcagggccgaatcgttggatttggcggcaaggctgcatgatgcgacgaccaatgatctctcatatctcatcatgagcatcgacaggatcatgtcggaacacccttcgcaaggagagtcgatggacttgccactgttgcgcgaagtggctcaacgggcgctcgatcagacgcatgatgtcatagcggttctcgcaaagcacaatgtcggtactgcgcgaatcccgcgatgccatgcgcgtcgctccggagaagccatcgttccgatcggtgcaggtcgattcgaggccgagatcgaacggcgccggcgggaactcgcagcgcttggtttccgaggcgaggtggttgtgtccgatcccttcgatctcctgagtcggtttgacgagaagactatccagttgacgcggtcgttgctggaagagacgtttgccaatatcgccaagcacgcggatcgcgaacaagggtatgtactcgccatacaagtgcggcaagacggactgtacgtatcggtggctgacgttcccgccaagatggcggatggagcattggcggaatctccgagaacattgggcatgggatttggaatgtctcatctgcgtcaatcaattacgcggagcggtggttggctgcgcgtccaagaggaagacgggtattggagttgcctagcgtatattccgatatatcatcgggatacagcgtgaatcggaaggaaacagcgcatgggattcaacatcgaacgtgtggacaagccgtttgtggtcaaatcgccgtaccgaccatccggagaccagccgaaggccatcgaggaactggccacgcgcatcgagaacggcgagaacgacgtggtgctcatgggcgccaccggcaccggcaaaaccgccaccaccgcatggctgatcgaacggctgcaacgtcccacgctcatcatcgagccgaacaagacgctcgccgcgcagctgtgcgctgaattccgcgagctcatgcccgacaacgcggtgagctatttcgtttcctactacgactactatcagccggaggcctacataccgcagaccgacacctatatcgagaaagactccaacatcaacgacgatgtggaacgtttgcgccatcaggccacggccaacctgctgaccagacgcgactgcgtggtcgtggccaccgtctcctgcatctacggcctaggcactcctgaggaatacgccgggcgtatgctgtttctcaaggaaggccagcagatcaatcgcgacgacctgctgcgccggttcgtggccatgcagtacaagcgcaacgacatcgccttcacccgcggcaccttccgcgtgcgcggcgatacggtcgaaatcatccccgtatacgaagaactggccatccgcatcgaattcttcggcgacgagatcgaccgcatctccaccctgcatccgctgaccggcgacgagatcgacgaggaaaacgaaatccacatcttcccggcctcccattacgtggccggccccgaacgcatggagcgggcgctcaaaaccattcgcgaggaactcgacgaacgcctggcagaactgcgtaagcaaggcaaggagctggaagcgcagcgtctcgacatgcgcaccacctacgatctggaaatgctcacccaggtgggcgtgtgctcgggcgtcgaaaactattcgcgccacttcgacggccgcgccgccggcaccccaccgcacacgctgctcgacttcttccccgatgacttcctgctggtcattgatgagtcgcatgttaccgtgccacagatcggtgccatgtacgagggcgatgcctcccgcaagcgcacgctggtcgaacacggcttccgtctgccctccgcgatggacaatcgaccactcaaatggccggaattcctgcagcgcgtcggccagaccgtgtacctgtccgccacacccggcgactatgagatgggactgtccgatggggtggtcgagcagatcatccgcccgaccggtctgctggacccgaagatcgacgtacggccggtcaaggggcagatcgacgatctgctcgccgagatcaaggcccgtgtggccaggaacgagcgcgcgctggtcaccaccctgaccaagaagatggccgaggacctgaccgactatctgctggaacgcggcatcaaggtcgaatacctgcattccgacgtggacacgctgcgccgcgtcgaactgctgcgcatgttgcgcgaaggcaagatcgacgtcatcgtcggtatcaacctgctgcgcgagggcctcgatctgccggaagtatcgctggtggcgatcctcgacgccgacaaggaaggattcctgcgctcctatcgttcgctcatccagaccatcggccgtgcggcccgaaacgtgtccggcacggtgatcatgtacgccgacgaaaccaccgaagccatgcggcaagccatcgacgagaccgaccgccgccgcgccaagcagatcgcctacaaccaggaacacggcatcgatcccaagcccctgatcaagaagatcagcgacgtcaacgacatgctcgccaaggaggatgtggacacccagaccttgcttgaaggtggctaccgcaacgcgggcaaggccggcaacacacacctgggcgtgccggtactcgatcccaacgaggcagacaaacgccacgaggagatcctgaaggccggcctgcccgcgcaggacctcgccgacctgattcgccaactgagcgaacagatgcacaccgccgccgaacaactccagttcgaactcgcggcccgtctgcgcgacgagatccgtgatctcaagaaggagctccggcagatgaccgaggcggggcaatgacccgtcacatacatgggttagtgtagggaatcatggcagaaaccccactcgcatttgaaatcatcaccttcgtggtgctcgcgctgttcttcatcgtcgacctgttcgtcatcgggcgccgaccgcatgtgccctccaccaaggaatgcgtgcagcatatcgccttcttcgtggtcatggcgctgatcttcggcggatgcatctggttcttcgccggctccaagcccgccatcgagttctattccggctggctcaccgaatactcgttgtccatcgacaatctgttcgtgttcgtcattatcatgtcgaacttcgcggtgcccaagcagattcagaagtatgtgctgtccatcggcatcaccattgctttgatcttccgtggcattttcattctgatcggcgcggccctgatcacccgcttcacatgggtgttcttcctgttcggcgccttcctgatctacaccgccgtcaaactggtgctcggcggcgatgaggacgaggaatatcacgaaaacggcatcatccgtaatctgcgcaagatcatcaagatcaccgacgactacgacggcgagaagctgcgcaccaccaagaacggcgtgcgttactggaccccgatgctcatcgtgttcctgaccatcggcaccaccgacgtcatgtttgccttcgactcgattcccgcgatcttcggcctgaccaaggatccgttcctggtgttcacctccaacgtgttcgccctgctcggcctgcagcagctgtacttcctgctgggtgctctgctcgacaagctcgtctacctgcctgccggcctgtccgtggtgctgggcttcatcggcgtcaagctcatcatggaggccctgcacggcaataccttgccgttcatcaacggcggcgaaggcatccattgggtgccggaagtgcccacatggctgtcgctggctgtgattgtggtcgcaattggcggcgcatccgtggcttccgtgatcaagatgaagagcatggaaagcgccgagaaggcctgaaatcgttagagaatacaacccttaaacccagtcaacacaacaatgtgagcgctcacaacacaccgtgaagaaaacttgtcatgagtcggctcgcgctagtagactgggtttcggcaaatggggcaatcgtgcctcgaaccaaattgaacaagaataggcaggcattcatgcgtaaagccaagatcgtagacaccatcggtccttccaccgaggattacgacaacctcctgaagctcgttgaagccggtatggacgttgctcgtctgaaccgctcccacggcacccccgaggatcacctcaaggtctacaacaacgtgcgcaaggccagcgaagccactggtcgcaacgttgccgcgcttgttgatttgcagggcccgaagattcgctgcggttggttcaagaagaacgccgatggcgaagacaaggttcagctgcagctcggccaggaattcgtcatcaccactgatgacgtcgagggcgacgagcacatcacctccaccaccttcaagggcctgccgggcgattgccacccgggcgacccgatcctgatcgatgacggcaaggtccgtcttgaggtcaccaaggtcgagggcaacaacgtgtacaccaaggtcgtcgtggccggtcctgtgtcctcccacaagggcatcaacctgccgggcgtcgccgtctccctgccggccctgaccgagaaggatgaggctgacctgcgttgggccatccgcaccggtgccgacatcatcgccatgtccttcgtgcgtttcgccaccgacatcgaccgcgcccacgagatcatggacgaggaaggccgtcgcatcccgatcgtcgccaagatcgagaagccgcaggctctggagaacctcgaagagatcgtcaagaccttcgacggtgtcatggccgcccgtggcgacatggccgttgagtgcccgctggaagaggtcccgctggccaccaagcgcatcatcgagctggcccgccagtatgccaagccggtcatcgtggccaccgaagtcctcggctccatggtgaactccccggtcccgacccgtgcagaggcctccgactgcgccaacgccgtcctcgacggctccgacgccaccatgacctccaacgagaccgccgtcggcaagtacccggatgtgaccgtggccaccatgtcgcgcatctccggctacgccaccgaccacggcttcgaccgcatcccggagctcaagaacctcgacatgtcctccaccggcgccgtctcctccgccgccgtggacctggccgacaagctcaacgccaaggccatcgttgcttacacccagaccggcgccaccgtgcaccgcgtctcccgtgagcgtccggccgccccgatctacggcctgaccagcaacgagcacacctaccactggctggctctgtcctggggcaccgaagccttcctgctcaaggaggactaccacgacaagtcccgcaaggatctgatgatctacacggacaaggtcctcaaggatgccggcaaggttgctgacggcgacaagatcgtcatcctgagctctgctcagggcgatcaccagccgggccgcaccgactccatctacgtgcacaccgttggcgcttgcgactgatttcaggccgctggtagctgctgacagctagcacatagcacgcgaaagccccccatccagaaagtggatggggggctttcgttatccgttatgttgcgattgtgcggtgattgcaatggcacgtagtcaccgcgatgatcgagcgtggtgactagtcgttgagatgatcgagcgtgccgctcttcagacgcagaatggcgaccatggtcttggcatccgcaatcgtgccattgaccaccatctcataggcatcgtccaccgacaccatacgcacgtcggaacgcggagtctccgggccgatttcctgacgggaagccggggtaagtccggtggcgaagaagattgcggtgtgctgggtggaatagctcggcgtgttcataaaacgggtgaactgcgtaagcttggaggcatcgaaaccagcctcttcggccagcttgcgcttagccacatcggtcgggcgttcggacgggttgttggcgtggcctgccggaatctccaacgtccaacgatggttggcgatgcgatactgctcgaccagcggaatcatgccgtcatcggtgacggccagcacagccacagtgtcgccattgttctcctgaacaaagtagcgttcaaacgaaccgatctgattcgactcataggagacgtgatcgacattgaaataatgcgtctccacaatctgtctacgggaaatctccttgaccggagaggggcgccagggatcgaactgacggtaagtttcgttgctcataagccctcctaacaaaagcgatacatcgaaactacagcccattgtaagcggtgaaaccacgcagaagaacgggcaacacacgggtacgccgtccacgatatcgacgtgtttcgcctgttttaccggggggaatggaggactggcgcgtgtcttgtgtcgcaggagtcgaatcggtatgctactctcttcagagtgcttaggcacgccctcgtatcccaattggtagaggaagcagcctcaaaatctgcgcagtgtgggttcgagtcccaccgagggcactttagctaggagttcgctgaaattattacgaaccccattgttgggtaattcaagaaagaggttggcatggctgcaaggaagaagtccgaagaaccgagtatcaacgtcgatgaggtgctgaccgacgaagaactcaaggccgtagccgatgaaagcgaacctgctgagcgcaaggccgtggccgaggatggtccgcgtaccgtcgtcgtggccgaggatgaagccgtgaaccgcatggatctggtcgccatgctggaagacaacggttatgaggtcgttggtcaggccgccaacggcgaggaagccgtggaactgacccgcaagtatcgccctgatgtggtgtgcatggatgtcaagatgccgcgtatggacggcatcgccgctgccggcattatctgcgatgagaacatcgcccctgtcgtcatgctcaccgcattctcccagaccgatctggtgaagaaggccaccggtgccggcgccatggcatacgtcaccaagccgtacgaggaatccaagttgctgccgaccctcgaggtggccatgggccgtttcgccgagatcaacgatctgctggacaacgtggagcgcagcgaacgcaaactcaaggaaaccaccgaccagctcaaggaaaccgaagagaagctcaagaaggccgaagacacgcttgaggagcgcaagctcgtcgaccgcgccaagggtctgctgatggacaaggctgacttctccgagcagggtgccttccgttggattcagaagacctccatggaccagcgcatccccaagaagcgcctggctcaggccatcatcgccaagtacggcgatccgaagccttctgattcgggcgaacgctgattatcggcatcaccgtgctgagtcgtaaagcaacacaaacacactatgggagaggccagcgtgaccgtacccaccaatgaaacattgctggtggtggacggccactcgctggccttccgtgcatttttcgccctgccggtcgacaacttcagcacttccagcggccaggccaccaacgccgtctggggttttgccaccatgctcgcgcaggtgatcgatgcggagaaccccgaccatctgggcgtcgccttcgatgtgaagggcggcacattccgcaatgagatgcttccgcaatacaaaggcacccgtgaggcggctcccgaagagctgctcacccagctgccattgattcaacgcatgctcacggccctcggcgtcacctacatcgagaagccgggattcgaaggcgacgatgtgatcgccaccctcgccaccatgggagacaaggccggctaccacacactggtattgtccggagaccgagacgccttccaactggtggatgacaacgtcaccgtgttgtacccgggccatcacttcaaagacctgaagcatatgacgccgcagtccatcatcgacaaatacaaagtcactcccgcacaatatccggatctggcggcgctccgcggcgaaaccgccgacaatattcccggtgtgcccggtgtaggcgacggctttgcggccaagtggatcaaccaattcggttccctcgacggcatttgcgagcacgccgatgaaatcggcggcaaaaaaggcgaatcgctgcgggccaatatcgaccaggtcaagctcaatcgcaaagtcaacgcactggtacgagatgtcgatcttggcgtcgatattgaggatctgacattcggcaccgtggacgtggcacaaatcgacgccctgttcaaggagcttgaattcggaccgcgtaccaggagtcgcgtgctgaaaaccttcaataccggtgccaaggtttccaacacatacggagccggcgagtctacgaataatgaacaggacgagcaggataacagtctcgatctgaacctgccggaacccacgagcatcacctcttcggagcagttcgacgaatgggtcaaggcccatcgcgtcgagatcaatgttcccggtgaaatcgccgatttcacagtttccgactatggcgatggatcgcagcggcatgccgtctgcggcgacgcggtcggccgcgcttggaccgtggccgcgtggggcgacgaaaggccggggcgtgccacggcacaaaccattgccgtggccacggcaacatcagcggccatagtgccccttccaatcaccgataccctgcgagcacagcttgcgcggttcctgaaaagcgaacactcccgcaccatcgtgcatgggtataaagaattgctgcatcttctgggcgcggtagatcttgacatggacctgccgatgtttgacaccaagcttgccgggtatctgacccaaccggatttccacgccgatagcctcaagcaggcggccgagcacttcctcgacatccacttcaccgaaaccgaacagccttcgcaaggcacgttggacttcgacgacgatcaggtcgaagaagatccgaacgaacatcgtctgcgcgatttggccattatccgcagccttgccgtcacgctcgggccgattatcgatgagcgtgaacaatgctggctgatgcgcgcgattgaacttcctgtttcccgcgtgctgcacggcatggagcacacaggagccaaagtcgatagcgttcgactcgtttccatgcgtgaccagtttgccgccgaggctcgtcaggcgcaggaaatggcttgggagtatgccggcaccgaaatcaacctgcaaagccccaagcagctgcagaaggtgctgttcgaagatatgggtttgaaacccaccaaacgtaccaagtccggctcatacaccacgaatgcggccgcattgcaggatctgtatgtcaaatcagtggacaatgagcgggccaacggtttcctcggggcgttgctgcgccatcgagagatcaacaagctcaagcagatcgtccaaacgctgatcgatgccaccaacacatcagatgagcacatccacaccactttcgagcaaaccgttgccgccaccggtcgattgagctccgtggacccgaacctgcagaatattcccaaccggaacgccgccggtcgtgagattcgcggcgtgttcgtgccaggggaggggtacgaggccctgatgagctgcgattactcacaggtcgagctgcgcatcatggccgatctgtccggtgatgaggcgctgatcgaagcgttccgctccggagccgacttccacaaatacgtggcctcgatggtctacaagctgccggtcgaccagatcaccggcgaccagcgcagccacgtaaaagccatgagctacggattggcctatggtctgagcacgtatggtctcgcccagcagctcaagatcgcgccacgtgaagcggaagcgttgaaaaaccggtatttcgataccttcggcaaggtgcacgattaccttgaatcgctggtggccaatgcccgagagaaggggtatacggaaaccattttcggacggcgtcgctacttcccggccctgcattcgaccaatcgtgttgcgcgtgaggccgccgaacgtgcggcactcaacgcaccgattcagggatctgccgccgacatcatgaagatcgcgatgattcgcgccgagcagaccttggcagaggcccacgtcaagagccgtatcattctgcagattcacgatgaactggtagtggaaatcgcgccgggagaaggcgaccaggtcaccgaactggtacgcaacgccatggaacacgccgtcgatcttgccgtgccgctggacgtatcgtgcggcatcggttccgactggcagctcgccgcacactgacaatttctagctcccctcgggtgaggggtgctgagccgttgagcaaacagtccagtggattgtgtgtaggcgaagacgagacgatagtcgagcaatgaagagcacgagcatggcttgtccgcaattgcagaatgagtcccttgccgcaatagcccactacaatgggacatatgccgaatctcaagcaagtcatcgacgttctcgagaccctgtacccattgcgctacgccgaggaatgggatgagccgggtctcatcgtcggcgatctgagccacgacgtgcaccgcatcgtgttcgccgccgacccgacctccgccatcattgacaaggccatcgccaccggcgcggacctgctcatcacccatcacccgttgttcttccgttccgtacacgagacgagcggactcggtttccggggcgacatcgtccgcaggctctaccagcacggctgcgggctgtgggtagggcacaccaatgccgacgctgcgtatcgcggcgtggggcaggcggcggccgactacttcggactcatcgaccagaaaccactcgtgccgattgacgatgccaacgcctctcatccggtcggcttggggcgtgtgggtcgtttgccgaagcctgttgccctgaaggatttcgctcagcgtgtattcgacgaagtgtccgatcatggcatgaccaccgcgctcggcatccaggtatgcggcgattcggacacttttgttcagtatgtggccattctgcctggctccggtgactccctgttcaacgaggtgcgtgccaccggtgcggacgtgtacgtaaccagcgatttgcgtcaccacccggtgaccgacgccatcgaacaagcccggtatgaagcccgtatgagggcccaaggcatcatgctcggccatggaatggcgggggagagccatgtgcgtccctgcttcatcaacacccctcatgccgccatcgaatccatgtggttcaactacgcgatcgatgatgtgccggccgccatcgaacaagcgaccggagcaaggcctgaagtcgagtggttccacgacacgaccgatccatggacgctgtccattaccgcgcatcgggattaaggcgctatagtgacgtggcgaaaacgttttttccgaggagatgacatgtttgggggaagcaagcaggaacaactggagcatcggctcgaccataagctgaacgcctcctcggacggcatcgacatggacgtgcccgccaaagtgatcagtagcgaaaccgtttataccgggcgcatcttccacgtggacgacatgcgcatcgctctgaccgacaagcagggcaaggaacacgagatcggccgccaggtgctgcgtcacgccccctgtgtggtcatgctcgtgcacgacatgtccaccgaccgttacctcatcgaacgcgaataccgtgctggatcggacatgttcgcctacgggcttcccgccggtctcatggacgagggcgaggacatcatggacgcggccctgagggaactggccgaggaaaccggcgtggtgccggaccgtgacaccatgggtgttgacttcgtgggcgatttctactcgtccgaaggcatgaccgacgaactggcccacatcatggtgttgcatttgggcccgttcagacgggagcagcgccatttcgacgcggacgagcacgtggaatccgcgtggattccgtggagcgaccttgccgccacgcgcatcacctcatccaattcgatgatcgccatccagcatgaggcgttacgcagactcatcgccaggaactccgacaaagacaagccgtcgctgttctcctgacgttcaactccccggcacatcagtgacacaagaaagtgggatactgaaaactatgcagatcagacctggatcaatgtatccgctgggcgccagctatgacggcgccggtgtgaacttcgcgctgtactcacaggttgcgcagaaagtcgagctatgcctgttcgacgagcacgatgcggaaacgcgcatcgaaatgaccgaacagaactcatacgtatggcataactacatccccggcctccagcccggccaacgctacggctaccgcgtctacggtccctatgacccgatgcacggcctcagatgcaaccccaacaaactgctgcttgacccgtatgccaaggccatcgaaggcaacatcgacggcgacgaaagcctgttctcctactggttcaaaagcccggacgacacctcggcgatgaacgaccttgactcggccgcccacaccatgaagtcggccgtcatcaatccgtatttcgactggggcaacgaccagcacccctacatctcgtaccacgattcggtgatctacgaggcgcatgtgcgcggcatgaccaacctcaacatggacgtgccgccggacatccgcggcacctacgccggcctggcctatccgagcgtcatcgaatacctgaagaagctcggcgtcaccgccatcgaactcatgccgatccaccagttcgtcaacgactccttcctgcaggagaagggcctgtcgaactactggggctacaacaccatcggcttcttcgcgccgcacaacgcctactcctcctccggggaacgcggcgagcaggtcaacgaattcaagtccatggtcaaggcctaccatcacgccggcatggaggtcatcctcgacgtggtgtacaaccacaccgccgaaggcaaccatatgggccccaccctgagcttcaagggcatcgacaacgcctcctactaccgactggtggaaggcgaccagcagcactacttcgacaccaccggtaccggcaactcgctgcttatgcgctcgccgcacgcgctgcagttgattaccgattcgctgcgctactgggttaccgaaatgcacgtcgacggcttccgcttcgatctggccgccacgctggcacgccagttccaggaggtcgacaagctgtctgcgttcttcgacatcgtggagcaggacccgatcatctcgcgcgtgaagctgattgccgaaccgtgggatctgggctccggcggctatcaggtgggcggcttcccgtccagctggtccgaatggaatggccgctaccgcgacaccgtgcgcgacttctggcgctcgcagccctccacgctgcccgaattcgcctcgcgcctgatgggcagttccgatctgtatcaggtcaacggccgtcgaccggtggcgtccgtgaacttcatcaccgcgcatgacggtttcacaatgaacgacctggtcagctacaacgaaaagcacaacgaagccaatggcgagggcaatcgcgacggcgagagcaacaatcgctcttggaattgcggcgttgaaggcccgaccaatattccggacgtcaacgacttgcgtcagcgtcagatgcgcaacatgttcgccacgttgctgttcagccagggtatcccgatgatttgcggcggcgacgaagtggcccgcacccagcagggcaacaacaacgcctactgtcaggacaacgagatctcctggaccaactggcatcttgacaagggacgcaaggaactgctcgccttcgtttccaaactcattcatctgcgtttggatcatccggtgttgcaccgccgtcgcttcttcaccggccgtgagcccggcgacgattcgaacatgattccgcaggtcgaatggttcgaccacaccggttcgatcatggatatggacgactggcagaacacgcatgcgttctccatgatgatctatctgaacggttcggatattccggaggtagactggtacggcaaccggatggtcgacaatgacttcatcctgatcttcaacgcgcattacgagccgattatgttcaccctgccggatgagcgatacggccgcaaatggcagctggtcgtggatacgcacaacccggatgggccggaactgagctatgaggcgggcttcatgatcaccgcccagtcccgcagcttcctcatgctcatgagcgacaaaaagcccaagaagcccatgggcctataaccagaccgaatttaagctccctctgacgagggagctcccagtatagccgggtgagggagagaccgcagcaaagccgcgaacccctactcgcgccccttacgctcctccacgagccgagcatccccgaacgcaagtagatgctcgccggcaagcgggcgcggctggtcgagcagctcgcggaaatccaggattccatcgacttcatcgacgccaaacagcgcttctacgacgacgtcctgtctggcgcaaccccatacgtaagcgtgctcatcccatccgcggcgctcgcaaaggagtcagaggaaccgggagcattgaagggtgcggagaggaaataggttcgaccgagccgtttcttcctccgggatgcaagtgcgaacaacggtttgttgtacccgcgcttggcgaacgggccatgcccttagaatggaatcagcaagcgcacagcgaggcgctcgaatcgttttccgatgtcgggaggtagtcatgtcgatcggtcaggttatcaaagtcgtgcgcgaggagcgaggtcttacgcagtcgcagttcgcgcatgagctgttcgtcacccaacaggcgctttcccgctgggagaagggaacggcagagccgagcatcgacatgattcggctgatcagcacccgttttgaggtgccgatggcgaggcttatggaaatgccggacaatggtttttgccaaagttgtgccatgccgttttaccgcccggaagaccatggcaccgaaccggatggaacgcgaaacggagattattgcaactactgctatgaagacggcgtttttcttcaggactatgccaatagcgatgaattggtcgccgcatgcgcgccgatgatggcggaatcctgccatatcagcgtcgaacaggccgaggactgcatgtcggcgctgttgccaaacctcaagcggtggcggcgtcaggatgagatcgatgcggtggcggaggggaaatgagcgatggcgttcgattataagaaggagtataaggacctgtatcagccgaagaccatgccggccatcgtcatggtaccggcgatgcggttcgtcgcggtggacggtgtgggcgac

SEQ ID NO: 3723 - DNA, 27674 bp, Unknown
  R150_10m  MAG No. k141_9765
cgcaatctgttacgcatctacggcggtcttagcgcagaagaatggcatgacgtggctgatgggctggccagagattgcgcccggaacatcatcgaccgcatcaagtaccagccggaaataaccaccaaaggcggcacacagcgccacagcagttggcgcaatcccgcttacgagaagctcatcgtggacgagcggctttcgaacgcggccctgacttattgcgccatcgtcgattacccgccgctgccattgctgcgcaccatcgccatcgaacaccccgaatcggcaaaatcgataatcctcgacgcgatgccatacggcaccatgggcatgcccgtgttccggtttacggtggaacgtggcgtcgacaatacattgacggcacgccgcgccacataccagcagatcgccaaacagctgcgtcgtttcgccgcagtgttcggcgatgaggagacccgtgtgctggcacacgagattgtcgagcgttatccgaatccgtactgcgttgcgggaggagctggcgtttgcggtgtagtgacgacattggcaacgcggtacggcattcggcacatatccattgcctatgcagagaaatgccagtctgttcttcgctgagattcctgatgatattggtcagctggctgcaaacccagaccttggccaaatgctcgtccatgaggaatcccttgcctttggcatagcgaacgacgacacccggcatgttgagtgcattttcagcgcattcaacatcatctgcgtgcgcttcgcgtgcattttcagcacaatatccgtcacataccttaatggatgcagcactccttcaaacgctgctgcaggccttcgtccaccgcgaaaaggtacagaccgtggacgccgcgcttgagcaggacattcaactcatgcttcaaattttcttcggcaaaatctcctaaatctttgcgcttattggttgccagatagttttggctggcctttgcatcgaacacgattcccccgttacgatacgtcaccgagggtccaatgatcacaccggcatagttcaaatcaaacccttggatggtgaagatggagccaatctcatctatggtgtacggcttctccgcccaagacagttctttgtcgatgcctttcctgcttttcggagcggaatcttcgagctgatagttccaaggcttgcagaattggtcagaacttattgcggaatgatcgaatccatggtcatccgcaagtcccatacgccatacgccggaagtatcgcgatgcagttccacattccaaaagccatgcggatcattctgattctcagatttcgccgaatacttccagtcataggtggccaacaaacgggacagtccagccccatcccaaccatcgggcttcagctgggctttcgcgtgaatggcattaaacaaatccaccggcgagtcgaacaccttaacgtcataaggttctcgaatcacttcaccatctgcggcatactcacccgtatcagcgggcataggaccgatacctttccccgaagcgaatcggtcaatccactgaatcatcgacttactcgcggcaatacggaattgctttttcaaatggacatgcgcaatgtccacggaaatggacggcagatgatattcggcgcccaaatcaaccgctttgaatgcgccgattttcccggtcgcacatgcgatctgagtcgaatcagagtccagctgaagtttttccagcatcgctgggtcccactgctggctggactgcataatctgattgtgatcaaagaccgcaatcaccacccgggctctgcgcagaatgtcatacagctggttcttcccggaatatccctgatttccttgcgtcatcaacaaatgggcctcgtcgatgagcacgatgtccgccaggccttgcggttggtctggaatgcctcgaccatgctcattgcgtaagctgaatcgattgatgaactgactgggcagcatgaccacttcatcagatttcttctgcaaacccagtttcgtggcaatctgattatatacgtgcacctgttccttatgattgacaagaatgtatgaggaaagccggccgttcgccgtttgtgacagctcaggataatcttcgtcttcggaataggtgtcgccttggatgccgatttcagccgcgattctgtagaacaggtggcttaacaggaccgttttgcctgtccctgcagcaccttgaacaaagattaatttcggatggcggtctgaagattgctcatcggctttcttctgttgccggctatcggcaaccaaggcggcaagttgcaccaaaatagattcttcggcttcgagctggctatcgctgagtttatgaaaaggcgatgccttgaacaacgcggaatctcggatgatctcctccgccgggaacaggtcagaatcttccttgtgtaatctcaaccagatttgcgagaaaatccgatcaaactggtctgcggtgtaataatcgccttgcgcattggtccgtcgattgttgagccttttcaccgaatcggtactggacatatagtgcataagacggttttcgacatccagggttaacgacttattgaatttgggatgtgaaataacatattgccgatatgcatcatcattccgcgagacagcatcagctacagctttccagtcctcgcgttctttagcatctctttcaagatgctggaatgtacgatgccgtatatcgttggtctcaccgacgtacaccgtatattcgttcttcatcgaatagcgattggtctttcctgaatacacgacataaaccgttggatatgccaacacatatcgcagcatgaaatgttccagatcggaatcattaacactgcgccccatctgcttctcgagggattcgtcaaaagccttttcaaaagcttccctactgtattgaccatatggcaggttgatgacaaacggcgccaagctctcactgttcataatcatattatggtccatcatgagctctggtacatgaccaacattcagcaagtcctataatgtcagtcatgatcagtgacagtaccattcagtcgattcgtgattttgtgtcggagcgtggctggggccaataccacactcctgagaacctggcgaagtccatcagtatcgaggcgtcggaattgctggaatgctaccagtggacgccgcagtcgccatccatggatgagggacatgtcagggaagaactagcggatgtgcttacgtattgcatcatgatggccgatgcgcttggtgtggatatggatgacatcgtcatgggcaagctcgcaaagaccaagagcaagtatcccgcggaagccgtccgtgatgacttcgaggaatacgagcaccggcatctgaatgctcgtaagacggatgacgatgctcaatcttcgcctagcaagtagcttgttccatgcggctgctatcaccataccgtgattccgacaccaccaccgcgcgataatagtacacatggaaccaatcaaggatgatggacggccggtggcattggtcaccggaggcacgagtggtatcggcagggcaactgcgaggatgctcgctgcgcaaggctggcgtgtaattgcggtgggacttgatgcagacgggagcgttcctgagactcagcgtcttggccgaggcgaactgtttacctacgaaatggacgtcaccaagccggctgacatcacgcgcattctcggcgctctcccccgattggacgctatcgtccattgcgcgggattcggcatcgccggctctgcggaatgcacaccaatgacgctcgctcgcaagcagttcgatgtgaattattttggcgtgtcgcaggtcaacgaaatcgcactgccgttgctgcgccgtaccgcggcacgcaaccgtaagcggggacgagtcatcgttgtcggctcgattggaggacggctgggtttgccgttccaatcgcactactcttccacaaaggcggcgctggaaatgtatgtggaggcgctgcggttggaggggcgccgtcatggcctcaccgccacaatcatcgaaccgggtgacctatccactggattcaccggctcgcgtatcctcgccgaaccagccaattcaccgtactacgacgaatgccaacgttcggtcgggcaaatggctcatgacgagcagactggtgacggtccggaaagcgtggcccgagtcatcgtcgcgacgctcggcaaacgcaatcctccggtgcgcatcgccgtcgacagcagctacaaggccctgatgcaactcaagcgtttcctaccggatcgcatagtcgaattcgtcatgcgccgtatctatatgaagccgtaatacgcgaacagggagaatcactgagcatattcttgccctacctgactggcaagaataaacaacatgggaggcgtcaccgttgagtagcgcattgaccattttcatcgcgtatgctcctggaacgctgagccttgtctgcgacctcttcgacccctatagcgggatttttggagctttattcaagtttgttgttctcttcattactggcacgtcgctcatcaacgtgtatgcgcgcaaggacacgttggctaacacctcgaaacacaactactacagctaccctcgaatcccacggcatcatgaaggaacagaccggccgcgcggcatcactcgccgtatacaaatccatgctgggactcgtacgtctctgctcggccctcaccgtagcctgctcaatcggactgaacggcacgctcaccctcatggtggtgatatatccggcagatatttccctgtcacccgccaacttccccggcaacaaagtggtgggcatattcctactcatcgtcggcctggccacgtccatcgcctcggccatctacttctggaaggccgcctcccaactcagccgaagcgtaacggcccaacactaggaatgttcgctcactgcgagcgccttatgccaacagttccgtcccaagcacatcatcgataagcccacgtccgcgcatatctgtggtgttgactcgtcattcattgacaatcagcgaatccaaaagcgttttctcgaccaattcgaagaaacgcttcgatgaggtgcagcccagcgaagcacattctcgactcgcccacagattcgcctcgcccaactctgctcagcaggagctaaacctcaatcagcccgaagaaatgacccgctcagaactcaccagcgaatcaaaacctcttcctaatcgatggtttgctccgctcaggactacttcaacagggcaaaacctcgacggactagagggaatgttccgcctagatctgttcagcgaagcgaaacctcgacaaacctgagggaacaccccgctgaatcatcaccagtggcgcaacccagagagccagtagaggaaaagccccgctaagcggcctctcagcaaagcaataccttggcccatccgaagatttgccccactgagactgctcagcgaagcaaaagctcaactcaaccgtaggaacacttcactgaccgcccatcagtgagccaaaatctccattcaccagaggatttgcctcgctaatcatgcaaaagtgctttttaaaatcgctgggaggttattcatttcctcagttattcctccaatcatctaagtcaaaagaactcagcacacgcattcgtcaatattcgctttcggcgttccatggaccattcccacatattcaggactacagtaagcggcagatgtagccgattgtgccccagttcaaaggaggacattatgggattgtttgattcgctgaagaacatgtttgcgcatcacgaacatcatcatggagccagtatcgggcagtcgctcactctcgccgatgccaaagcaatacttgcctttattgtggtgcatcagcagcttgctgacatgcgcaaggtggcggatgcggtcaagcaattgcaggatgagatgccgcagtacatcacattcggcatgtcgcattattacagtgagcccaagcgcgtgcgcttccagtccgaaggtggcaagttcatcgatgcggacgccatcgccaccgcatttgccgagaccaccgtattgcaggacgagtgcgaaatccagcatcttatgggcgatatcgaagacaaccgtgagcatcgcgatccagcaaagacgccagcagtaccgattgacgaactcgtgcgcgtcaccaatgaaaggcttgcgaccggcaacgatgaggagcgaagtcgtgcatggctgttcgccttattcgatcagctcgatgacattgccgaggcgacaaagaacaacctggagccgcttgtcacagcgttggatacgactctacaaaacagctccgctactattggcaactccgccactaccgacgccggcagcagcagcaacaatgccaatgccggcgatgcacgttcccgtatcatctccctaatcgccgacgctctcttcccggccgcagaatcctcgaagacaagcgagtcctcagcatccgccgccatccgcgaactgatgctcaatcccaccgcaacatcgctcgattacatgccagccatagacgtactgcgcgcccacggtctcactatttgccggtgagtccgagaagtccaaccggtggttcatacggcagtggttcatacggcacataccgcgcggagctgctatgcacgaaccaccgtgtccgaacaacgagaacgcactacttctccggcttctccagcttgtccagcgccttcagcagcgattcgacatgccctttggcacgcacgttgtagcgcgcaatcgccacggagccatcgggattgatgacgagcgtcgagcggatcacgcctacgtgcaccttgccgtagagcttcttttcgccgtatgcgccgtacagcttgtgcacggtcaggtcgggatcagacagcagcgggaacgtgagatgatcacgctgtgcaaacttgcgcagcttgtcaagcgagtccttggagacgccaagcaccgtaacgtttttcgacgccaatcgggcgagattgtcgcggaaatcgcaagcctcggtggtgcaaccgggcgtcatcgcggccgggtagaaatacagcactaccttgcggccggcatcaagcacgtcagacaggttgattgatccgctctctgtaaacccaggtataaccgccggcagagtgaaatcgggcgccgcgctcccctcttgcagaagttccggcattgaatcagagctatcaacagtagtggtcatgattcccatcatagaacccttatcaacagcgccagtaaagttattcagaggtcagtcacacaactgcggatcggcaaaacggcgattctgcaacaccggcaatgttcgacgcgcggaatcaagacactcacgactcagctcagcagtaatgagatcagcttccctatcgcccgccgcagcatcacgcgcaaatccgtcaatcgcagcatcacgcgcaaatccgtcaataatctccagattccgttccggctcctccgccaccgtaaattgcgcaaccgcgacggacagatgaccactatcttcgcatgatgaacaaaccattttgaattcacaattctctatgctcggcacagcatacgttgtgccacatcgatataaatattgcaatcgaaaatgacacatacggcggagctcatcagctctccagaagttgcttcaaataagctgaatcatgcacccgcactggtcgagtatcctcatcaaagcctccattggtgtctacctgctgcttgatgaaatcaaaaacctgctgaggagtgacacgaatgctgacttccatctgttctttcattatcgtcggcataagatcgttccctccttccccgttcagtatatattcaacttatttctcactactacagcacgaaaggatccttcgtctgagagcaaacgacatagcctcacaccagtcccaacgttttgaaggcgttggccaggccgtcctcgtgaatgtcggtggtggtgaagtcgcagaaggcttggatgccatgaatggcgttgcccatggctacggatgtgccggcagctttgagcatggcggtgtcgttgtcggagtcgccgatggtgatggtgtcggcaatggcatagcccagcaaagaagccacgtcgcgcacagcggtacctttgtcgatgccgttgatgagcagttcgccgttattcggcgagatcttgtcgtatgagccgtgcacgagctcgaaccatgggctcaaatcacgttgagtctcctcgaaagtcacatcaggattcggcgaggtgaagtatgaccccttgctcacatgaatcgtatgtcccaacgtggagccggccggaacctccacctcatccaacagatgccagaatcgcgcgaattcgccacgattccaggtcttgcctttcgattccagatgttgacggtagccttccgagatgtacatgccatccgcaccttgccattggtagctctcgatatgatgcttggcaaaatacgccatcgccgcatcgaccgcttcaggagggacgagatgctggaacagcagcctgtctccgatattcgcctgggcgcccgccacggaaaccacgccatcgaaaccgaggtcgaggatgctgcgttcgattttcggcacggaacgcccggtgcagatgaagagcttgtggccgttggcctgggcttgtttgcaagcgattttggcagattcgggtacgacgtggttttcgtcggctagggtgccgtcgatatcgatgaatacgagtttgctattggttgtcatggttaccttcgtaactggttggacctcccccagtcagcttatgctgacagctcctccagaggggggcgaagaaaatcccgcctaaaacctacaagtatcacacggcgtaggcggcccagcggccgtgggtgtgctggacttcgatgggcatactgaacaattccgacaagcgttcgtcggtcaggccattctccaacgaaccggtgtagacgatggtgccagcaccgggattacccattgaatccacgcccgcttcggtggcgtcctcagcaggaatcggctttcgtcccatgatagcgatgtggtcgaaaccagccggaatctcctccagtcgatgggtgaccagcaccacggcacgctcggagctttcctcgccgattcggctcagtgtgcgcatcacctgctcgcggccgcccaggtcaaggccggtggtcggctcatccatgatcagcagctcaggatcgcccatcagcgcacgggcgatcaatacgcgggtgcgttcgccttcggacagtcgccacatctccttgccttccagataggagacgcgaaaatcgcgcagcagctggcgggcgcgggcgtattcctcttgcgtgtaggtgtcgcgccagcgcccggtcacggcggacaggccggtgaccacggcgtccagcgggtcctcgaactcggggaactgccggcccaggtcggccgaggcgagaccgatgcgggtgcgcagtttgaatacgtcgtatttgccgagttgatggccgaggatgaatacgcggccttccgaggggaacgtgcgggtggccagcatgtcgaccgcggtggatttgccgatgccgttcggaccgaacagtacccaacgctcccccgcgttgatggtgaggttcacgtcggtgatgatgacacgacggttgcgccggaattcgacgttgtcgagttggaggacggtgtttgtcatgagtgaaatactacctatgattcgcggtctgacgactcccctcagtcacctacggtgacagctccccgcagagaggggagccaagaaaccggtacctgaggggagctggccggcgcagccggactgaggggagcactcgttgcagcgctacttactttttctgctcgtcgaggacggactggtagacctccacggtcttgtcgccgatggactcccagctgaacacgtcacgggcgcgctcgtagccggcctggcccatcttcttggcgagttcggggtcagccatgatcttgtcgatggcggcggccatgtcgtgcacgaacttgtccggatcggtgggggtgccggtgccatcgtgcagctggtcgatcgggaccagatagccggtttcgccgtcgaccacgacttccggaatgccgccagtggcggatgcgacgaccggcagaccacaggccatggcctcaaggttcacgatgcccagcggctcgtagatgctcgggcagatgaaggcatcacagccgtgttccaaagcattcagctcaggcttcggcagcatttcttcaatccagacgatgttgccgcgttcctcatccagcttggcgaacgcgatcttgacctcttcggcgatttccggggtgtcaggggcaccggcacacagcaccacctggatgtccttggaaatcaggtgcagggccttgagcaggtacggcaaacccttctgacgggtgatgcggcccacgaacagcagggtgggcttcgaacggtcgatgtggtaacgctcgaacaccttccagcccgggtcgtcaggggccggggtggcgaagtcggccatggtgatgccgttgtacaccacaaccaccttgttcggatcgaggttcgggtaagcagtcagaatatccttgcgcataccgccggacacggcgatcacacgatcggcgtgctcgtaggcttccttttcgccccaggagctcaggttgtagccgccgccgagctgttcgcgcttccatgggcggaacggttccagggagtgggcggtgatgaccaatggagtgccgtgcagcatcttggccatgtagcccgccaagcaggcataccaggtgtgcgcgtggatgatgtcggcgtccacatcattggcgatctgcaaatcaacgccgaaggtcttcaatgcggggttggcatcagccagctcagaaggcgcgtcatagccgacgaccttcaagctgcccttagcatcggcagcattcgggatagcaggaatgtccgcctcggtgcgcttgccatcaaacgcacgcacggtcacgtcaatgcgctcggccaaaaccttggacagctcctcggcgtgtacgccggcaccgccatacacatgcggcgggtattcgcgggttagaatatcaactttcatcggactgcctctccttcgtgcgtcagaaagaaactcaagcacttcttactttagggcaccgcatacaagaaaacgcacaacttccgtcgtgcgttttgcttttcaagccggatttaccgggcaaaagatcagactgccgtgccgttctgatccaaattcggattgtgcttggaatcgccagcggtgaagaacaggctcagcacacccacaatgaacaccgcggaaacggtgatgatcagccacatcggatggcttggcagccacataaccacgaagaacgcgataatcgcgatggcgatcagcgtccagctgcccacacggaaccactgacgcagcgaatgcggtgccttgaacatcttcggattcgtgtagttcggattcgtgtagttcgggttagtggtcagcagggtttcggtgtccgcaatcgtaccgccgctgggcttccattcggtgccgtcggtgccgtcctgcagacgctgggacttctgctgcagctggtattcgtcaatcattcccgaacggccacggccacgggtctggtcatactgcgacggcactcccctgcggcctgctttggcttgggcacggcgttctgcacgattcggcattccactactcctgtttcgacggtgacactgttggctatattactcgcttatcggcggcaatttgccaccagtccatcggaacccactgtgtgtcattgtattttcagtcagtgatgcgggcagtcggtgatgcgataggtttgcgtatggaagtcgcaagtgaccgcagtgccgtccgcgaataccgaacgctgcaccagcggatcatcatccacgaactcgtgacgaaccagttcctgcatgccgacccgctcatggaatgcagcgaccgtatggcagcgttcgatgtcgttttccgtgcgagcgcgctgttcgtcgtccatgtcgccgtcaacgccgatgtatgcggcatcgcgaatcaggtatggagctccgccgttgagcaaggcgtacagcatgtaatcgtcgccgtccaccacacgctccatcatccacggctcgataacgcaatcatggtagacgaggttatacagcggcaccggtacaccttggcgcggctcgttgggtgagcgcatctggaagtcgtatggcgcgtaatggcagaatatcaggcttggcactgcccagtccgatacctcttcggacgaggagaggatgccgtgcgagagcagatattcgaagcattcggcgcggcggtcaaagcattcgcggcgggtcatgcggtgttcggggttcgagcattcgtcgccttcgttgcaggtgaagacatccaagtatgcacagtcgagcttgatgccgtgtgcggcgatttcggcgaaattgcggcgcacgtagtccggtgcgagctcggcgcacaggtaggtctggtggccgcccgcccagcgtgcgtgttcgggcatcgtaccgtctgccagccgaatcgcattgttggcatcaaaggtttgcgcggtgaagtagtaatcgcggtactggtcatgcgtgccgaaaatatcgccttgctcatggcaggcgtcgaccagcgacttcatgccttcccagccgcctgcctcctgacaagccggcagatagtcggggtgtgcgttgtcgtatccgggctgtgcccaaccatccaagtgcatgtacagtcggcctgcacccatgctgtgcaatgttcgcatttgcttttcgcgctgtgcgaaggtgaccaatgaatcgtttttctcggggtggtccttatcgtagtagtacgagtcgggctgtactttggttttgatgccgatgtgcacccatgaacgaccaatcaggtcacgcacggagggattgcgcgccgccttttcggcgagcgtacgcaggcgacctcgttcgttgacgtacgaacgataggccttgcacaccgccgtgtgatcggcgtggtcgaggaactggtagcgtaccacgcggcgataattcattgtgccgaggcttggctcaaaccaagtattgatatgggtgtacgggccatcgctgggatggtcgatgccgtaaccggcattccatggagtttcgcagatggcgatatacccgtgtccgtctgcgcggagctgcgcgaaccacggcatgtaaccgccagccgtttcgaagcgaccgtcgaaggcgatatctttggtgctcacggcggtaggccatgtgttggggatcatcacaccttgctcatgggtgatgagtgtcgtgtcatggtcgtcggcgcaatcgaagtccatggctgcgggccacgtcacattggtgatgttcaggccttgctcattgagcggaatccattcgaagagcacatcgcctgaggcacgctccacccatacataggtttcaaaggagtatgcgctgtgcccaaagccggtgaagatgctgcgaatgccggttcccgtgccggtttcacgctgctcatgggtgatggaagtggcatccgcgaacgcgaaggtgccttgcgcgcattgcagggtcggcttgaaatcagcgcaggtattccattcggcaccgtcgcgcgtaaaagcgaactgcattgttcgttcatcgaatcgcacggtagtgccggatacggtgaattccatagttaatgtgctcctgtatgttctcgattgctcccgcttacgggagctcgctcatataacaagattaggggtggtctgctgtttgagaccacccccagtcggctttgccgacagcccccgccagcggggggctagcgctgtctgtttattacttactgcttactgcttcttggtcagtgcggtgaacactgggccgccgccgtagtcgaatgcgacgccggagactgcggaggtgctggctgcggtggcattctggttccacaacgggatagccggaaggtcctgcagcagaatctcctcaccttgctgataatacttgtcggcttcctcggtggacggggcggaaagagccttgtccatcatggcatcgaactcggggttcttgtagttgccgctgttgccgcccttgccgtcggccgaactggaatcgtacagctgtaccagatagttgtccgcggatggataatcagggccccaaccgctgcggtatgcggaggtcatcttgcctgaatccacattggacaggaattcgtcggaagtggacatcgggatgctcttggcatcgatatccagcgtgttcttgatgtagttgcagattgcctcaacccagttcttcgcagtgccatcagcattgtatgcaatgccgaactcaccgctccacggggagatggcgttggccttggcccacagttccttggccttggacgggttgtacttcagtacttcatttcccttgagttccttggagtaggcgctgattggggctgcaaggaagtcgacggcgggcgtggcggtgccgtggaagatcttctcggcgacggtcttgcggtcgatggacatggaaatggcctgacgacgcaggttgccttcctcgttctggccgaagtgttccagccattcaggaatggtgaaggtgagcgtattgccaccgggctcgttgtatgccttcagcgacttgtcggattggaaggaggtaagtgcggtgtcaggaatcgtgttcgtgaagtccaggttgccaccgcgtaggtcggcgtatgccgaatcgggcgaggtatagatcttgaagttcaggccatcgttcttggcgacacgattgcccttgtagtcagggttcttcaccatttcgatgctgtggttgtgctgccaggacacgaacttgtatgggccgttgctcactgggtgctgaccgaacttcttcgggtccttgaacgcggattcgggcaacggcatgtaggcgtggctgccggccttgaccgggaatgccgagtcgggctggctgagcttgacatcgatggtgttgtcgtcaacgacggtcaggccgctcagcgtggccttggggtccacgtccggcttttgcagatcatcatagccttcgattgtgctgaagaagctggcgctggcctgcttgttggcactgttggcggtgtaattccacgcgtctacgaaggagtgcgcggtcaccggagtgccgtcggtgaacttccatccgctcttgagcttgatgacgtaatgcgtggcgttgtcgctggaggtgatgctgtctgctacctcgttgtggatgccgcccttcgcatcgtaggtcaccagacctgcgaacagctggtctacaaccttgccgccaccggcctcagtggtgttgccggggaatagtgggtgtgccggctcactgccgtacacggaaatgatattggaatctgaagcattgctggaattggaggtaccggtcgatccgcagccgctgagcagcatgacgattgccgcaccggccgcgaccagtgaagtgacatgacgtgtgttcatgaatctctcccaaatattctggcgtcgtctttttggcgacgaaagacaccataggagcttcatgttaaccatgtatgcaatattctcgaaatataaacattactgaagactcaaggcagtaattaatcccagaaacgcaaaaatcccctcatgaagaagggattttcatgtttctgtttggaacagtattcagcgaggcagcatcatcggacgctggctggccttgatcggggccggcagctcgctcttttccttggagaggtactcgtccacggctgcggcgcaggagcggccttcggcgatggcccagaccacgaggctctggccacggccggcatcgccgcacacgaacacgccatcctgggaggtggcgaacttgtcattgcgagcgatgttgccacgtttgtcgagttcgacgggcagctggtcgaggatggtctcggtgtccggatgcaggaagcccacggagatgaggaccagatcggcgggcagcacgcgctcggtgccaggctggcgagtgaacggaccattttcgccgggagccacggagacgaccttcaagccggtgacatgaccacgctcatcggccacgaagccttcggcggtggtcgagttatcaatggtgaccttggccttctcctcttcggtgccctcgaagttcacggagtcggtggagtagatgtactcgccgccctcttccatggaggaggtcttctggtaggtgcgggcgaaggtcggccacgggctgttgtccggacggcttgacggctctttcggcatgatctgtagcacggtgacgtccttcgcaccctgacggatcgaggtgccgaggcagtcggaaccggtgtcgccaccgccgatgacgatgacgtgcttgtccttggcggtgatgtcgtgcaccggcttgacgccgaagatacggcgcgtggcgtcgggcaggaagtcgagggcgaagtggatgccgtcgagctcgcggcccggaatcttcatatcgcgcggcacgcgggagccgatggccactacgacggcgtcgtaacggtcacgcaggtcatcccacgtgatgtccttgccgatttccacgttggtgcggaagcgggtgccttcggcctccatctgcttgacacggcggtcaagcagacccttctcaagcttgaagttcgggatgccgtaacgcatcagaccaccgatggcgtcgtccttctcgtagacgacgacggtgtggccggcgcgggtgagctgctgtgcggcggcgaggccggcagggccggagccgacgatggcgaccgtctggtcggtcagacgctgcggcggcagcggcttgacgtagtccaaatcccatgcctgatcgatgatggtctgctcgtcaagcttgatcatggtcggcggctggtggatgccgagcacgcaggcctgctcgcacagggccgggcagatgcggccggtgacttcggggaagttgttggtcatggacagacggttgtaggcgtcttcccacttgccctgacggaccaagtcgttccactcgggaatcaggttacccagcgggcatccggtcatgcagaacggggtgccacaatccatgcagcgggccgcctgcgtttgggtccacggttgcaggccggtttcggcgtgaacgtcgaaccagtccttgatacgctcctcaacggggcgttcagccaactctcggcgggtacggaccttcaggaatcctctcgggtcgcccatgtcagcgcgctccttccataacctgctcgtacaccttttcccaggtgccgggcgcattgaaatctacattgttggccttggcttcttccatggccttcgtcatggccacgaactgcttcggcaccacgtgagtgaaccgcttgacggtttcgttccagtcctccagcagggccgcggcgaactgggaaccggtctcttcggcatgctgcttgaccagtgcgtacaccagcttggaggtttcggcatcaagcgacttgaagagcagtgcaccggacttgatggcacccgggttgaccttcttcatatcaaggtcaagcacataagtgttaccgccggagaagcctgcaccgaagttgcgtccggtggggccgagcaccacaacagtgccgccggtcatgtactcgcagccgtggtcgcccacgccttcgaccacgaacgtggcaccgccgttacgaacgccgaaacgttcgccggcgcgaccggctacgaacatctggccggaagtggcgccgaaaccggtgacattgccggcgatgacgttgctgtgcttgtcgaaggtgacggtgtcttccgggcgcacgatcatgcgaccgccggacaggcccttgccggcgtagtcgttgacttcaccgtagatgcgcatggtctcgccgcgcgggatgaacgcaccgatggactggcctccggaaccgtgcagggtcatgtcgatggtgtcgtccggcagaccttcctcgccgtaacggcgggtgatctcgtagccgaccatggtgccgaccgtacggttgacgttgcgaatcgggatttcgatgcgcacgggttccttgtgttcgagggccggctgggcaagttcgatgagcttgttgtccagtgccttctccagctcgtggttctgctcgatggtctggtgcaggatcgtgccgggtaccgggccggcctgcttgagcacgttggtcaggtcgatgccgccggacttccagcgcttgatggcctcgtcctgatccaaacactcaacgtggccgatggcctcctcaagagtcctgaagccgagctgggcgaggatctcgcgcacctcctcagcgatgaacatgaagaagttgaccacgtactcgggcttgcccttaaagcgggcgcgcagctcaggatcctgggtggcaatgccctgcgggcaggtgttcttctggcaggcgcgcatcatgacgcagccttccacgatcagggccgcagtagcgaagccgaattcctcggcaccaagcagggcggcgatgaccacgtcacgaccggtcttgagctcgccgtcgcactgtacgacgatgcgggagcgcaggccgttcaggatcagcgtctgctgggtttcggacaggccgatctcccacggggtgccggcgtgcttgatggcgttgagcggggctgcacccgtaccgccgtcatagccggagataagcaccacgtcggcatggcacttggccacaccagccgcgatggtgccgacgccgaactcggaaacgagcttgacgtggatacgtgccttcgggttggccatcttcgcatcgttgatcagctgcttcagatcctcgatggagtagatgtcgtggtgcggcggcggggagataagctccacgcccggggtggcgtgacggaccttggcgatccacggcgggaccttggcaccgggcaggtggccaccctcaccgggcttggcgccctgggcgagcttgatctgcaggtcggtggcgtgcacgaggtaatcggaggtcacgccgaagcgagcggacgcgatctgcttgatgcggctgtagcgctgcgggtcgttgatacgatcgtcggattcgccgccctcaccggagttggagcgtgcgccaatcgaattcatggcgatggcaagcgtctcgtgcgcttcctgtgagatggaaccgtagctcatggcaccggtggagaagcgcttgacgatctcggaggccggctcgacttcggagatgtcgattggcttgcggttgttgttgaacttcatcaggccacgcagggtcatgagtcggttcgacgtgtcgttgatgtggtgcgaatacttcttgaacatctggtagtcgccacggtgggtcgactgctggagcaggaagatggcctcgggatcgttgaggtggtcctcgccggtacgacgccacttgtagtcgccgcccgtgcgcaggttgcggtgcggggatgcgctccactggttcgggtaggccacgcggtgacggatggccacttcttcggcgatctcgtcaaggcccacgccacccacacgggaggtggtgccggtgaagtattcgtcgatgacttcctggctcaggcccacagcctcgaacagctgtgcgccacggtagctcatgatggtggagacgcccatcttggacatgatcttgagcacaccggtggaaagcgccttggtgaggttcttcacggcggtgtccgcgtcgaccttgaggtagccgttacgggccaaatcctcaacggattcgaaggccaggtacgggttcacgcaggcggcaccataagcgatcagcagtgcgacgtggtgaatctcgcgcacgtcgccggcctcgatggccatggagatctgcgtacgggtgtggcggcgcagcaggtggtgctgcacggcggaggtcagcagcagggacgggatcgggccccacgtgtggttggattcacggtcggagagcacgatgaagttcttgccgtcggcgatggcctcatcgatttcggcaaagatctcgtcaagtcgctcttcgagggccttgccgccgccggcgacctggtagaggcccttgaccacgtacggacgatagtagccgccgaggatgcgggccttgtcaaggcgcttgagctgggccatctcatcagagttgaccacgggcagcgggatgaggatcttcttggcgtgcagctcggaatcggccagtaggttaggctcggggccgatggcggattcgagcgaggtgacgatctcctcacgctcccagtccagcggcgggttggtgacctgcgcgaacttctgggtgaagtagtcgaacagcatgcggctgcggctggagagtgcgggcataggcgcatcgttacccatggatcccagcggttccttaccggtgttggccatcggagtgagcaacagcttcagatcctcttcggtgtagccgaaggcgcgctgacggcgctggacggactgtccggagtggctcacgtgctcgcggcggggcagatcactcatctcgaccgagttgccttccacccacttgcggtacgggtgctgggaggcgagggtcttcttgatctcttcatcggggatgatgcggccttcggcggtgtcgaccaggaacatcttgccgggctcaagacggcccttggacacgatgtgctcctgcgcgatctccggcagaacgccggcctcggaggccagcacgatgtagccgtcgtcggtgagctgccagcggccggggcggaagccgttgcggtcgagcagggcgccgacctgggtgccgtcggtgaagacgatgtcggccgggccatcccacggctcgataagcgtgttgttgtactcgtagaaggcgcgcacgtccggatcgagatccgtgttcttctcccaagccggcggcagcatcatgcagatggcgtgcggcagggaacggccggcgagatgcagtagttcgaggcactcgtcgaaggtgccagaatcggagtagcccggagtggtgatgggcagcagcggctcgaactcgccgagcagttcgctgctcagacgaccttcacgggcggagagccaattgcggttgccctgaatggtgttgatctcgccattgtgggccagcagacggaacggctgggccagcggccagctcgggaaggtgttggtggagaagcgggagtggacgatggcgatggtggccttcatgcgctcgtcgttcagatcctcgaagaagtgggtgagctgcatggtggtgagcatgcccttgtacgtgatggtacgggcggacagggaagcgaagtagacgcctacctcatgctcgacgcgcttgcggatgcggaaggtcttgcgatccaagtccacgccggccagagcaccgtccggagaggcgaccacgagagtcttgaatcccggcatggcggcaagggcctgcaggccgaggccgtccgggttggtgggcaccacgcgccatgcgagaacttcgagtccctcctcgcgcacgattttggcgatggcctgttcctgctgaccggaggtttcgatgtcgcggtcgaggaaggcgatgcctgcggcgtagtggccggcttcgggcagttcggcgggcacggtggcacgcatgaactcatccggcatgctcatcagaatgccggcgccgtcacctgtgttctcctcggcacccacggcaccgcggtggtcgagattgaccagtacctcaatggcgtcagtgacgattttgcgttcaggacgcttgttcaaagtggtgaccatacccacaccacaggcgtcatgctcgttggcgggatcatacataccgtccggagcgtggaccgtgagatcgagcggggctttgaatgtcaccggaatcacctcaattgcttgtgggcacgtaagggaatcgtgcctcttcgttcattgctgttgacacagtaccgttgctccatgtcattttcgtttcgcgtgtccatatacagagtcgccataaaagtcaatagtgattctcaagcaattgtttttatggccagttatgggggtatttcgaactttttcgcccgaaatgtctatttgaccacacgaaaatacgatacggaaacgtccgtatcgtgaaatgctgcgttgggtgatgttacggattggcggctgtggaccaccctcagtcatgcttcgcatgacagctcccgccagcgggagcgataaatgcgaactgccagtcaacggtaaggttgactggcagttcgcatttatacaaggcgcaatagtctataagcgtttgttgccccgtctggagggtctctcgccccttgatgctggtgccggactggccggtgaccggagcgatgccggcgtgggcggccaggtgggccgcgcttttgaagttggcgatgtcgccgccgatgccgagcaggatgctgcttgcggtcctgacgcctgtcccgggcgattgtggcatcctgtgcatgtctgacaccatagcgatcggcgcgctccgcgaactcaccgaacatggcatccgcgtgcccgacgacgtacggctcatgggattcgacggcatccccttctccgactgcgccaacccacccattagcactgtggcgatagacgtccccgcaatggctcgtacggttatcgatcgcatggtgacgctgatcgagtcgaacctacggcatgaacggcccgatgacatcacccatgaccatatccagttccaggtgatgccacgcacgtcgactctggccgcctgataccggccggcacccttatgagtgccggccttcatccctgaaaatatgggtctatgccacgtacagcgcggcgggatacgtgagatatgaaatttcatcgagctgatcgaccgtcacatatccggctggcgcgttgagcacgtccggaatgcggttgacgattgtggcgcacgtatgttcgacggtcgccggcttgaccacgtggaactccacgtccggttcaccctcgatcttccaatcgcacatatcgccatcatccggcccgtacaccttgccgatacaggcagtttccaacgtgatgccctgattcgtttcggtggttaccacggcggacatgccgatgcatttgccgaccgaaatcgtctcgtccatcgtctcggaatacacgtcgacatcgctgaaatacggcacactggcctgggtctgcgatgcgatggtaagcccaagcttctgggccagcgcttcattggaattccatacatacgagggcaccacggtttcgggatgcgcaagctcggcctcgaactcctcggcggtcagaccgcagccgtgcgctttggccaaagccaggccgtaatcctcgacgttgtagctcaccgcaccggtgatcttcttgatgctgtggcatccggcggcgacggtggagaccatgttcacccagtagatgtcctgcatgccggagccgaccatggtggcaccggcttccttggcgatgatgtcgagacggttcgtggtggccggatcggtggtccacgggtagatgcattcctcgcaggtggtgatcacgctgatgccgcgggccaagcactgctcgcacatggtggcgatttcgttctcgaagctgaatagcgtgactaccgcgatatccgcgtcgcactcgttgagtacagcctcggcatcggcgcgaatcggcacattgatggggccgatgcctgcaaacacaccggcatccatgcccacgacttccggattcacgtcgatggcaccgacgatttgaatgcctttctcgtgcatatagcgaatcgtgtacttcgccattttgccgcagccgtattgaatggctttgattggttgcataccgcatactcctttgcaacagtgcatattggccattggagaagtctcaccgtcgagaccaagccaatagccttaactctaccaacatcaggctgggcattcactgatatcggcggcactggagcgtcgggaagagtcggcgtagcggtaccgctaccgagcagaaggactgggccagtacaggtcctcccgccgaatcacggcatctcggcatccgtcagttcctgttccgccgtatgggagaggccgatgactatcgtaaaaaacacggcatatcagcaacttataactacccttcctgtatccttaatgtacaagccccgtgttgaccgccgtttttcatgtcaccggggcattgcaatacgaggtaagggggcctcgtgattcatgcgttacaatcatccgttattaccaatccgcagtggattgaggagtggctttccgccccgcgattccgtacataccttgacgcttgccaccaagatgcgcttacagccttactttatacgagtggaatgttgaccttggtcaaatcctcgtgaaggatgtcgcctttttcgagatcgctctccgaaatgcttatgataggaacctcgctaaccattggcagaagggtcagcattggctgtttgaccaacaatcaccggtgaatcggcccattccacgccgaacgagctccggcaaacctttcgacgcgaatgctctcagcggccgcgccaacgcctgtcgaacgattcctggccaaaactccatgcccagccattgcgcggtagcatggtgccactcgacttaccatctacttccggttacgcagggcgtggagcatggcgacgaacacgataacgatgaccacagccatgatcgcgtagtcaatctatgcgccggtcacggtggcggcggcatagccggcggaacccaccttgcccgagccggactggaacacggagatcacggtagcccaccacagtggtgccggccgcacccgtgaactgctgcagcgtggagaacatcgcgttgccgccaggaagatgctgcgctggcggaagcgacggcgcagccatgcgctgagcggcacagtaatcgacacgaccagcagatagccggtggcgagccattggatggtggcctcgctgatgtggagcacgcccatcagctgcgggaacagcacattcatcacggtttcggtcaggatgccgaagaatgggccacgatcgcgcagatgagtttgccggggatgcgttcgtcgcgggccgattgcatcgcggcgtctgccgctgagatagtgcccgaggtctggggctgagtcttcagagttaccgattgttcaaaagtcacactgtaacaataacactacggaaagcgattaccataaagcgtgctcacagtcgcccatcatgcggacttttcgaaaactgttgataaatagccattttccgcaaggaatccttgcataacactatgatttagaacatctattagtatgacgtaaatcacattacgaactatttaaggtaagcgcttacagttcggcatgggagactcctcgtcacgatatgaatgcgctacagtcactatcgattgatacgcacgccccatcgactacgcgatttcgccgtcgccgtacgcgcgttcggaggcacgcagacacggcttgccttgcaccacttcgacctgcgagggcggcgcgtcatcgccggcacgcttggcctgaatctgttcgaacagcatccggaaggaccgctcccccatgtccaggaagttctgggtgtaactggtcagcgccggattccacatggcaccgaagttgcggtcgtcaaagcctacgacgctcacgtcagcaggcacgcggcgaccaacctcccttagacctcggatcacagcgatggcggtctcgtcgttgccggcgaaaatcgcagtcacatcaccacgacggcccaaggtgcgcccagccttgaccgactcctccaaatcatcgtcgggcacgatgattgggtcaggtaccgtgacgccgcgctccttgagcgcgtcacgccacccattggtgcgggtgttatcggtcggtccttccgggcgccccacatggaacacggtgcgatggccgagatccagcagatgcatggtcatccaacggccaccatccctttcggcgttgatgatctggtattcgccgtcgccgaagctgccacccaccacgaccatcggcatatctttgggaatgtattccagtgcggcgatgccggcccggtcgtactcgtagacgatcacgcccgccggcctgatcgacaaacccatgcgcacacgagccttgacggagtccatgtcggactcatccaaagaaacgatattgagcaggaaccgacgtttacgggcggcggcctcgaccccatggttcgtttcggacgtggagaaggcggaaggattggccgcgaacaccaccacggagtccatctcccggttcgacagggcgcgcgccacaatgctcggctcatagcccagctccttgatggccttggcgatgcgttcacgcttgtcttcggtgacattgacggtgccgttgagataccgggagacggtcggtgccgagactccggccagtctggccacgtccttgatcaccggtcgggtgcggcccgcacttctcgccatccttgtctcccctgttgttgtcagttgttgttattgcgtacgtcaaggagaaccggcatcaccatggcagtcatccagtcacacccatatccgttcagccgcgctccgacttcggttccccgtttttcgccgcgattcattgtagttcatgacggggaacctatatccaaatcaataacttcgcgaaaaccgtacgctgagttgcggtgagtgtacggtttccgcgaaatcatccctaatttcgtgaagaacgtacactgaatcgtcgtcaacgtacggttttcacgaaatggggcctcatctcgtgaagaacgtacactgagtcattctgagcgtacggttttcacgaaatggcagctgatttcgtgaagaacatacgctgaagatgccctcggtgtcactgatgactgttctcggtatggaaggcggcgcagcaaggtgtcctaggctaatatcgcctccgacaagaccgtcggcaaagccgtcgacgtcgattcaagttatccacaccaacaattcgcgtgacatagtattcacatttgccggttgagcttgtgcaacaatcaaaatcacccttagcgtcgagatatgaaagaacacaaggaagtttctgcactgctgcagcaggcgaagcaggagcgtcgctgctgctatggcaccagtgatgcgcaacggcgcgccctgaaacgtcgcctgcatgccggggagctggtgtcaccgtataagaacctgtacgccgaccgaatactttggaacaccatgaccagagagcaacagtcattgcaggtcatacgtgcgctgtccgcaatccaccctcagtgggtatttgcggggttgagtgcggcgtgcgtatacggactgcagcacaactattccctgcacgacggcacagtgcacatcgcctcgaagtccggcatcggcggcggagacgaggcgcgtctcaaccgcatctatatcaatcggattccgacgcggaagcataatggcattctcttgacgactccggcgcgaacgctgctcgactgcgcggcattcccattcccacaggcgctgcccatatacgattcggctctgagaaagtccctgacgaccatcgaagaggtgcagtcgctgatgattcaaagcgtctgcgacgaggtctccgtgaccaagctgctgaagtacgcggatcccctgagcgaaaacggcggcgaatcattgatgcgtggccagatcaccgaattgtctttcggcattcccctgctgcaggtgcagttcatgaatcccgacaatcccgcaatgc

SEQ ID NO: 3724 - DNA, 25153 bp, Unknown
  R150_10m  MAG No. k141_9922
atcgcattggtgtgcgtatcgtcgagcagccacttgcgaatcaagaagttccagatcatcaccacggcagtggccaccaacttgccgatattggtacgcaacagatattcggcatgctgcgatacataggcatcgtggttcatgccataggtggaaatccagataatcgcgtcattcatgaacagaccgactacagcgcccgccacgaagataaggatctccatccagcgtgccatgtcatcacgatgcttgaatacgaatttcatgctcgccagatagttgaaaatcagcgagatgatgaaagagatggtggcagccagcacgttgtgcatgtggaatatgccaaccaataggttgaggataccccagtcgataacaaaggcgataacgcccacaatgccgaacttcatcagctgttcaatcagttttctcacaagagtattcaacactattgggctgactgcggaacgtgtattggctggaaaggccaataatatccccaattggccttgccccggtccgttctgcaagcagcttcctacgtccgcatgccatgttcaacagcagccgctgaggctagactggaagtgaaccgaatcaaggaggaattatgcccgttattcacactcatgtgtccgtgtccaccacccccgagcagcgtgaggcactgaaggccgcctacggcaaggcgattaccgctgtgccgggcaagtccgaaggctggctgatgtgcccgttcgaggacaatatgccaatctacttcggtggtagcgatgaccagcccgccgcctatgtggaggtcaacgtattcggccgctctgtgccgggctctgcttgggaaaagctgaccgaaagcattatggccgcgctgaactccacactcggcattcccgaggaccgcacctacatccgctacaccgccaccaccgattggggctggaatggcggcaacttctagttgccaccattcccctcgcagcatagctgttcgcatcgcctacggaaagcccagtgggctttccgtttaatggctcagggtggcaactagtttgcgtattctggctcccctcagtcagcttcgctgacagctccccctcaaagagggaagctcagatgtagaaagcccgccggtggcgggctttctacgtttcaaggggctgatttccaacattcagaagctctactagcgtttcaaggggcttttaaaacaagaaacccggagtataaacattgcaatttcaatggtcatactccgggtttcgcaatcgaagagcccctcgaaacgcagatagacctccggaaaaccggaaatccgcccctcgaaagcgagttacctcacctcatgcctgtcatcacacaatcttgggcatgggggtggtgaggctggtggtcaggttgacgtggaccagaccggcaccggcatgcacctcgaccttcttcagggtcacggtgcgctcttcttcgggggcgcggtcgttgtcggtcatggtcgccggggacttgaccgccacgaacgccagatcatccagcgagatgcctgcgctctggcacagttccatggcctcggacacggactcggtgaagcccggcttgtagatcacgcgctcggccggtacgccgtaggcgttctcggccacccacttggcgttctcggtcagggccatgcccttgtgcgaatgcggttcggccggcatggagccgttctgcagcgcgtcgacgaaaccgtcaagctgcggggccagcgcctcgccgccgtcgcggaacaggttgccgatgatcggcgtgcggaagcccagctcgtcggcggtggcctgcagggacgggacctgatcgtcctcgccttcccacaggttgatgagcgggaaggtcggaatgtccaggttctccaggcgctgcacgtggaacgggtagcgccaggccagctcgggatcgtcgcgccaggtggaggcgcgggtcaccacgatggcggcggacggccactgcgcgccatactcgcgacaggcgatgtccagccacttctgggcaccggcgtcggtgccgtaaccggcttcgacgacaaccacgtcatgcagagcgcaggccatttccacggaaaccagcgtcggaatgccgatggacacgttggcgaacgggccaccgtgcacgtagaccggggagccgttcacggtctcggtcttggccggcttgaccgcgtcggccagaatgccggtgatgcgccacaggtccacgaactcgccgaaggtcacggccttgccgtccttggtgccggcgatcatcttggatacacgctcggaaatctcgtccatcgagcgggagagcaccatgatctgcatgagctcgcaggtcggcgtgagcacgaccttctccggcacgttgcccttgccgtagtccacggcggtggagcgcagggagcggctcggcacctcggagacacgcggcacgagaatcgtgtcaagcttgccttcatcgatggccttctcggcgaaggagacgagcaggttctgggccgcctcgatggcgcccatttcgccgcacagaccccagtcgatgagctcggggtgggtcagggatgccttgccgccgccggaggcaccgcccttggaaccggctgcggtgatgcccatgctcggctgacgcagcacggcggccgcatcaatgccacgcttgttcagggcgtcgatcaaggcgatggtcgtggtggtcttgccttcgccgcgcgatgccttgagcggcgtatcggcggtgacgagcaccaccttgccgtgcttgcacggggcgtccgggttctcagccaggtacttcatgtaaccgaatgcgtcgatcttctggaccaggccgtactggctggtgaagtcttcgatggtggtcatttaatgcctttctgtgttgatgatggcggagcggggtggtggggcggccgccgccgcctcttcgcctagaaacagcccactgggctgtttcttaacagcttagcctctcagtccgcttcgcggtcagttcccctcagggaggggagctcaatacggactaaaagtcggacatgtggaagccgttcttcatttccatgctgcgagtgtacagcacggagtcaagcagcttgtcggtttcttccttgagctggtcggccatggtctggttggcggcggcgagaatctcgcgcacctcggggttacgcagcgcggcgatggtctcgtccggggtcatcggctgcacatcgccatccacgttgtcggcctcgaattcctcttcagcggcagactgcgcggcttcctcggcggccgtcaagcccagacgggcgatctgctcgtcggtggcggcgaccaagcggtgacccatcgcaccggtcttctcctggtagcgctcgacggcgttggacgtggagcggaaggcgccatcgcacagggcggcgatgatgcggttggcccagtagaagttctcggacgtcacgcgggtggtggtgtcctcaaggtaagcgggcgtggtgtccacgttcgggaagaacggcaccagcgtgttgaacgggttggagccgtatgccatccactggatggcgcgggaggcctgcgggcggtacgggcggatctgcatcaccgcaagctggctctggcggttgatgccgatcgtgcggtacatgtggcgggtgcgctcatcgcccagctggccgtatggatcgaacggggtgccctggtagtgggagctcaacacgtacttgatgtcctcgatggtcaccttgcgctcgggctggcgggcccacgggatgtcgtcggaggtgggcttgtggtcggcgtccgggccgtcccacacctcgtcgtacgggttgaggaagcgctgcatgtaccaggcgcgcggggtgttgtacacgtggtcggagtcggagtgggagccaaaggcgtcgcgcgggttgaacggggtggtgttctccaccgcgaggtccaaatggttggtttcgatgaattcggcgagatcttcggagcacatgtgcgcttcctggtcgcccagagcgtcctcaaggtcgaattcgtcgataccgagctggttcggcatggtcacgtaggcctcgtccggcacgcgcttggcaatccagtgatggccgcccacggtttccagccaccagatttcgttggagtcagagaaggcgacgccgttcatctcgtaggtgccgaactcctcgagcagtgagccgagacgctggacgccctcgcgcgcggtcttgacatacggcagcacgatggtcaggaagtcctcttcgccgatgccgccgggcacctcgggctcatcgcccttggccggcgtgtattccacgaacgggtcggcgccgagcacgcgctcgttggtggtcagggtctcggtggcgctcatcgccacgttcgcctcgttgacgccggcctcgccccagatgccttccttgaggtccgcgttcggcacggcggtgtactgcagcgggtcgtccggcagagtgatggtcaggtgggagatcactgatttgtattcgcgcggctgttcctccggtttcacgacgatgaagcgcttcgggttgaactcgccgttcgcggaatcctcgttgcgggcaatgatggtcgaaccgtcatagctcgcgtctttgcctaccagaatcgtggtgcaggccatagtgtgatggtgtcctttctcttattcaagctccccttgtcaggctgagccgttcagcaaacagcccggtgggctgtttgtaggcgagggtgggagataagtcccaccacagatgttgcgggcggtagcccgtccgtaattgcaggacgagctgtctcgcaaagcgagactgaggggtagtcactctagctgtctctcccccaatccgcctacggcggccagctccctcatcagagggagctcacatacgccaactaaaaatcacgccttaccggtcaggaagatgccgtcggtgtcgggcgcttcgccgctgttgcgcagcgcgtgcaacagctcgttgagccagaagccctgattcaagccgggcaacggcttcttggtggcccacacctgcaggtagtactcgtggtccttgtccggcggctgcggaccgttgtaccgcatgatcaccgctgggtcagtgctgcggcccaagaacttggaggccgaagaattgcggccttgcacggtctcgggaatcatggccggcagctgacgggagaagtccggcgggatggccaacgcatgcgaatcattgaagtcgtacatcagcgcgtcaatcggcagattggccacggaccagtgaatccactcgaagccgcagaccggaatcgaatccgggtccacgaactcccagtgcaggtaacgggcctcggggttcacatcaccgatgtagaacgggaaggagacgaccggcacgccgccgttgaagtactcaggcgcggcggccttggcaaaatcgtccggaatgacggtgaaatcggcggaaatcttcatatgtcccagtatcgctcatatgtgtgacgtactgggggctgtgcgttacgggggtctctcccccagtctcgccgcgctcgacagccccctcgtcagagggggctggttgcgtcgggttatggaattagggcgcagaagagggattcgaataccagtagcgggttgccgttgccggctagacgcttgcgggcgtgggccacttcgtccagacgggtcacggcaccggcccggttcaaccgcaccgacaattcggtgatcggcgagcggttctccaggttgatgaggcccaccgaatcctccgcattgttctgcagcaccgccacatcccggtagatggaggcgatggagttcagcgcacgatccaatacgtcgcgcgtacggcgggtgaccaaacgcttcacatcgtctttcttggcgatctggttgaacgcgccacgcagtttcggcgggatgcggtcgttcggtgccagtccgttgatgcggcggaattccgcttcctggccggcggtgatgcggcttgcgtccgcctcggcctgggccttggcattgtcgataaggctgccggccagcagcaccgcgtccgaggcgcgagcgaggttcagtacgcccaccaccaattcgtcgcgatccgtcatcacctgctcgtcagtggcgtacaacttggcgatgccgatgtgtccctcggccagacgggccgcacgctgcgccacttttggctcgacattggtggtggaggtcaggaatccggccaccgcctgggtggagggcacggcgaggttcacgatgcgcgtgcgcgagcggatggtgggcagtacatcctgggcactcggcgcacacagcagccagatgcagtgttcagccggctcctcgatctccttcagcagcacgttggtggtgcgctccagcatgcggtccacatcctcgatgatgatgatgcgccatggtgccgtggcaggcatttgctcggaggcggtgatgatctcgcgcacctggtcgatgccgatggtcactttgttggtggccagcactgtgacatccgggtgggtgccagcgagcacctgttgggtgacgcgcgtgggctcatcgttcatgccgtggtcggggctttccagcgccgccgcgaatgctcgggccatattggaacggccggagccgggaggcccgcaaatcagccacgactgggtgatctgacccgggtcgccctgcgcgatgcgactgagcatgtcgattaccggctgctggccgactagtgaatcccatacgctcatcggacaccgcccatcgtcacggctcctgtagacgccccggatcgcgccatcaccgtatccacatctgcaacattgtcccgcagcagtgtctgaatgtccgcttcgatggcggaccacacctgttcgatggactggctggcatcgatcacgtggaaacgattcggctcggccacggccaagtcgaggaacgcctgacgggtgcgggactggaagtcgctgccggccgactccatgcgatcttcggcatgctcaagacgattgtgggaaagcgccggatccatatccagcagatatgtgcggtcgggcagcaggttgttggtggcccacatgcttaaggctcgaatctcttctggcgtaagttcgcggccaccggcctgataagccaaggaagagtctaaatagcggtcggtgatcaccacttcaccgcgctccaatgccgggcggatggtttcggcaacgtgctgggctcggtctgcagcgaatagcagcgcctcggcgcgcggtgcgatgtcgacggcgcccccatccacaccgtgcaacagcagttggcgaatggccttgcctagcgcagtgcctcccggctcacgggtaacgaccacggtacgcccctgagcctcaagatacgcacgcagccgctcgacttgcgtggtcttgcccacgccatcgacaccttcaaacgaaacaaacagaccgctcatgctattgaccttagcgttaggcgcagagttgtgcccaacaggcagttaaaccagctctacctccgtttcaaggggctgatttggtcttttctgaaggtctacttccgtttcgaggggctgttacccaagtagacagcgtcccaaaacggcggaatgacgttggcgcggagccgttcatactcgtggttcagcagatgaccagccccttgaagcggaagtagatattctcaaaacgagaaatcagccccttgaaacgcaagtagagcaataattccgctcagccacgcttgggaattacggcggggcgctcgtagccctcgttggcggtcagccagtcgacatccttcttgacggtggcggcggtggagctgagcttttcggcgatgcgctggttggaccagcccttgtttgccagcttcttcacctcggcacggcgtccggcgcgcttggcctcggcggcattggtcgcagccgaagcagcgcccttcttggctcccttggctcccgacttcgcggcaccggcacgcccagcaccgcgacggccacgggtggagggaccagccgcacgcttttcggcgagcagtcggaaggcgtcatcaggggtgatggattcaggcgtgtactgacgcggcaccgtgcggttggtctcgccatcggtgatgtacgcgccgaaacggccgtccttgatggtcacgttcttgccggtgttcgggtccttgcccaaatcacgcagcggcggcttggcggcaccacggccacgcccgcggccgtacttaggctgcaagaacagttctttggccttgtcgatatcgaccgtgaagatctcgtcttccgaggccagcgagcgggtctccgacttgccgtcggcacccgtcttggtcagataggggccgtagcgaccgttgttggcggccaccgtgcattcggatacctcgccggtttcggcgttggtttcctcgtatgtgcccacttcgcgcggcaggctcagcagctttagcgcgtcttccagcgacagcgattcagggctcatcgtcttgaacaacgaggccatcttcgggcgcgacgcggcggcggccgcggccttcttcgaacccttcttggccgcagaagcaccagcagtatcgccagcagcgccagccgaagcctcagccggcggcaccagcgccacatacgggccgaaacgcccattgcgcacctcgacggtaccgccggataccgggtcaacgcccagctcgcgcggtccaccggagtggttgtcgatcaaatcgcgggccacggccaccgtcagctcatccggcgcgatggtgtccggcagagacgcgcgcttcgggttgccttcgacgtccagatgctccatgtcttccagatacgggccgtaacggccgacgcgcacgtgcaggccgtcgccgatgtcgatggtgttgatggcgcgcgcgtcgatctcgccgagctgcgcgacctgctgttgcaggccttcgtgcgcctcgtcggcgttgcgggcggcgccctcgccggaaccgaagtagaagtgggtgagccagtcgcggccggattcctcgccgtgggcgatgcggtcaaggccgttttccatctcggcggtgaactggtagtcgaccagcttggggaagttcgtctcgagcaacttggtcacggagaaggcgagccagctggggatcagcgcacggccacgctcgtatacgtaaccgcgatccatgattgtggagatgatgctcgcgtaagtggacgggcgaccgatttccttggcttccagcgtcttgaccagcgtggcctcggtataacgggccggcggctgggtttcatggccgtccggttcgatgtcgcttgcctcgacctgttggccgacgctcatcggcggcagggaggtgttggattcggatgcgtcacccctgacggccttggcgtccgtcttgccggcggcagcagcctggtccgagccagccccagcgccgggagcggcggctttgggcttgcgcccctcccccgtggccttcataaagccggggaattcgatgacagtgccggacgcttggaacacggcctcgccctcggtggggccggccggcgcagacaggcgcacggtggcggtggagccggtggcgtcagccatctggcaggcgagcgtgcgctgccagatcagcgtgtataggcgcagctggtcgccgggaagtttggaagccagctcatccgggtcgtggaagcgcgagcccgccgggcgaatacactcgtgggcttcctgcgcgccagcggttttggtggcgtactgcttgggctcggcggagaggaacttgtcgccgaaatggtaggagacggcgttgcgggcggcggtgatggcctcctgcgacagcgtcaccgaatcggttcgcatataggtgatgtagccgttctcgtacaggctttgggccgcgcgcatcacgacgcgagcacccatgccgaggcgattgccggcggtctgctgcaaggtcgaggtggtgaacggcggctgcgggcggcggcggtacggcttggtttccatcgacatcacagtgaaatcggcggtcctcagcgcttcagccacggcagtggcaccagcctcatcaagctggcgaacgttcgccgcgaacccgtccggggtcagctggccgtcggcaccgaaatccttggagccggcgagtcgcttgccgccgagcgcgatcatgcgggcggagaattcggcacgctcccccagcgcgtcaggcgcggccaacatggcgacgatatcccagtacggcacacgcttgaatgccatgcgttcgcgttcgcgttccacgatcaggcgggtggccacggactgcacgcggccggcggacaggcccgggcccaccttgcgccacagcaccggcgacagctcatagccgtacagacggtcgaggatgcggcgggtctcctgtgcgtcgaccatattgccgtccacgtcgcgcgtgttgttcagggaggcgttgatggcgttcttggtgatctcgtggaacaccatgcgcttgaccggcaccttgggtttcaaggtctgcaccaagtgccacgcgatggcctcgccctcgcgatcctcatcagtcgccagatagagttcgtcggcgttcttcagggccgatttgagttcgctgaccgtacgcttcttgtcgccgtcgacgatgtaatacggcttgaacccgtcgttgacgtccacgccgaacttgccgaacttggccttgtctgccgcgggcacctgactgggctgcgcgaggtcgcggatatgaccgaccgacgccatgacggtgtaccccttgcccaggtagtcaccgatcttgtgggccttggtcggagactccacaatcaccagtttggtagccatacccactccttatgtattgcgcgaaacacacgacgtttctggcgtcataatactcatgaatcatatccaactgccaaattccgccgttgtgccgggcaaattcggccgttcgcacctcatgttttaccgtttgggcggtgccggcggagcgccgatcaggcccagcctgcttaagggcgctgcagtgatctgacgtagggccagcaacagtccgaatgcgagcatggccacacccgtaatgcccacaacagcgctgacattcgccccctgaaccgcccaactggcgctgacattgagccccggcaccacctgccagatcacataaccgctgtaggcgagcaacagcaggcccccggtaatcaacacgctgccgacgatctgcacactcactgaggagacgcggtggcccggctcgtccatgccggacttgcgtgtaaccgccagagcgagcagggccaatcccgccaccagcaggatggacatcgccacatccgaagggcgatgccattgcccgtatatcacagagacaccgacggtcgccgcccaaaccacgccgatgacgcccgccaaagctcgaaccgcacgaggcacggtaagcagcagaatcaccgcacaggccgcggccagcatcgtgtgtccggaaggcgcggaattagcggcaggcgattcagtgttgatgatgaacggacgcggcaacagacccttgatacgggtgacggccaagcagaccacggcgaacacggcgatttgcccggccaaccaccagcggcgtcgaatcagcgccgtaataatgccgattgcggcaattgtgcagctgacagcgataaccagccaggattgtgcgacggcgttcatcatgccggtggtccaggacggtacatcgttgtgcaggtttttccagaccagttcgtcgtacgattgtccgttttcggtaaacacgcacccccaccacacgccgaagccgacagcgatcaggagcagaccgaataccacgcacagtacgcggctggagattcgcgggcgcacggtgagcgggtcaagccgggccaagccacggtcgatatcagatgccccatccgcatcgtccatgcccagcggcctgaaatcccctaaggagcctgatgtgggtgccgatgcatctgaaccggagaccgggccgagcgcagccaatgggtcaacaacgttcgacgacgagtcaggctgcgctgcgcctgagccgaccagattgaccgccgcatgcgggtcgcgaattctaggggtctgtgcgtcattcatacgttcgactgtacggccgcgccccggacagggagccgtgctcgtgccagctcacggccaaatccgcacaaatggaaaacctccacgcacccgtcagaggccacttacccttgctgcattcctgccctgggggagttgggtgacatagcgccgcgtggaggctggggataagtctatggagacgtatggaccagcgcagcaacacgaaacgtgcgcgccgggtcgcacggcaggccaaccagcgcattcaggcaatattcatgcagcatcaaggaacgtgcccaattgtaagaattccggaaaaataccggcataaatgcgtgtggttacgctcacgtcaaacgattgttcaaggccaacagttacggtggacaccatggcttcttatactcgtcgtgcacattcgggaggcaatggccccgctctgaggcaaccgcgcaccgcgcaaagcagagccgaccactccgcacaggagggcccctatacgccccaggagagccgttcccgccacgcaagccacaaggcttccaatagccatcgagccccgaacaggaagaaaaagaacacaggaaaaggcaagcaccgtgtactgaaatgggtgctgggcatcttcttctccctgattggactgggcttgctggccggtatcgcagtattcgcatacctgtacaccaccaccgaggtcccgcaacccgaaaagttcgcgttggccgagaaaaccaccgtgtattacgcggacggcaccaccgcgatcggctcctacgcggaacagaatcgttcaatcatctcttgcgaggggctgccggactacatcggcaacgcgattgtggcgtccgaaaaccgtacgttctacacggataaaggtcttgatctgaagggcatcgcccgcgcattcattaataatgtgaccaagggcacgcgccaaggtggttccaccatcacccagcagtatgccgagcggtattacatgggcgaaaccacatcctatgtgggcaaggcgcgcgaggccatcgtggccatcaaaatcgcgcaaaccgagtccaaggacgaggtgctgtgcaattatatgaacaccatctatctgggccgcaactcctacggcatccaggcagcggccaaggcatacttcaataaggacgccaaggatctgacgctgtctgaagcggcgatgatcgccggcattattccgtcaccgtccacgtgggatccggccgataacgccgatatggccaaatcgcgcttcaagcgtgtgctgaacatcatgcaggaggatggttacatcactgccaagcagcacactgatgccaagttcccgcagactgccgcggtggcgcagcaaaacgaatacgcggggccgaacggttatctgctggatatggtgcgccgtgagctggtgcagtccaaggcctttaccaaagaggatttggataccggcggatacaagatcatcaccaccatcgacaagagcaagcaggaccttatgcagtccatcggcgacacccgtctggacgacatgcctgaatccctgcaaatcggcggcatagcgctggacccgaagaccggtgaagtattgtccgtatacgccggttcagattatctgtccaagcagctcaacaatgccgatcaggccgtattcgaaccgggttcgactatgaagccgttcgctttgctgggggccgcgcaatccggcgtcagcttcgatacgttgttcaacggcaattcccaccagcacttcaccggcttggatcaagaggtgaataacgctctggagaacaactggggcaacatcaatctgtatcaggccaccgccaactcggtgaacacggtgttcatgaacgtcaatgagcatctgacgccgaagcgcacggccgcaatcgcccatgaagcgggcattcagggcgatatcgatgaaaactccatgtacaacgtgctgggcatcaacgccctgaccgtgtgggatttggcgcaaggccattcgaccatcgccaacaatggtgtgaagagcaccttgcacatggtgtccaaagtgcttgattccaacaataaggacatgtacaacgcgcccagcaaaggcaccaaggtgttcgatgccaacgactgcgctttggtgcagaaggccatgcagggcaccaccacgtacggtacggcggccggcacatccaacatgctgggccgacccatcgccggcaagtccggtaccgccaacgacgaaatggcttcgtcgttcgtgggatacacccccagcatgatgaatgtgtgggctatctggaacccggacgataagggcaatccgcaggcggtgccggccttctccggatacggcatctcttccactggataccccgcccacctgttccaggagttcatggctcaggccttgcaaggtaccgaggtggagcagttcccgaccgctaaagacaatggcaagatcggtggacccgacggcacttggggcttgggcaagggacagagcagcggcctgtccaacaacaccaacaagcagtccaccgaagacgcgcagaagcaggctgagcaggacgcacagcagaaggcggccgaagaggaagccaagaagcaacagcaggcccaggagttcgcccagcagtgcctcgccaatccgagctattccaccgagtgtccgaattatcccggcaccactaccggcggagatggcaacaatggcaacaataccggcaataccggcgggaacaacgggaacaataccggcaacgataatggtaattccggaggcaccggcgggaacaacggcaccaacggcgtcacccagtagtaagtaagcacagacaacaaagctccctctgatgcaatcagagggagctttgttttgttgttagcgctcagcgcttgcgctgggaacggttgatggcagagataatcgacttcagagcgctggtggtgatcgacgaatcgatgccgacgccccacacgatctgcgcatcatcggcctcgccgacctggcattccacgtacgaggcggccatggcgtcggtgccgacggacatggtgtgctccacgtaatccataatcgaggcgtcaacgccaaagttggaaatggcgttgaggaaggcggcgatcggaccgttgccgatgccggagacctcgcgctccacgggcgcatcgaccccgacgttcacgccgcggtcgagcaggcgagccttgagcacggtatcggagccatcctcaccggagctgacggccaccttgagcagcttcaagcggccccacggcgcgagcgaggcgtcatgagtatcgcccacaaccacaccggcggcggtcatgccggactgttcgatcggcaggtactcgtccttgaacagacgccagatatcctcgtccttgacttccttcttggtcgtgtcagcgtagtcctgcacgatcttgtcgaattcaatctgcagacgcttgggcaggtcaagattgtggttggtcttgagcaggtaggccatgccgcccttgccggactgcgagttgacgcgaatgatggcctcgtacgtgcggccgatgtccttcgggtcgatcggcaggtacggcacaagccacacgaagctgtcgagatcggcgccagcgcgctcggcggccacctgacgagcctcgagacccttcttgatggcatcctgatgcgagccggagaacgcggtgaacacgaagttgccggcgtacgggtgacgctcggagatcttgatctggttgcagtactcaaccgtcttgcggatctcgggcacgttggacaggtcaatctgcgggtcgatgccttgggtgagccagttgaggcccagcgtgaccaagtcgacgttgccggtacgctcgccgttgcccagcaggcagccttccacacggtcggcgccggccagcacggccagctcggtggcggccacgcccatgccttcgtcgttgtgcgggtggagggagagcactacggagtcacggtcgtcgaggtgggtggagacgtactccacttcgtcggcgaacacgttcggcgtggtcatttccacggtggcgggcaggttgatgatcatcgggtgctcgggagtcggcttgataacaccgatcacggcgttgcacacctcgacggcgtactccggctcggtgccggtgaaggattccggcgagtactcgtagtacaggtcgatgcccttggcctcgttctcgaggtccttgcacagttcggcggcgtcggtggcgagcttcttgatctcttccttgttcttgcggaacacgacctcgcgctgcagcacagacacggagttgtagaagtgcacgatggcgcgcttggcacccttgagcgcctcgtaagtacggcggatgaggtgctcgcggcactgggtgagcaccacgatggtcacgtcgtccggaatcagctcacgctcgatgagcatacggatgaagtcgaaatcggtttcggaagcggacgggaagcccacctcgatctccttgaatcccatggagacgagcaggttccagaaacgcagcttgcgctcggaatccatcgggttgacgagggcctgattgccgtcgcgaagatcgacggagcaccagcgcggcgcgcgctgcagtcgcttgcccggccacgtgcgctccgggtaatcaaacgggatctgcttgtcgtaggcggcgtacttgttatacggcatacgactcggcttctgcggatcgccgatgaatcgtgccggaggcagcagcgggtcgttgttccccccattggacgccgcagccactgccgcgagatcaaaaacggatgattgaccctgacccattgttcctcctttactgtgcgaaccattcatacaatcgcttattggatattcgtttacgcattggtaacatgcgtaacttcctccatcctagcgacggcccattccaacaccccgttcatctcacaatatgccagcacacgtagcgcttcccggcgcagtactactagacttgcaactatgcgtggaggcgcatgggcttccacagcgagagaagaggtccattatgacaaatccaagtatgcctccaatgccgcaaatccctcaaccgaacggtcagcggcccgcagctccgcaatttacagcaccgcagccggtcttccagcagcctgcagcaccacgccccgcgcagcccgcagcgccgcagttcgcggcgccacaatatgctcagcctgccgcgccgcagttcccggcgcaggctccggctgccgtacagccgacattcccacagcagcccgcagcacagcaagccacctataacccgcgcccggtcaaccaactgcgcaccaagcgcagcctgctgaagtacatcctgctcggcattattactttcggcatttacgatatctggcaaatgagcgaagtgggcgagaccctgaacctcatcgcttcgcgccgtgacggcaagcgcacgatgcactactgcctgatgttcttcctgatcggtggcctgacgctgggcatcggctggctggtgtggtaccaccgcctcagcgcccgtattggcgatgagcagcaggcccgcggcatgactcccaccgttaccgcagccaccttctggctgtgggacgtcttgggaattttcatcatcgtgggaccgctggtctacttctacaagctgctgcatgcgatgaacgatctgtccgccgactacaacgcgcgcggctgaaacaatcccgtccttctacacttgccgacatatttgccggggcagtgtttttactgcgcttgccgatggccgcaccagtcagaccattattgttcggctccgcagtctcgttgattcataggagattccatttatgctttgccccaattgccataccgataacgcggaaggtagcaagttctgcgaaacatgcggcacgccgctcaccgccaccgaagcgaatactgcagcgtcgagtgcttccatgacaccgcaggacgcgccggttgcgcccacgccagcgggagcgactcccgctccggctgccgcttcagtccccggccccggcggtgcggcagtgccgccgattcctatgccgcagggtgctgctggcatgtcggctccggcggtcgtctccgcaccggcggctacgcagcccactgcgaccgttgccacggccacgcagacggccccggcaacggcaaccacaaccgccgcgaccaagcccggcccaaacaaactcatcattatgctggtggcggtgctggcggccctgatcatcgcgggtgtcgctttgttcctgacatatcgttccgaggtgtggggcggcaagtcgctgcctgacccggcatccatcgcctccagcgtcaccgataagaacggcaagaaggcgtcggccgtcaaggccaaggatgtcacggccgcgctgaaggccaagggactcaacgcgaaaacggagaaggtgttctccggcaaggattcgggtgagttcatcggctataagaacgccgctccgggcgctcgtgtcaaggccggctccacggtcgtggtgcaggaatccgccggccccggcgtgccgaaagacactctgggcgcacaggtcaataaggtgactgagacgttcgccgatatgggcgttccggtccactataagaaggtgtttgtctctgacgccaagaagaaccccgaaggttcggttgtggccacctatcctgccgccggcactggggtcaaggacgacgagaaagacaagggcatctacattggcgtggccgccaagggtgacgacaccgctctgcccatcgacgtgatgggtcaggatgtggataccgtcaaatcccagctcgagtctgagggccacacagttaccgttgaacagcgtttctcttccaaggattacgtgggtaaggtttccggcgccagccccgctccgggatcgtccctgtcttccggcgaagacgtgaccctgtatcagggcatcgatgccagcgacaccaaagaagcctttacaggccatgatttggccgaaacaggcggtgacgcgctgctcggtaccacacgcgcagccgacggccagtggtgcactaatgatgggaagtgcatcaccatcgacaattacaaggtgactgaaggcggcagtgataatgctgactataccagcgattacgacggtactctgattgcctgcaacgccattcagcaggcgtactgcaacagtccgaaagccgactacctagtcacacaagattatggcgccttcgagctcatgccgcatatcagcctgaccaacttttgggccaacggcaaaatgtatgacggcaatggcgtgcatatgggtgattcttggcccacatccggcgaataccacatgcaggatctgttcctcgtagtgcctaccggctccgacttgcaggggttggaagataagggctacttcgacaaagacgcgcttgccgcagccaagaagcagaaggcggtggacaccaatcgaccgttcattctgtaccgcgatccgaagctctacgacactaccaccgctccatacaacggtgccgggaacggcgccaatccgttcctgccctacaacggatacaacggcagtaagtccgacatcgtcaagatgaagccggccccaagcgacgccgacgcctactatctggtcgaagcgtccgaacccgattgggattccctgccggacgcggacgtgaaggcgcccagcaccaaggacaagggcaactccaaggattccaaggattccaaggattccaacaagagcagtaagaaatccggcacaccggatgcggcctcactgaaggtgttttctgatttggccggtgcccaatacgcttacacgattgctggcgatggcagcgccttcaccaccatttcgttggatgatcggggcaacttctccggcactgtggacgaggcagatatgagcagtggcgattccgcagcgaatgcgccacgtatccagaccaagttcagcggtaagtttgcatccgccacatccaattcagatggcacggtaacgctgaagtgtgatgcgtcggctttcaaaattgacgacaagtccaaatccgacaagtcaggattcagcccgtgtggcaccttcaccggatatccatctggaacctccagcgatgcgttgccatctgaagcacaggccatgctcgtcaagcgtggaacgccggatggaccacccgattggatgctgattaacaccgaaggctctggtgtttttatccgcatccagaaataaataacagttaagcagggttcaggcggatccaacgcttaatactcagtgaggccagttcataccggcctcacgtgtttttagcgcttcttcaccaacgagcggatgacggccataaaaccgaggctcatggcaccggccagcactgcgaatacctgcgggcggcgcaattcgttacgcatgctgatggcaccggtcacgcagtggtcctcgaaccagacgcgcacctcgttgctggagtatcggcccaccagatcaccccaggtgagcatgcgggtcacgtagccggccgggttgctttcatggaattcaaacaggcggatgcctcgatagcgcgacttggggccatagcattcgaatccgcaggtgggtgcgtagcccaaatcaatgccatgcgcgtggcccacgaaggcgttcttgtgatcgtgaccacagaacagcgcgaagtagccgcctgcctcacgcaaggcgtccacttcaccgacgttctcgtctgcacagccaatcgcctcacccagccgcgatcccggccggcagatctcatggttgagcacgtagcaatgaccggcgtgggtacgtgcgccttccaccgcgttcggcgtccatgcgggaacctctttgaggcaatcgtagaattcctgcggcggaatgtgctggaaggcgatggcaggcaccggcttaccgtcgccgttgcgttcgccaagttcggactgtacggctcccagccaatcgatcgcctcggggcttggcgtgccatacccatcggaatcagccaaatcaagaccacgcggattgaccacataggccgggtattgggcgtcgttctcttcgggcttgccggcgtaatcgccggaattcaccatcatgacggacatagctacgcgcccggatccgtcggaagcctcaatgggcagggcaaaagtgcctggctcaaggctgtcgactgggttcaggcagccggggaattcgcggtagatgccgtcctgctcgtcggccaggatgccgcactggaaatcgtgattgccgtaggtggcagcgaacggcacttccgcttcgatgaccgggccaaggaagccggcaaacgtgcggcggactttgtcacgggtctcgtccatgagctcgtccaaagtcgtcggcacatcctgtggatcggatgttgtggagtagaccagcgtggacgcggtggacgcggtttgttgggcgtcggaatcgctgccgtcggacttcatggccagcagacgattgttcacgcggtctctggcccgccgcttgattccgcgcagcttggcctcgacctcggtgaccgcacgcacgcgagcgcccggttcctcgccacggcggcgcaggaaagtgtcgatgtaggcaggatcgtaaccgcggatctggtcgccggtgaacaccaccagatccgggtcggctttgcgaatggcttcacggataaggcggatggtatcggggagcacgttggggccgtcttggatgtcggccatttgcagcacgcggaagctgccgtcttcgcggaatcgcaggttcgtcatgcctcaccagtctagggacgtaatgctgtttcgcacagcatacgcgccggtccttcacgttccccgccgctccgcacggcagctgaatcactacgagaaatcgtagaacgtgtatcccttatccgctccgctcgtcacgttgagcaatgccttgccgttcagcgtatcgacgtcgtttcctatgagatagccgtctcccgtggcccccatatccgagtcatggtaggagcctgagaaggtgccatccttattgactttcattacggttccccatgcgccgacaccggaaccgaaactatagttacctgccgcctgtttcatggcctctttgaaggtggcgtctcgtttgccgctgtccttggacttgtcaccggtcgtctcaccggaagcggccttatcgccagtgcccttgacctcggcgtccggcagggaatcccagtcgagatcgccgttctgctccaccagatagtagacggtcgaatcgctgggagccggcctcatcggcaccagcgcgttctgatagttattgatactgctgttggtcggcacaaacgggtccacgtccttgcctcggctggcgctcacactgatctcgctgtacaggctcttgtcacgaaccagaacgtacgggcggctggtatccacggccttctgcttcttggccttcgccagttcggcggcgtcgaagtaaccggaatcatccaatgacttggcatcggaaccggccgggaagtagaccaggaagtccttcatgtcgtaggtcatgccggtcgacccgttctcagccccggccggtggcgtcatttcgccatcgtcgaacgacgcccgttcatagttgccgttcacgcagtactcgcctatcgaagcggacatcacctttgagccgcagttcggcagacccatgcccgcgtacagctcgaacataccccagtctttcaacagcagatggtttttcatcggcaatttgtccgcggccatgccgtattccgaatccgcttccagcatcgcgccgctgatgtcctgagagaagttggtcaggcccaacacatcggccttgtcttcaggctcatggcctttgatttgcaggtactgataatcctcggatgaagtggagccaaagggattcatcgaggattgctccagtgtgatgcagtccttggcggcatccgtcacctcgctcttgcagtacataccgatcattgcggacgcgtggatgctggccatcttgatgttgtcatacgagttggttttgctcagcacgtccatgttgctggacttatcgatgccgtaatacaaggtcaccgactggccggaactcaacgtggatcccggagccgggtacgagccggaaatcttgcccacgtatttctctgacgagtaatgcggttccaaatccacactgtagccttgcgactccaagtcgctgacggccttgttcttgtccgcaccaagaatatccaccgggataccatcgcccttggaggccacgccaatgtaaatgccgttgtccttctcgtcatcggtgagccctgcaccgggagccgggtacgtgacgctgacctgcccttccggagtcttgctgtccggcgaaatcacaaccttcttatagtgaatcggcacgcccatattcgcgaacgtgttcgtcaccttgttcacatccttgccgaccgtgcccttcggcacaccgggaccggccgactcctgcaccaccaccgtggaaccggccttgacgcgagcgccaggattcgtgccctcgtagccgaggaacacaccgcgatcctcgccggagaacaccggaaccgtcttcgcgttcaggcccttggccttcaacgcctcggtcacatccttggccttgaccaccgatgccttcttgccgttcttatcggtgacgctggaggcgatggacgccggatcaggcagcgacttaccaccccacacctcggcacgatacgtcaggaataaagccacactggctacgatcaacgccagcagcaccgccacgagcgcgataatcagcgtattcgggccacgcttgcccgaaagattcggcaatgtggcggttgcggtcgttgtgccgctcggcggcgtggctgcgcccggagcgacaggagcacccggagcggcctgcggcactgctcccggtgcgatcgacccagtatgacttgctcccggtgcggtcggcgctcctgccacaccgctcgatgtcggcacgccgggctgcccataggcgttcccatcgtttgggccgggcagcggcgggtgatcaagcaccgtcatagtattgtccggcagcggcactggaatcgggccggccgccgcctgaggagcaggaacactcacgtcggttagcggcgcaccacagtgcatgcagaaccggcttcccccatcattgtcagcaccacaattcttacagatcatcattgctcttctctctggtcgaatgacgcactatagcctcattctactggaaaatgaacgcgatggaatagtccccactcagccgccaaccaaaaggcgtggtccgtatacacagttgcatgtgcaaatactgcttgtactatttgcgcaacgtgctatccaccgaggcaagcacttggctcatcagctgagcggcacgatcctgaccttggttttgcgtgaccacagagaccgcggccttgttgccattcacctccacgatggcgaagtaattccacgtgttctggatgcccatgccacgatgtgcatgcacggtcatgccgctcggaatcaccacgccctccgaagcaatatcagtgttcatcagaccagtgccaccgaccgcatcaacggcaaccagcatgcgggccgcgtcacgagcggtactgtaattctcatatccagcattgctggcctgtacatcaccgaaatcacggttgaagctggtgccgctgtacccatgggaactcagccatgaattgacagcactccatccgccaagggccccgacagcctgattgccggcactgttatccatgccggtcatcatcgtatttgccaatccttccgcattgccgttgccttgagaggcaagatacaccggcagatacaggcctgcggcaacgaacttcttactcgactgcgacgtattggcaatggccgagtcttcagacgacgcatcggcgctggaactggagctggacgaatcatcgattacggtggcgctggccgccacatccatcttcactagcgggttgtatccaccgctcatcggtataccgggtacgaacggattggtggtttgctcgccgttcttgtatgcttcgacgcttgtggtcttgtatcccttggggtcgcgcatgatgaagaacggccggtcggtgtctggcttccccgccttgttcgccgcagccagcgccttgttggag

SEQ ID NO: 3725 - DNA, 24935 bp, Unknown
  R150_10m  MAG No. k141_10243
cagggtggtctccggatcgaggcccttggtcttctcggccaggtcgttggggtcgatgttggagatgtagcgggcggagatgcccgcgtcggcgtacggcttgagggcctcgtacaccatgacgggacccaggtcggagccgccgatgccgatgttgaccacggtttcgatcttcttgccggtcacaccggtccactcgccggaacggaccttgtcggcgaaggcgtagatgcggtcgagcacctcgcgcacgtccttgacggtgtcctggccgtcgacgatgtacttgccttcatcctcgaccgggcggcgcagcgcggtgtgcagcacggcgcggtcttcggtgttgttgatgtgcacgccggtgtacatagccttggtgcgctcatcgagcttgacggccttggcaaggttggcgaacagctggagggtttccggcttgatcaggttcttggacagatcgaagtgcaggtcgccggcgtcgaaggacagcttgtcgacacgctcggcgtcttcggcgaaccacttcttgaggctcacgccttcggcctgaagctcgtcatagtgcttctgcagggcagcccactcaggggtctgggtggcgtcaacgggcggattgatggccataggattccattcctttcatcagtgactggagcgccttcgctcacggctcggatgcgctccgtatcaccaaacagaatactcacaaattcggacatgaacagaacaaaaatcagtcagcgatgtcggattgccatcgtttgcattatcgaacagttcgtggcgcggcacaaccgtcatcttcaaccgagcggtcacgacacaactgccaagccgccgattggacttttcgcggagatgtcttatacttaatttcttgtgcgcggctggcgaaatgccttccgcgaaccaagccactttagctcagtcggtagagcggctcactcgtaatgagcaggtcgtcagttcgattctgacaagtggctcggatgccctaggctggctggtctgtaatggctgtccggcctagggttttgtatatcttccacacctgtggaaacgcggatatgcatgcgcgagtggcggaattggtagacgcgcaggatttaggttcctgtgtctttgacgtgtgggttcaagtcccatctcgcgcaccggcttgagcctcctggaaacattggatcgccaacgattccgggaggctcttcgtatatgcgtgaggcaattgcaagcccttgcggacgcctctacatatggcaatgccaaggcggcaaatataatggtcacagcattgtgggtctgagcctgtgcgccgtgagcctgtgtgagccaaggagagaagtgtatgtccgccattcttacgccggttggcctattgctgatcattctcgccggctatctgttcaagcggttcggcctgttcgggcagaaggattatcgcgtgttgcaaaccgcggaattcaacatcgtgctacccggtgccatcgtatactcgttcgccaccaatccgcatgacatctcgctgctgcttatttcggtattcgcattcctgtttgcttttatcccgatcgtgttcatctttctggccacccgcaagcgcaatgtgaccgaccgcgccttcctgatgctcaatggcgccggcttcaatctcggttgtttctctttcccggtcgtccagtcattctggggtgcgggcgcggtggtgccggctgcgatgttcgatatcggcaactgcgtgatggtggccgccggcaccaatgtgctcacccagcaactgctgcatattcagcccggcaaaacacttgccgaacaacacgccggttcggttcccaccttgccgtacgaaaagcccaaggatcgcgacgccaaacggcttgcccgccgcgcattgctgcgcaccatcggcaagagcttcttcggctcggtgccgttcgacacgtatctgctcatgatcgcgttgaccgtcgccaacgtgaagattcccgattggatcgcctctataacccagccgttgagcggtgccaacgcgctggtgtcgatgctgatggtgggcatgctcatggatttgccccagtccaagcatgatgtgaaggaagtcatggccgtcatcgcttggcgtataccgttcagtgtcgccttcgcgttgatctcgtggttcctgctgccgttctcggcttcgattcgcgccgtgatggtgatctgcgcgttggctccaatcgccattttctccacgctgttcaccgacaaagtactcggcaacgccaaactggccggcttctcgctggcaatcaccgcgatgatttcactggtgatgatggcatttgctcacgtgctgatgggcgtgtgagcaaatgcgcgagtaggcacacgacgggcgcacggcgggcacacggtcaggcgagacgcagcccacataggttcgtcccccggccgccagctgctaccggtgcagcagcttgtgcgccagattgctcacgccgaagcggaacttgtccaccggcaacgtgaatttgcctaccatctgctcgacgtagccgttgaagccctgcttgaattccagcacgccgcggccctcgtcgttcggatcgtcgaacacgccggaaatgccgtagaagttgtagcggctcacaccctgttccacacacaggtgcagcatcgcttcgtactgaatcagcgccgaggcgtagaacggcttgtactcctccaacgaaccggaatactgatagaccacctcattggggtgactgacgaacattgaagccgctgccggcagcacatcgcccttcttggcatatccctccacctcagccagacgcttgtcggcggccgcgagattgcgcgattcctcccccagctgacgttcgatgcgcgtggtcggacgttcatcgtatttcgcctgcagctgtgcgaccttagtctgcaatgcctcgcgcttggcggtcatatccgccacatattcggcgatgtggatttccgcgagcatgaaatgcgcatccgcgccatacgcctgcttgaactggcggaaatagtccgcgccgcgcgtcgcgaacccgcggcgttcaccggtccgccgttcgatatcggcgaacacgtcgaactcgtcggggccgatttcgcgaacgtgcacacccatcgactgcgcccgcttgacgctccattgagcgcgtttgccgaatgatgccagcagttccttgccgttggtgatgccggtgagatccttgacgtacatccactggcagaccacgtcataaccggtatggaatccgccatgcgcccagcctgcatcggcgaatccggtcagcagtgcatcgttcggctcgccgtcgggctgtccgtccgaggaatacagacggtaggcgacgttaggccagcatgccacggaaacagcatggtggcgacgggccgattcacgaatcgcctcggtcatggtccatagcagagccggatcatcgctaatgccgatggggccgaaatatacggagccatctgcaccgaaacgaccattgaggtacagaatcacgcagccggttaccagattgccggatgcgtcgcacacgccaacgcattcggcttcatgcccacgaatcttggcaagacggacctgcccggaccattgctggaagctgccctggcttgtggcttcggaaagccggtcgagctcttcgggcgtaatcacgccaaacgtatacgtcgtatctgttcgattcacagtcgcgctcatctcgtcgtcacctgtgccttatttctgtgtccgtgctcgccactgtttgtcagcgatgcagcagcttgtgtgcggcttcggatacaccgaagcgcagtccgtccaccggcagcgtgaacttgcccggaagctcttccacgaatccgccgaagcgagtcttgaactgccagacgccgtaggaaggatcgttggcgtcgaaaatgccggaaatgccatagaagttgaagcgctccacgccacgggcgatgcagtcaagcatcgcctcgaagtggattagggaagacgggtagtaatccatgaaacgatcgtcctcgccgctggacaggcagacgacctcgttcggatgccagaagtagacaccggcttccaccggaatgaccggaccgtccgaggcgatgatgccattgacttcgccgatggtcttttccagcgccgcaatcttcttgtctgcggtggcgatgcgcttttccagcgttgccgggtcggaggcacccttcttggccgtgccttccggccgctgttgcgcgcgctggagcaggcgttcgaggttgcgcttgtctttggaggccgcattcagcttggattgcagggtgtccagatattcgtcgaaatgggtttcgaccaccttgaactcgatcaggtcgccgaaggtatcgaacagacgctcatagtaggccagatcgcggctcttgaagccttgacgtgcggcgctcatatcgcacagcttgacgaaagtgctcagttcgccgcgttccagccggcgcacgcgcagaccggaatcctgggcgatgcggatgttcttacggcggtacttggagaacgaggccagcagttccttctcattatgaatgccgtcaagccccttgacgaagttccagcggttcaccacggattcgtagcccacggtgaagccgccatgtttccaaccgaagcgggccatgttgtccatcatcgtggtgtccgggtcgctggtcggcttgccgtccagatcatgcagacggtagactgcggccggccagcaggatacgctgatggcgtgatgggccttggccgaacgacgcaaggcttcggtcatcgcctcaaccacctgtggattgtcataatcgcacagcggtccgcaccagactgagccttccaaaccgaaacgggaccgcgtgtacaccacgtagcaggcggcaatcagcttgtcaccgcgcttgacacccacatagtccaccggaccgttgaacgcacccatggcggccatctgcgaggtctgctggaaactaccttgcacttgagctgcggagaacgcatccagctcggcaggagtgatcttggtaggggtgagcgaggcgacgcctgcatcggattgcgtcataatcgaaccttcttacttgtcgttactctgatcgttactctgggctctggaatggcctgtgtgctgcgtccgtttaccgcgacagcagcttgtgcgcaaattgcttcatggcataggcaaccggtttgaccggcagcacgaactcgcccggaagttcctcgacatatccgttgaagccctgcttgaactccagtacaccacgaccctcgtcatcgggatcatcaaagacgccgtcgatgccgtagaagttgtagcgagacagcccgtgttccacgcagaaatgcagcatcgcttcatgctgaatcagcgcggaggcgtagaagggcttgtactgctcgacgctaccggagaacaggtagatgacctcgcgcggatgctccacgaatagtgatgccgcagccggcagcacatccccgtctttggcgaactcggccgcctcgttcaggcgcttttcggctgccgccagattgcgggtctcctcccccagctgacgttcggttttggtggtggggtgttcggcgtttttggcggtcaatgccgccaccttggccgaaagtgcttcacgcttggccgtcatatccgctacatattcgtcgatgtggatctcggcaaccataaaatgcgccttgttgccaaacgcttccttgaaacggtggaaatatgcttcgccacggtattcgaagctacgacgttcggcggtttgctgctcgattcgtgcgaatacccccaactcgtcgtccgacagctcacgcacatgcacacccatcgattgggcacgcttcacgctccactgggtgcgcttgtcataggacttcagcagacttttctcatcggtaatgccggtcagatccttgaggtagcgccaacgtggaaccgccgtgtagcccacggtgaaaccgccatgagtgaagccgatcgcctcgagccgttctatcagcttattgtcgggagcgccgttctggtcatccggcaaagaagctccattggtgtcgcgaaaccgatacggggattcaggggtgatttccagctgtgaagcaccctttgccttggcatggcgtttcagcgcatccatgaagaaggtcaatgcttcggtgtcgtgatagtcgcacatcgggccatcatggatggccgcaaatgtagagaatcgagagcggtgagtttcgaacagcgccgccgcgacgatcttctcgccctccttgagggccagatattcgacgtcgatcccctgcgcggcgcgaaggcgtcccatcgccgaggtctgttggaaattgccttgtggatgcctggcggagaaatcatcgaactcttcgtctgtcaacttcaccagcacaaaatcacgcatgcttccctctgcctccgagtcaatcaggctcaccatgctagcataacgcgcacacgacgaatggggtccgagcagatgaggtgtgcacatcgttcgcactattgcctccacaatggctcaaagaacaatggcccgaagatgctgaacgtccggcttgcgttgaatcaaacgcagtgctatattctctacttggctcttggagccacgccaccttagctcagtggtagagcatccccctcgttcgtgggaaggtcggtagttcgattctatcgggtggctcttgttcatcaagaaggccgacgcactaagcgccggccttctttcgtatcgcccttgctaggtcataggcgcttgctagacacttgcccgattcgggaggggctgagttgctgagccgcgactcaactgtggcttagtcgcggctcagtgcagttagacagcctagacgacttagtgcagcagcgcctcgatagcggggaccaaggctttcagcgccttgcctcggtgggaaatcgcattcttctcggccggagtcatttcggcgctggtcagcggctcgccttcatggtcaggctcagtgctgacgcgaccggcaggctggtcgtccgggacgaacagcggatcgtaaccgaaaccgtgttcgccacgagcctcgcggatgatacgacctggcatgtcgccgagttccactgtctccgacttgatggcgtaccgggcatgcaccggggcagggctcccatctgcagccgtggtgtaaacggtgatgccgtcggcagccactccaccggtcacgtcggcactggcctcggtgtccgggaccaccagcgcggcggcgcagcggaagcgcgcggtacgcttgtcatccggaatatcttcgatttgggcgagcagcagcgcattattggccttgtcgtggccgtgagcacccgcccagcgagcagacagaatgcccggagcgttacccatcacatcgacgatgagacctgaatcatccgctacagcgggcagaccggtacggatggccacggcgcgggccttgagcagcgcgttctcctggaaggtgacgccggtttccaccgggtccggcaggtgaaggctaccagcggacaccagttcgatgttttcggcatccgcgccaagatcctcttcgagaatgcggcggatttccacaagcttgccttcgttatgggttgcgacgacgatttgcatgggttctcctttaagaaggctccccttgtcaggggagctggacattgcagaccgtacggcttccagccgacaacctcccctaaaggaaggggagctggcttagtctagggacaaagcggcacgctgggcggcttgcagttccttgttgcccttttcggccaagtcaagcagggtgccgagttcggcacggttgaacggacggtgttctgcggtgccctgaatctcgatgaaggtgccggaaccggtcatggccacgttcatgtcggtcatggcctgactgtcttcaatgtatggcaggtcaagcatcggggtgccgttgatcacgcccaccgatacggcggacacatagtccttaagcacgcggctggcggacttgatatggcggtgcttctccgcccaattgactgcgtcgaccaaagccacgtacgcaccggttacggaagccgtgcgagtgccgccatcggcctgaagcacatcgcagtcaagctgaatctgattttcgccgagcgccttcatatcgatgacgccacgcaggcagcggccaatcagtcggctgatttcgtgggtacggccaccgattttgccacgtacggattcacggtcggtgcgttcggcggtggcacgcggcagcatcgagtattcggcggtgacccagccgaggccggagtccttgcgccaacgcggcacaccaggggtaaaagtggcggtgcacatcacgcgcgtgttaccgcattcgatgagcacggagccttcgggggcgtcggtgaagtggcgggtgatgcgcacggggcgcagctcgtcgaccttgcggccgtcggcacgaattatttggtgattgccaagcatgtctttgatttcaaccatgcgccccagcatacgccatccgctctatgtctggatagcaactcgtcaaccatcatcaaaccccagcgcaatgtcattccctgcttacatatccattccatgacacttggctgcacgccactattttcttatgcaccactcgcttacagagtcaatgcctgcgtacctgatgaggattgggaaagatcgtccgctggaataagaatgccatattccatgaaatcttggttgaattgcttgcgctgcatagcgttgagttcgtaatcgattaacggcaaatatgtatagtccatgtcatgcaacggctcttcatatcgatgaagcacgtgcataattgccgcgctcggcagtggggaccaccatccatccaagccataccggtacggaggaaccaatgtcaagcgtctgttccttgggttgatatcccaacgcagaaaacggtataaaccagcgagaaacgcaatccagcacgcatcgttcacccgtgcaaccgctcggacgaacgatatacgttgatgttggacattccgagcatgaatcagattgacgcagagcatcttcaacgtagaccaggtcgctccgctttctattgcatcgaaatcaggaggcctacgcagttgcgccaacaacatgtgcaattcgtcttccggaatcgtttgcgagggggccacggcttctaggtgaagaccaaaaccagcccgctcaagcccctcggccaaaacatcaaacaacatacctctttgcccacgcaatacgcgaccaattgcagaccgatccaaaccagtacgctgtgcaagctcataggcattccaaccagtctgcgacatcacttcattcagcacagccgcacacgaattaacagggcaaccagataccacaccgtgatgcacgacatcgcactgttctaacgctcgatgctctacagcgcgccgctctgatacgtcatcgttgcccgccgcgttctcatcattgagagtttcactcatcgaagtcaccttgcctcggccgatttcccggtcatttcatcaaaccgcaatcatcatatcccacaatcccatgacgatacgattcgtcatatcccacaattcagagacggtatgattcgtatcgcatcagttcacacgattcttcaacgattgctccgcaaacgattgctctgcacgcatcgcggcattctatcggcacactattcctcccaatcagcccaacgcaacatcacacgcaacacccctcacgcaacacccctcacgcaacactgcgccatctctgtaacatcaccgacaacacggcaatcccacaacgtctcggtgcaatatcctctgaaatggtttggtttttcactccacctcgtcggcatcctgaccaggataggaatatgtgtcgttccgcaccatgtacaaaacgttgtcaactgacaacgttcttcaaatcaattggataagacaaatggccatttcccgccaattcatctgaatcaagacgttgtcaactgacaacaaaatgtacattgcaacagcatgcacatatacatatttccccagtgaacagtacccccccccaaaaaaaacaggggggccaccctcagctggaaccacgtccggcgaaccgggacgcagttcagcccgaggggacgcggccaatacagccccgggacacagccacaggaggtgcaaacacgggggtgcgaccggggttggatctccccgcctcggcggcgatcacaggagtgcggccaacacagacagaggggcacagacagagggaagagtagccaatgtaaccaaagggatgcggccagtgagatacggtcagagaacctgagtctccgtaggaatcactggctcgcccttcatgaggctctgcgcggtgatgggcagttcggacaacgccttggcgtggtagtcgtgggcggccatgatggcgtcatggccctgccactgagcgtcgatctgcccatgatccacaaagtcgaccagcaggttcttccacgtcggttcaggcgtgaaaccggccagcttctcctccgagccggaaatcacgtgttcgacttcggctaacgcgtattcgtaggagcggaatgccagtttgcgaccgggcactgtggccttgtccttggatttcttcatgaccggaaccatcgtgccgtcatcgccttcacgttcggtgagcttgtacaccatcgcacaagtgggagcgccggagccggtgaccagcatggtgcccacaccataggagtcgaccggcgcggtctgcaatgcggcgagcgcgtactcatccaaatcgttggtcacggtaatggtggtgttcgtggcgcccagggcgtccagctggttgcgcacacgctgggccatggcggctaggtcgccggagtcgatgcgcacgccacccagttcgggaccggccacctcgacggcggttttcacggcttcctcgatgttgtaggtgtccaccagcagcgtggtgttcttgcccaatgcctcgatctgcgattcgaaggcgtcacgctcggaatcatgcaccaacgtgaagcaatgcgcggcggtgccaatggccttcagaccatacagctgggcggccagcagattggcggtacccttgaatccgcccactacggcggctcgagcggcggccacggcggcccactcgttagtgcggcgtccgcccatatccatgcaaggacgatccttggctgccgacgccatacgtgaggcggcggaggccactgcggaatcgtagttcagcacggatagaatcaacgtctccagtagcgtgcattcgccgaacgtgccttcgacctgcaaaatcggggagttcgggaagaacatctcaccttcgcggtaaccgcgaatcgtaccggagaagtggaagttctccagccacttgatggtctcggggcttaccacgtgacggtcggccaggaacttcaggtccgcttcgtccaagtggaaatgttccagcgcatccagaatgcggccggtgccggccaccacgccatagcgacggccttcgggcaggcgacgcgtgaacacctcgaacacgcatttgcggtcggcggtaccgtctttcagagcggcgtcgagcatcgtgtattcatacatgtcagtcatcagagccggcgaataatcgaccattgcaaggcctttcctacataagtggtgaagttgcacctaagtgtagtccgggcaaagccatacagcccactggcgaagcggtagactcgatgcatgagattcatcgtggtgttgtggcgctttgcgatcgccggtttctgcttcgtgggcacatatgaggcatggtccaaaccgcagttctgggtgtatttcacgttccagaccggtttcgtgctgggcatcgtgatgctgtgggccggcgcggccacactgctcaaaggcattcagccgcctgcatggcctaagggatgcctgactgtgtacgccatagtcaccgcactggtggcgttcttcctgatgcctccggacgacccggcatacgtgccacaggttattggcatcatgaccaatacgatgctgcacaaaatcgccccgattatggcggttatcgatttcgtgctattcgacccgcaccggcgtttccgctggcattacatgttctcgtggctggcgtacttccctgcatacttggtcttcgtgctggcccgtgcgacgatttggccggggtccggaccggcggccggcggcagtccgtatccgtacgacttcatcaacctcgacgcactcggctggcaagggttcggcattagctgcggcaagctggccatagcgttcttcgtgatatcgctcgttgtctggctgctcgaccgcgcactgccgagcaaggccttactcggatagacgcgcccacgatcgacgcacatcggtcttagtgcccagccggcatccagctcagcactcgatggcctcagcattcaatggaataggcgcggtttttgtactcgcgccaatccggccagtcttcaccggcgtagagggctgcatatggaactgcgtggccacctgacgaatggtgtaggacaccatgactccttactgcggcgacacgccgaagcgtcgcagccgtttgcattcaagttcacttgaactggaaccatagtatccaagaacacttacgaatgccactcaatcggcgtcggtttgcccatcgcaggtaagcattcgtaagaacaaaaatgacattgtaaggagatttaatgttcgagccaaccgccatctatgcccccaacccgcaccgttacgacacgatgacttacaaccacgccggcacctccggcctcaagctgccggccgtctcactcggcttctggcacaacttcggcgacatcacgccattcgaccagatgaagtccctggtcttcaccgccttcgacaacggcatcacccacttcgatctggccaacaactatggccccgaacccggccaggccgagaagaactgcggcctgctgctcgccaagtacttcaggcaccaccgcgacgaactcgtcatctccaccaaggccggctacgaaatgtgggccggcccctatggcgacctcggcagccgcaagtacctgctcgccagcctcgaccagtcgctcgaacgcctgggcctggattatgtggacatcttctaccatcaccacccggacccggaaaccccgcttgaggagacgatgggcgcgctggctcaggccgtgaactccggcaaggccctgtacgtgggtctgtccaactacgatggtccgacgatggagaaggccgccgcgattctcgccgacctgcacgtgccgttcatcatcaaccagaacaaatacaacatcctcgaccgcaccgtcgaggagaacggtctgaaggagaccgccttcaagctgggcaagggcctcatcaccttctgcccgctggcacagggcctgctgaccaaccgctatctcaacggcattccggccgacagccgcatggctcacgatccgcgattcctcaacgattccgccctgaccgagaaactgcacaagcaggtcgtggacctgaacaatctggccgccgaacgcggccagacgctggccgagatgagcctggcatggctgctgcacgatggtaaggtgacctccgtgctgaccggagcctccaagcctcagcagattctcgacaacatcggcgcgctgaagaacacccacttcagcgacgaggagctcaagctgatcgacgagatttcggctcggtgaccattttggcttccctcgctgaggggagccaagtaccacctttagcgcgtcatttcttcgtagatgcgcttgcaatcggggcaaaccgggtacttggacggatcgtgcttgggcacccagaccttgccgcacagggcgaccaccgggcgaccggtcgcgcgtgattcggcgatacggtccttagaaacataatgtgcgaatcgatccgcgtcgccgccatcgtcacgaaccggagactccttggtttccgggcgttccagcaccgacgtgccggcaccttggtccgggttgcgcagcggttcggcatcatcaacgaacatctcggcaaaagtcatggtgcacttctttcctcgtattcaacgattcgactgcactccatcatagattcccgtcgttacccgcgaaacccattggcgcgtaatccgcacacctccacacacccatgtcgcgcatcacgccaccccgccacatacaatgccacataacaatgccgcacacaacgccgcaccgacgccacatacggcaccgcacacactgcctcatacgccgacgcgacaacaatgcacgctcggcagcacgaagcacaccattcgcggtaggctataaggcatgactatcgcagtatgccccggctcgtatgaccccgttaccgccggacacttggatgtaatcgagcgctcggcgcggtttttcgacgaggtgcatgtggtggtggccgtcaacgccgcgaaaacaccgatgttttccgaagccaccagagtcgacgtgatccgccgtgcccttgacaaagccggttgcaagaacgtcactgtttcttccaccgacggcctgatcaccgactactgcaagaaggtcggcgccaccgttatcgtcaagggtctgcgccagaacggcgactatgaagccgagctcggcatggcgctggtcaatcgcaagctcgccggcatcgaaaccctgtttttgccggccgatccgattcttgaacacatctccagttccatcgtcaaggacgtggcccgccatggaggcgacgtgaccggcatggtgcccgattgtgtcgtgccgatgctggccgatgccctggccgaggaacgtcagcggaaggactgatgcactaatgactatgagcgatgaccaccccactggatacgtcgatctgaccaaaccgaatgcggacgccgcatcgtccactccggagccgtccgccccggaaccgaccgcgtctacgcaagccgcgccggcacccaccgaagaggccgatgttctcgccggatcgccgcccgccgcgcctacccctactccggcacagatgcaggccaaagcgcaggcccaagcagctcagcagacccgggcacaagctcagaccgctcaggccgccggcactcgcccctcgttcatgaacgaaatgcccgacctgcgagaaaccacggacgacgacccggccacggtcaagagccgcgaggaattcaccacggtgtatgacatcatcgaccagctcgaggcggcactgggcgaagcgaagtccagcatattcgcccccggcatggtgaaggttgaccgcgacgaattcaccgaccagctttccgagttgaagaaaatgctgccggtgcagttggagcgcgcctccgccctcatgcgcgaggccgagcgccgtctggaatcggcacagacccagtccaacgccatcgtcgcctccgcacaaagccgcgcagccgacatgatcaaggacgccaacgaacaggcacagttcctggccggccaagagaacgtcaccgagcttgcacggcagaaagcgcgcgcgattcttgaccaggcacagaccagagccgaccatctgacccaaggcgcggaccagtactgcactacggtgatgaaagggctgtcccagcagctcggcaaactcagtcgggatgtgcaggccggtcttaacgtgctggaagagcgccagcgtgcggccggcgaacagatgccgcacctgacgctgaacgactatcccgaagcccagtaacgccagcagcaccagcaacatcagtaacgcgaataacgccagtaacgaataactccagccaacatacgaaaggcaccaagaacataccatggcacgagttgaagattccccgtgggccattccggtagcgcagattgcttcgcgcgccggtcaatccaagccgattgacgccgatttcccggccccttccggcattggcgacagcatcgtcggcatcaaggatggtgagcccgtacatgtgagcgggcagttcgattcgattgtggacggcctgatcttcaccggccgcctggtcgcgccattcgtcagcgagtgcacgcgctgcctgaagccgattgacgaggactggccggttgatgtgacggtgttcttcccgtatgagtcgggtcaggacaaggccaacggcaagggcggcaagaacaagaaggacgacgagatcgacatcatcgccggcgaggacgagtcggaagacacgtatccgctgcgggagaacggcgcattcgcggacatcgaggcgatgatccgcgacacgctggtcgaatcgctgccgttgcagccactgtgccgaccggattgcaagggcctgtgctcgcagtgcggtgccgatctgaacgaggatcccgaccatcatcacgatgtgacggatatccgttttgccggattggcggggctcaaagcccagctcgaggccgagcagaacggcgagcaggccgagtgacgcgcgcctgaacggagtttgtacgagctatgcgttaagataacggacgcttaagctcaattgttcgaacgaaatagaggatactcaaatggcactgcctaagtacaagacctcgcgcgccaacacgcactcgcgtcgcgcgaactggaaggccaccgctgctgcgaccgtgaactgcccgaactgtggcgctccggccctgccgcacatggcttgcccgagctgcggtaactaccgcggccgcacctaccgctccgccatccagccggctcacaccaagtgagtcctgcgataacggcttgaatgaaggccctgccatcgacgggtggcggggtcttcgcataagtgcaccattacgtacaccatcgcatcgcaaacaacacaacacaacacacaacacatcaccatcgcgtgaaggaccatacaacaatcatgagcaatgaaaccccacagcagccgacgccggccaacgagcttcttgaagcgttgggcaccactctcagcccggatctgctcgtgcaggcactcacccaccgctccttctcgcatgagcaccccggcgtggccaattacgaacgcctcgaattcctgggagacgcggtgctcgaactggtctccactgaaacgctgttcaccattcacccggatatgaccgaggggcaactggccaagatgcgcgccaaggccgtctccgaagacgcgctgagcgccatcgccaaaaccaagctcaaggtgggcccctacattctgctgggtcacggggaaaccgagcagggcggcgcggagaagaactccattctgtgcgacatcgtggaatcgctcatcggcgcgaccttcctggaacacggcatcgacgaggcacgcaaggtgattcaccggcttattgacgacacgctcgccgaagtggccaccgagggcccggcacttgactggaagacctcgctgaccgtcaaggcgcacggcctcggcaaggatgagccggtctaccatatggaggtctccggcccggagtacgcgcagatcttcaccgcgcgcgtctcattgggcgagaacggcgacatcatcggcatcggtaagggctccagcaagcgtaaggcgcagctggcggccgccgaagcgggctggaagtcactggactcgctcaagacgcggactaagtaagcccgctgtcagatttgcgaatagactgataccaacatgagcgacgagtcgtgccggggccacaagtctcggagaagcgactggaatcagacacgcgggcacccggccccatcccaaggtcgggcaggttcgcggcaaaatctatgaggtgagaggaatcatggctttacccacgcctttgcaggcattcagcggcgtgccgaaaatcaacgcggcccccgataagcagaccatcgtcgatggcgagaagatgactggcgcccaagcgctggtgcgttcgctggaggatctcggcgtcgaggacgtcttcggcattcctggcggcgcgattctgcccgtctaccacgagatcaaagacaacacgaagttccgcttcgtgcttatgcgccacgagcaggccgccggccacgccgccgaaggctacgcactggccactggcaaggtgggcgtgtgcatcgtgacttccggcccgggtgccacgaacgtggtcacggccattgcggacgcgaatatggactccgtgcccatggtcgtgattaccggtcaggtgggcgtgcaggccatcggcactgacgccttccaggaggcggatatcgtgggcatcacctacccggtgtccaagcactccttcctcgtgacccgcgcgcaggacattcctcgcgtgctttccgaggcgtactacatcgccaacaccggccgccccggcccggtggtcgtggatctgaccaagaccgcacagaccggcgacatgtactattcatggccgcagcgcatgattctgcccggctacaaccccaccaccaaggcgcacggccgtgtgctgtccgacgcggcgaagctgttctctcagtcgtaccgcccggtgctgtatgtgggtggcggcgccgcccgctccaacgccggcgcacaggtcaaggctctggccgacctgaccggcgcccccgtggtcacgaccctgcccgcacgcggcatcattcccgactccgacccgaagaacctcggcatgctgggcatgcacggtacgattgccgcaaccggtgccgtgcagcgcgctgacctgcttgtggccatcggtgcacgtttcgacgaccgcgtgaccggcaagctcgacgccttcgcaccgaccgcccgcgtgattcatattgacatcgacccggctgaaatcggcaagaaccgtcagcccgacgtgccgatcgtgggcgatgcggctaccgtgctcgacgacttgattcccgaaatccagcgcacgcaggccattcagggcaagccgaatctggccccctggtggaaggcgatcgacggctggcgcgaggaatacccgatgacgtgggatgagccgaccgacggatcaatggccccgcagtgggtcatcaaaaagctctctgagatggccgatccgtccaccatctgggtgaccggtgtgggacagcaccagatgtgggcttcgcagttcatcgatttcgagaaccagcacgcttggatctcctccggaggcctcggcacgatgggctacggtctgccagccgccatcggcgcatccgtgggctcggcccgcgagttcgagggcaagaagccggtgtggctgatcgacggtgacggttccttccagatgacctctgaggagctggccgccgcgttcctggaccacgctccggtgaagatcgcgattctgaacaactccgtgtacggcatggtccgtcagtggcagacgctgttctacgagcaccactactcgcagaccaacctgctcgatggcgaggcgcacggtgccgatggtgcggcggcactggtcgacggcgatgcgccgctcgaagtgcctgatttcatcaagttggccgaggcatacggctgcgagggtatccgcgcgttcaccgaggaagaggcgattgccgccatcgaaaaggcgaaccagatcaacgaccgcccggtactgattgatttccgcgtgtggaaggatgcgatggtgtggccgatggtagccgccggcgcttccaacgacgaggtgacgtacaagcccggcatcaagccgctgaccggcggcaccccggctccgggaaccggtccggacgagcatgcgaccggcgtgttcgagcacgagaccgccgctgccgcggcgagcgagcactgaggagaggagaacactcatggctaactatcctgcatcccagcctggttcccagcgtcatacgctgtccgtgctggtggagaaccgcccaggcgtgctggcgcgtatcgccggcctgttcgcccgtcgtgcgttcaacatcaactcactgtccgtctcccccaccgagcgtccggacatctcacgcgtcacggtgaccgccgacgtggaggccgtgccactggagcagatcatcaagcagctcaacaagctgctgcacgtgctgaagatcgtggagctcgacccgaactccaccgtggaacgcgaactggtgctcatcaaggtggccgccgacgaatccaaccgttccgacgtgctggagatcgtgcgcctcttccgcgtgcgtgtggtggacgtgaatccggaatcgctgaccattgaggccaccggtgccgaaggtaagatcgatgcgctgctggggcttttggagcattacggtgtgattgagctggtgcgctccggtgccgtagccgtgacccgcggcccgcgcgccctgagcgaaaaggtcgtcggttccgaggttaccgggcgctgattcggcgactgcggggagacccagtccaagctcaaagggcggatgtgcatgatgcatatccgcctttttcatgtgtgcatacctcatcacccgtgctgcaagcaaaatgacagcaccttatgctagcattatgacagcaacaaggaggtgcatcatggcaacattgaccatccgaaaaatacccgatgagcagattcaacagctcaaagaagtggctgagaaaaacaaccgctccatggaatctcaggtgcgatccattcttgaagaatggctggccggcacggtggcgcatgaaatcacacgaaagaccaatttctacgacgagatccgcgaattcatgaagaacatggattttgagggactcgacaagggggaactcccactatccgagcgaaattccgccgattcccgaccgccagtatcttttgaataggaatcggccatgattattctggacaccaacgtcatcagcgaaatcatcaagaaacagccagacgaacacgttgccaattggctgaggaaccaagatacaagcaatctggcaaccaccgccatcaccgtcgccgagttgttggtcggaatatgtcgcatgcctgaaggcaaacgacgaaagtacacagatacgaccgtcaagctggcgcttatgacattagaggacaggacgttcgcatttgacacccaggcagctgcggattatgcccatatccttgtcgaacgcgaacgcaggggcacacctaccagtattcaagacgccatgattgcggcaattgcctgttcctgggatgcggccatagccacgcgcaatatcaaggacttcgaaggtaccgacgtggaattgattaatccgtgggagtttgcatagcggtaggccccggcaaactaccgaggccttgtgaacgttacggtttctcccgctactccaattgttcggagagttcgagccattcggcttcgagattatcgctttcagtattgacggcggtgagttgttcattgagcttgttgagaccctcgtagtcgctcgggtcatgggcggccatctgtgcctcaagttcggtcttccgctcttccagtttggcaagcttgcgctcgatggcattcacgcgcttggatgcctcgtggaaggccttgccggtgagcttcgaggtggagtcctcaccgttattggctccctctgacgagggagctgtccgcgaagtggactgagggagagatgcagcaacattgacggcggccgccttacccctaccagacttcgccgagctgctaccggtgcccgcgaagccaggcgtgtcagccggcaatcccttgccgttcttaatagcctcaaccatatcgaggtaatcctgcacaccaccgggcagatggcgtaccttgccgccaatcagcgcgaactgctgatcggtgacgcgctccagcaggtaccggtcgtgggatacgacgatcaacgtacccggccaagtatcgagcaaatcctccatgacggcgagcatatcagtgtccagatcgttgccgggctcgtccatgatgagcacgttcggctcgtcgagcaggatgagcagcaactgcatgcggcgcttctgtccgccggagaggtcgcggatcggcgtcatcaactgggcggattcaaagccgagacgctccatcaactgtcccggcgttacttccttgccatccacaatgtagctcggcttatagcgggaaagcacttccttgatcttgtactggcccagtttctccagctcatcaagacgctgcgagagtacggcgaacttcacggttttgccgatgttcacatggcccacggtcggagtgatcgaaccgtcaatcaacttcagcaatgtggacttgccggcaccgttcgcaccgacgatgccgaaacgatcgccggggccaatcagccaagtcacatcgtcaagaatctcgcggccggaaaccgtcaccttgcgtgcagccgaggtgacaccggctgcagcagtgccatcatccgaattcgttgcagcagtgtcaccgccgatggtttcaccacccgtgttcatgcgacgaacctcgcgatcgtcagcaagctgcggattgccgctctcagcctcggccttcttacgcgcttcctcagcggcctcgacggcttccggcacgccggcgtccaccaggcgcaggtcagtcatgtcggtgaccgccacctcaacggaaccgtgcagctgcggctcggcgtacatggcgttgaccacatccacgcgggaagcggacgcggagagcgccgccacatccgggtcgatatcggccataccctgcggtttttcgaaaatctgcgtcacatcgaccaaatcgaccacctgtttgccgaggcgtgaggtggccatttgcttcagttcaagtgtgttacgcatcggcggcacatcggcaatcaattcgcgtgcggccttgacgtggaacttctgcttggtggaacgggcacgggcaccgcgcgaaagccatgcgagctccttgcgggccagattgcggcgcttcgtttcacgcacatcagcctggcggtcgcgttcgacgcgctgcagcatatatgcggaatacccgccctcgaacggctcgatcacgccatcgtggacttcccacatcgattcgcagacctcgtccaagaaccagcgatcgtgggtcacgagcaacagagcgccctggcctttggaccagcggttcttcagatgctcggcaagccagtggatagtgaccacgtcgagatggttggtgggctcgtcaagcgcgagaatatcccaatccttgagcagaagtcgggccaaatcggcgcggcgacgctggccgccggacaaggagccgaccttggcatccagactcatgccgccgagcaatgcctcgacgatttcacgggaagtgttatcggacgcccattcgtagtcggcgcgcccctcaagtgcggcttcgcgaatggtggcgttgtcgtcgagcggatcgcgctggtcaagcatgccgaacgtgagtccgccgcgcttcgtcacgcggccggaatccggctcctgggtgccgcggaacaggtgcagcaacgtggatttgccgtcgccgttcttgccgacgatgccgatgcggtcgccctcgaaaacaccctgcgtcacatcagtgaagatggttttggtggcgaaagcgagcgaaacgtgttccagtccaatgtcataagtcggcatgactcaccaatgtagcgccaccacaggccataggactcccaagaatatgtcccaacaacctactataatagaaagatcggcaaaagaggagaatatcatggctaaaaaaatactcctaaaacccgttctcaaatgggttggaggtaaaagacaacttttagatcagattttgcctctaataccagaatcctcaacatatgtagagcccttcgtaggcggtggagctgttctcctggcaaaacaaccagagaatgctatcatcaacgattacaacagtgaattaataaatgtgtacgaatgcgtacgagatcacactgatgaattgcttgatctccttcatagccatgctgaaaaaaatagttcagattatttttattctataagagcacaagatcgcgaaccaaattttaaagaaagaagcccagtgcaacgcgccgcaagaattatctatttgaataaaacatgttttaacggcttatacagggtcaattctgctggacaattcaattctccatatggtcgctacaataacccagcaatagaaaatagaccagccatacgagcattagcaaaatatctgtccggaaatataaagatattatgtggcgattacgaattagccctgcaaaatcttgataaggattcgtttgtatatttagaccctccatatatgcccatatcatcctctgcatcctttaccgcttatacagagggaggattcgattacaacgagcaattgcgtctaaaaaataactgcgacaagcttgcgtcgcagggaatcaaattcctcgaatcaaattcggattgtgaagaaatcagagagctatataaagattacaaaatcatctctgtatcagcgaatcgttcgattaattctagagccgaccgacgaggagcaattaaggaagtactaatcgatggaagataaagccaataaagcttggaccgagctgatacaggaatatcaaatagataatgcaataaaacaacatggggaattcatcatacaggctaaggatattaagaaatatcgagagccacgacttatggcaaaatgggactcgagcgaaagtcttcctacgatattaaagaaatctgatatcaatatattaccagtctcccgttctgcttacgtgctttccaatttcaagctgtatcagccattcccggaaaatgatataaatacagtaaagtacgtccctcccttaccactggaatctattgatttcaacaatctgtccactgaatccaatgcgatcaatgcaatgctcatcactggtatacttgatgacttcttaggcacaaataatacagtggaaactttcaatggtcgaatgggaactaatgatttctcatttactgtcaatctcaccaacggcggcaagcggcaggtggatgtccagagcgctcaactggagatcgacggaggatttgaaaacga

SEQ ID NO: 3726 - DNA, 36978 bp, Unknown
  R150_10m  MAG No. k141_10279
ccgaggggagccagaaggaaatcagagcgcttcgttgtattcgcgaaccttgagggtgcggtgggaggatgccacgttttcgacgatcagacgcttcagggcgttgtcggcggcaatgtgctcgtccagccaggcgtcaccgagcttgaccagcgtggcgggatcggcgtaacccgggtacaggccgttgagcaaagcctcggccatgtgataggtcttgttggcccagacccagtccacagtctcgaagtacttggcggcgaacggctcggccagatcggggcgcggggtggcggagaagccacgggccacggcttcgagctgggagttggtcagctcgtcgttgtggagtgcctgatcccaagcccattccttggcttgcgtcgtggccatggaggcgcgggcgccgtaggcgaactcgcggttttccgtggtctccttcttggcgagctgcgcgtccacgtcgtcgttggtcatctcgttgacggaggtgagcgcttggacgatggtccacgtgaagttgttgtcgatttcgaggccttcaagacgcacggtgccgtccagcagaccgtgtgcgttggcggcgaatgcggcatcgccctcctcgccatagcccaggtaggcggtggcgagctggaactgggtgtccgagccggctccggcggcgttggccagggtccacagctcggcggccacgtggcgcagcacatcgtcgcggcgggctggcgccacgtagtggtgggcggtggtgctcatgcaggccagcgcgtaacggaaggtggtggattcggtttccgtggccagaagacgcagggtcatgtccacgaagcgttcggccgggaattcgccgtcacgggtcatatcccagaaggcgagccaggtcacggcgcgggccagggcatcgtcgaaacgatgcaggttggcttcggcgaatgcctgggattcggcgtcgaaacgaatcttagtgtaggtcaggtcatcgtcgttgaccagcacgaatgccgggcgcggcttgcctgccgcggcctcgacgatggtggtttcgccatccacgtcgagttcgaactgctcggtgcgcacgatcttgccggtttcggcgtcttcgttgtagaagccgacggccaggcgatgcggacgcagcaccgggtgttcggccggcgcgctctgggtgagcttcaattcggcgatggtgccgtccgcgtttacggtcaggccggtggcgatcgtgttgatgccggattcctccagccacttggcgctccaggccttgagatcgcggccggaggtcttctccagttcgctcagcaggtcggccagggtggcgttggagtaggcgtggcggttcaggtagttgtggataccttcgaagaactgcgtgcggcccacgtagaatgccagctgcttcagcacggaggcgcccttggcgtaggtgatgccgtcgaagttgacgtaggtgtcgttgaggtcgttgatcggggcgacgatcgggtgcgtggtgggcagctgatcctggcgcaacgcccagctcttctcaccggagcagaaggtggcccaggcgtcatgccattcggtggcttcggcagtggccagcgtggaggtgaattcggcgaaggactcgttgagccacaggtcgttccaccacctcatggtcacatagtcgccgaaccacatgtgggccagctcgtgcagcacggtcaccacgcggggctcggccagcgcgtcggtcaccttggactcgaacacgtaggagtcacggatggtgaccatgccgatgttctccatagcgcccgcgttgtattcgggaacgtagatctggtcgaacttggcgtacgggtagggcacgccccaggtcttggcgtagaacgcgaagcccttcttggtgatgtcgaacaggtagtcgacgtccttcgcgaaggccttggccaacgactgtcggcagtactgggccatcggcacggtgcgaccgtcttcgttcaggtattcggtgtgccattcggcgtacgggccggcgcagatggcggtcaggtaggagctcatcaccggggtcggctcgaagtcccacagacgggtgctttcgttcggcttgtcgccgagggtgccgtcgagggtttcgcgcggatcgtcctcgatggtggcaaccggcatgttggaggtgacgatccagctggcgggagcgagcaccttgaaatcgaaggtggccttcaggtcaggctggtcgaacacggcgtagacgcggcgcgcgtccggcacctcgaactgggagtacaggtagatgttgccatcggacgggtcgaccgagcggtgcaggccctcgccggtgttggagtaacggcacttggcttcgacggtgacctcgttcttctccttgaggtcggtcagttcgatgcggttgtcctggaaggccacggctgggtccagggacttgccgttgaggtcgatggatgtcacttcgtcggcaatcaggtcgaggaaggtcgacgaaccaggcttcgcgttgaagcagatgagcgacttggaaccgaagttcttcgcgccgaccgtcaggtcaaggtcgacgtgatagtgaatcggcgcttcgataacggccttacgttcttcggcttcaatacgagtgagattagaaccgggcatgacttcaattactccttacggtcgtccctggataatccggactacttggtttctacggtttcgacgtcctgggcgatgtcggccacgacgggcacgatcatcggcttgcggtgcagctggcgcgcaacccagctgccgagcgtgcggcgcatggtctgctgcagcttgtaggtgtcacgcgtgccctgcatcatctggtcgttgagctgttcgacgatctggtgacgcaccttgtcgaactcgctttcgtcctcggccacggcgttcaggtagatcttcgggccggtgacgacctcgtggttgtcggtgtcgaccaccacgaacgcggatacgaagccctcggtgccgagaatgcggcgcttttccagctcgtcatcggtcagctcgccgacggaatcgccatcgacgtacacgtaaccgcacggcacggagccgacgaccgcggccttgccgtgatacaggtcgaccacgtcgccgtcttcggccaagaccacgttctgcgggtccacgccggtcttgacggcgatcaggccgttggccaccaggtgacggttctcgccgtggatcggcatggcgcacttgggcttgacgatgttgtacatgtacagcagctcgccctcgttgcagtggccggacacatgcacggcggcgttgtcgcggttgacgaccttggcgccgagctgcacgagcttgttgatcaccttgtagacgccgtgctcattgcccggaatcagggagctggcgagaatcacggtgtcgaactcgttgatgtggatgtcgcggtggttgccgtcggcgatgcggccgagtgcggccatcggttcgccctgggaaccggtgcacatgaagacgagcttgtcgtcctgaatgtcgttggcctgcttcaggtccacgacggtgccttcggggatgtgcaggtagccgaggtcggcggcgatggacatgttgcgcaccatcgaacggccgacgaacacgaccttgcggccgtacttgtgggcggcgtccaccacctgctgcacacggtgcacgtgggaggagaagctggcgacgatgatcttgcgggtggcctgggcgaacgcttggtcaagggccgggccgatggaggtctcgggcttgacgaagccgggcacctcggcgttggtggagtccatcatcagcaggtccacgcccttttcgccgatcttgccgaattcgacgaggtcggtgatgcggtggtcgagcggcagctggtcgagcttgatatcgcccgtgtcgatcagggagccggccggggtcttgacgtagacggccagggcgtccgggatggagtgggtgacgttgacgaattcgaggtcgaaggggcccaccttgagcttctcacggccggcaacctcaaccttggtggggttctggtggtgttccttgcacttggcgtccacgaaggcgagggtcagcttggagccgatcagcgggatgtccggacgcagcttgagcaggtagggcacgccgccgatgtggtcctcgtggccgtgggtgagcaccagggcgtcgaccttgtcgagacggttcttgatgtagctgaaatcgggcaggatgagatccacgcccggctgctcctcctcggggaagagcacgccgcagtcgatgagcagcaggtgaccgttgtattcgatcacgttcatgttgcggccgatttcgcccaagccgccgagcggcgtgatgcgcatggagcccttgcggtacttcggcggggcgatcagcacggcatcctgctggggtgcggtggcctgccgggtggcgttgatcttacgggacggcgtacggctgttggatccgttggcgttgcggccgcgcgcggaaccgcgacggcgagaattcgtgttcttgcttgttttcttttgttcttgtgccataacctttttgggatttctgttgtggtgcctctgctctgtcatgcaggggcggcgggctggcaacccgtatgcagcgtttcgggcttacagcagtccggcagcgcgcatgccctcttcagccttgtcaagctgagtggcgtcgggaccgatgttcggcagacgcatggtggtggaggggataacgcccttgaccttgagcgcagccttggccatgacggcctgatagccgtcgccattcaacgcgtggacaaggggggcgagctggttggcgaggcgacgggcggtggtgatatcgccgcgatcgaatgcctggacaagctgctgcatggggttggaggcgacgtgggcaatcaccgaaatgatgccgacggcgccgatggagaggaacggcaggaacaggccgtcatcgccggaataccaggcgaggccggtgcgctgctgcttctccactgcggctgcaagatcgccggtggcgtccttgacagccttgacgtgttcaagtccggccagtcggtcgtaggtttcgaccttgaccttcaagccggtacggccgggaacatcgtagacgatgatcggcttttcggcggattcgtcgacggccttgtagtggccgacgataccgtcctgcgaggggcgggaatagtaaggcatgacgacgagcaccgcgtcggcgcccgcttcctgagtctgttcgaccatacgcacggtgtgtgcggtgtcgttggagccggcgccggaaatcaccggaacgtcgacgacctccttgacggccctgaccagctcgaccttctcatccatatgggtgacgggcgattcaccggtggtgccattgaccaccagaccatccgcgccatcggcgacgaggtatttggcgagcttctgcgcggcggcgaaatcgacgctgccgtcggatttcatcggggtgaccatagccggcagaatgcggccgaaaggtgctggctcaagaaggtgcatgtcatgctcgctcatagtgttcaccgtacttcccattgtggactcttatactacgtaccttgattgttgctgaatgcgtggcattatggccggagccggtggcaatgccgtgatgcgcgtcccggcgcgcttccctgcctgaaatgcgggggcgactactggtcgactgcgggtcgattacaggtcgaggaagtggtcgaggccgatggtcaggccagccggagcgtcgccggcgagcttgcgcacggcaagcaggacgccgggcatgaagctggtgcggtcgaagctgtcggcccgaatggtcagctgctcgccggcgttgccgaagagcacttcctcgtgggcgttgaggccgcgcagacgcacggcgtgcacgtggatgccgtcgaccacctggccgcgtgagccgccatcggtttcggtggcgtccggcacgggggcgagtcctgcggccttgcgcgcttcggcgatgccgtgggcggtgtgaatggcggtgccggagggggcgtccaccttggtggggtggtgcagttcgatgacttcggcggattcgaagtatttcgcggccttggttgcaaagtagtcggccagtacggcggagatcgcgaaattaggtgcgatgaagaccttctgggtttcgggcttcgggccgttggcgatggcggatttgacctgggcgagtttctcgtcggtccaaccggtggtgccgaccaccacgtccacgccttggccgatcagggtcagcacgttgttcaggctgacggacggcacggtgaattcgacgaccacatcggtgttgtcggtggtgacctgggtcaggtcgtcgccggcatccaatgcgagcgccagctgcgtatcctcggcgttgttcaccgcttcgaccacgtgcgagcccatgcggccctttgctccgaccaccgaaaccttgatcatgtcttcttccctgtctacccgtacctgcccggcaatgtacccggaacgttttccaatcggcaatcagcctatcaccgccaagccctcacgccaatatcccgtccacagaatcgagctccctctgacaagccgaaccgtgaagtcgagctccctctgatgagccgaaccgtgaagaaaacgccggaggcgtttttaggtgagggcgaacgacagtgagcaataattcagttggctgaaagccatcatttaattgcgttcgagctggccgcgaagcggactgagggagagacccccggcgaagccgccaaccatccatcaggcgtagcccgattccgtttcacccacgccgcttggccaaggcccatccggccaacgccaatggcacggacgccagcgtgaagatgaatggcagcatcatgcccacatgagggttggaggcgtcaagcacaatgccggccacggacgagccgatcgatgtgccgaccgtgcctgcggtggttacccagctcagtccttcggtcagggattccgccggcaccagatccttgacgatgaggttgccggtggcgaacgtcggcgagacggtcaggccggcgaggatttcgaagacgcccagcaggatgagattgtccattgacagccggaagaacacgtagccgacggtcagcagcgacaggaacatcaccatatgcgcccaatgggagcctttgagtcggcaagagccgaacaccagcgcgccgatgcacgagccgaccgcgaacatcgccaattgcagaccgaggaagggctcaagtcccatggatttcatggtggcggtaatggacacgtcgaaggacgtgaagctcatattgaacacgatgaacacagcgagcaacggcagtacgccggcatagagcaatacgctcttgggcttggcgccgctgcgtttgagctggcgcagggtcagctggtcggcatcttcgcttgcagcagggctgccgtcatcgtgcgcggccacggtgacctgttccacgataaccggtggctgggtggatttcagcgagaagaatatggtgccgccgataccgcatgccacggtgggcacgaacagttgggataccggatgcacggaggtggccagccaagccgccagaatcggccccagaataaagacgatctcgtcaatggcggcttccatggcgtaggccgtgttgagcagctgttcaccatcttccacaccgcgcaacgcataggaccagcgtgttcggaccaatgcgccgaatgagaactgcgtcagacccatgatgatggccaggacgaacagcagcggaatcggcacgcgcaccaacgccgcgaaggcgaaggcgagcatggccacgatctgcacggcgagcgcaagccggcccacgcgggcttggccgaaacggtcgaaggcgcgggcgtagaacggggtgacgcagctcatggccagcacataggcggcgctcatggtgccggcgatggtccaattgtcgtagagatggttgagcgccagaacgatgccgagactcatcatggagatcggcaatcgtgccaccgcgccggacaggcagaacgccttggctccgggcagcatgaacaggcgctggtagggcgagtgggcagcggacgacttcgaaaccgcgcgagtcgtggacacaataactccttactggtgcgttgtccggcacgtgcgcccgcccacacgtgccatccgagggtagcggttcccgagcaacgtcacgcggtgcgtttcaaccgcggaccggtacgtggccagtcgtcttcatcgtcggagatgccttgcgatgcataaggtctctccgccggtgaaggccgtccgatgctgtacaggtcatgagcctttgggctcagtcgttgtcagattgttcgggaatgccggagctcaactcggtaaggatttcctgtttggttttcgcgcgggcgtgaagctcgcgcaagccctcgtcgggctcactgacatagtagagagtggcgtcgatactgtccaattccacaccttcgaccgctgccagcagcagtcggtacatgtcgagctgggcaagtttgcgggtgatgtcgtctggcttggtgggccgacgaccggttttccagtcgaccacggtaaagcgtgcggtggtgctggacgggtcaagtccaccgatgaataccgcatcgagtttgccattgaccaggcccacgcccggcacgtccacgacgatggcacgctccgtccacgccgggatgcgcttggcccacgatgattcggccagtctgcgctgccacgccaccagcttggactcggtggcattgtcgctgcttatggaagtggcggatacggcggatacggattgttgagccgtgggctgtgggacagcgggctgccgtgtggatggcttgcggcattgccgctcccgttcggccaaatcggccaacatggcttcccgggaaacgaatcccgcatcctgacctgtatgcggcatgcttggttcggcttcatatgccagtaccgcttcatccggcttaccggcattgatgaattgctcggcccacgcatggaactgcgtgccggcctcggccgccggagacgatattcgtggaatcgggcggataatgctacgccagtagaggcgctcctcccgttcgttcatgccacctacgcgggcttgcaggcttgtcacgttctggcgtcctgcggccagaacgcgttgcgccttggctttgactgcctcatcaagcgactggccgctggcggcatcggccatcaaatcggcgtcgtccaccagcaattgtgcccgttgcaggagtgggccggcgtcttggtgctgctcaagtgacgaggaatctgcggcgatgacatcgatgccgcgtgacagctgttcatgcaccgcgtcgctgagggtagccggccacggcaattcggcggcggcattcgtctgcgtaatcggcgtttgccacgcctcccccaccacggcgtcaccgtatgccgcggcatgctctccgataaagaacccttcgggagtggcaatcgcttcgccttgcgccgagatcagcatgggcttcccggcattggcggcttgcagccgttccacacagtcctgagccgatatcgcatgctcatgggtttggagcgcgtcatgcacttcaagccagaaattggatggctgagcggcgtgagagcctttgggcaccactgatgggtcccgcccggattcgcccgtataggcgcaataggtcatcagggcatcttcccgtgcacgggtaagcgccacatacatcaatcgacgttcgtcggcatgcagccggcgcccatattcctccgcctgcgtcaaataccagccggatgcatccacttcttccacgccatcgccgaattcgcgcatggagccgaacacttcatcatcgataagctccacatcatccaaagccgccaacgatgcgatggggtcggcttccacatcggcatcatgggggaatcgcggcaaaatgccggcatcggcgcgcataggcacgggcacggcggtggggttggtgagccaggagtcggcggtctcgtgatattcgggtgcggtccagtgaccttgctcggtgcctcccgtatggtgttcgtccagcacgatcttgagatggtcgccctgattgctggggaatccgccggcggtaagccccactaccgcaacggcatcccattccaaccctttggactggtgtacggtcatcagttccacatccaccggagcgtcggggagactggcggcttcatcctccaccgaagccagatgatccacccatgtgatgaacccatgcaacgagggagtttgctcagcggcaatctcttgcgtgtacgtatccaccaaatccacaatcgcatccataggcatatgcgccaaagcgggattggcgcggtgctgcggattatgcagcacaccggccaatacggtgtcgatgtcaagatccaacgcttctatgccggcgcgaatcacgtcgcccagtggccgcccgacggcatcatgcacctgacggagcatcaccgcggcccgggttatggcgttgcgcccgtgtgcgctcaaccgttcaagcagttttaccaggtcgccgcgtagcaatacgtctggcaggaataccgcattggccacctgatcgcggtactcacgcaccacagccgcccattcattcgctggtgtatccggttgggcaaggccggcctgcaccaatgcttggaagcgttgttccatgttctgttcttcagcaaaacgggacaacatggtcaaatccgctgcggacatggtgaatcgtggcgtggccagcaaacgcatcagtgatcccgtatcggtgtggtcggcggccacgtgcagcaacgccatcagatcgcggatttccggacgttccagcagcgcggaatagccgaccacgaatgtggtcaatccggcctgttccaatgccgcctgatatccgggcatatgtgatttggaccgaaacagcacggcgaccggcgctttctgttcgcccggcatctgttcctgttgttcggctgcggaacggtgccgtgcgatggccgtcttgcagaaacgcactacggcgtcgatctcctgcccggccgtggcgaagcccagtactcccaatgttccttcgggggcatcaggcatggggtcgagcgatgagacatcgacctcacgcatcaatgagctggagggacgcgacggattggagcgcaacggcagcgtgagattattggcggcttcgagcactatacggctgttgcgcctggtgacggacaacgggaatggcttgtatccggcaggcaggtggaaatcttgctggaacatacggaatgcaccagggctggcaccacgccatgcgtaaatcgactggaacggatcacccaccgcgttgacggcggacctccgtgacgcatccacatggaacagtgctgccagcagagcggcctgcgtggtggaggtgtcctgatattcgtcgagcagcacatggctgtacctgcggcgcgtgcgctctccgatggaggggaagcgctcgataagctgatacgcggcaatggtgaagtcggagaattcggccatattgcgttcccgcttggcttgggcataggcctccaccagctggagcagaatatcgcgtttgcgtgtggtctccagcagcgcaccgcaatgataggcgcagcgggcgtgcaaatgttcggcacggtcatcgagcttggcttgccagctggcgtcggtatctttcttcagtcgtttgatcttggggattttcggctcgtcctcgggcatgggttcgtctgcgacggcttgctgcaatcgattgatgaatgccgaatcccattgccgtacttgattgatcgcatcatcgaagctggtgcagccggcaccgatcatggcactgccaatggcatccgacaacgccagaacacggttcgccaaactggagaaggcgccaaaatcctcactgaacgccagatccatgtgactgtcgatgacttcggtggccagttgaagcgctccggctgcgctcaatggttgcgtgttctgatcgaatccgacaagcagtccatattggcgcacgatggtctggaagaaggcgtcatacgtgaaaatggccggcttgaggaatgcccgatcagacaccgtggcggtcgtagagcccgccatatcaccggccactgcggcggagacgcgttccagcagttcgcctgcggccttgcgtgtgaaggtcaggccaaggatgcgttcaggcgccacacctcgattgataagcgcgatgatgcgttgggtcatcgtaaaggttttgccggaaccggcaccggcaaccaccagtacgtcagcatcgactggcgcatcgatgatggcggcctgttccgcactgggagtgaacgtgctcatgcttgcctcgtttcgaaaatcgtgtcgatctggcccgcacaggcagggcagacgttcttcatacggcagaatccgatatgggtgtcttgcggatgggcctcgatggtggccgacctgctggccgccgcggcatagaatacgcgggcgatcatggtcagcgaccataacgtctgcgtaccggcgagcgcggcgaattgcgcccacgcttcggcactcacaccttcgggaggagtagccggatctatggcgggtatgtcgaagaaacggttggggtctttataccagtatcgtggcgtgaacggttcggcattcaacgaaccatcagtgaacagcggcggctggaaggcaccttccggggcgtagcttctggctggtgccgcattctgcccgacatggaacagcgcgctttggctgatatgcggcattgcggcaagtgccttggcaccgcgcggcccgtcttcggggaacacgaggccaagctgatagcacacgagctgcagatcattgaaaatctgtttgaccgtgggcgttctgcctgttttgtagtcaatgaggcgaatgcattcgccgccgtctgcgagtacgcgggtttccatacggtcgatgcgcccggacagtctcacggtcagatgctcgtccatgccttccggccaccctccgaccagtgctcccatcagacggaccagcatgttccgatcgatcgggtgcatgccgggcacggcattgtatgcgtcgagtatgtcacgcacatcgaatcgtgcggcaaactcccgttcgcattcggcaccggccaatgcgccaatgctgaagttgctggagttcttgccaagatacgtttccggatcggcgtcgctgcgcacaaagtaatcggcgatgttgcgcagggcatctgccgcggactcgtccttacgggtggcctcatagcggttccgggtgtcggctatggcattcggatcggggcgtttgctctgatagatggcattaagccgtgccgtgacagcctcgatgcggcgttccgtgccggccgtggagtccaagcccagtatggccaacgtctgggcattgtgggaaagatggtccagcccttcctcgctgccttgctgtgcaaccgcatggatgagggttccgaagctggtggccacggagctggggcgaggaccggcgaaccggttctccagcatccagcacaccggacatgcccataggctgtcgaccgccgatggagacagggtgaccatgggtgcggcctgcgcatccgtcttgcctttccccgtttggataccgccagatgacgcaccgccagatgacgcgctatccgattgggccggcgattccacgaacgcccagctctgcggatttgcggcgcgcacaccatgctccgacaggagtgtcaacgcaaccgcggcgtcctttgcggcagcctgctgcggttgagcagtggccagaaccgcgcgggcggcgctgaccaacccacgtgggtcggcgtccaatccggccagatcatattcggcggatcctgtatgcgcccccactgtggtgaaaggcgcctgttgccggttgcgcggatagtattccggcagatacccgaaaagaaagtccgaggggctcatgctgtcgttccataccgcgctgatcatgattcgccgtgcacgggtcagcgcgaccaggaaacccttcttctcgcccgacagcacagccgcgaactgcggatcatgcccggttttgtcactttcttcaagcgctcccctcagcacgagctcggcaaggtcttcaccaccgaacatggtgttgcgcccggcgaggttcggccacacgtcttgctggaccaccggtatccacgcatatccccagtggcgtccggccgcgcctgccggcgtggtcaatgtcacagcgtcttccaccggccctatgtgggccaaggaatcggcctgcacttccatgccccgaacctgtgccatgaatgacgtgatgtctcggctggcggtggaatcatcggcgaactggaacaggcgcattgccgcgtccagccggtcattggccgtgcgcccctctgccgtgttgaataatgccgcacgctgccagaccggtgccagaccggtggcgttccaggcaacagacagtgcataacgcggctgtacgcgctggcttgccggcagccgctccaagccggaagcaacgctgcccaccagatgccacaggttcgcaaaagcgcgggcctgagggtcgttgccaagcaccgcatggatggatgcgagcgcagcctgcgccggcgcggcggcatcatcaacggcaagcatcacgtacagcgcgtcaacgccaaaggccaagtcatcgtcggacggttcaccgagtatttcgacagacactggcgacggaaccactgatgaggatgtttcacgacctgtttcacgccgtgtttcatggtatgtttcacgcaatgtttcccatgccgtcgtcagagaggtcagcatggcatcatccgtggcgagatgcgccagcgactccaacgaccccatggccgattcgatcggcgcaagccttgcgggacgcccttgaccgggtctgcccccggcactcaccaacgggccgttcatcaacgtgaccactctagtccttatatatgccgcgcaggaagccaacgtcatctggcattccgccattccctcggcacgcaatcgggcaagctccacaagcgcgaacaatccctgcacgaaagtctcgtccttcaaaggacgggtgaccgacgaataccgcaccggcacgccatctcggcgcagtcgttcgccgaacagccgcacggcggcattgtcgtgggtgatgaccgccatgtcgttccaccgaatatgccggtcaagatgcgtccgcttgatgcgccagaccacatcatccagctcctcacgtgaggatcggtacaggccggcggtcaccgtgccgtccgactgataattcgctgcatcgactccgcccagcatggcggtcagcttgccgggacgctcggccggaggcagcggctcgtcttccggcgagggaatcgacagcgaaatacgagacgcgatcacatcagccatcgtcatgtgcgactgatcagcgccggtactgccgccaaccagctgttcttccttggctttcagccacccttccacggcacggcgcatcagatattccggatacgatccacggaaggtctgcaccgattcatccgggttgccgaccagcaccaacttgacgccggcattccccaactcctccaagaagcgcatgccggccagcgtggtgtcttgaacatcatccacaaccagcagccggggcaagcccaacgcctccatacgcataggccggtcggaatcatccgcgtgatcggcggcgaatgcctcatgcaccacacgagctcctgccaccagcaaatacgaggcatccaaacggtattgccccggatatgccgcgctttgggctgcaatatattcacggcgcaatgcgaaagccaaacgccattgcaccgacaatcgcgcgtcctccgtcacggcgtccaagagacgtggctcttcgtgaacgcctacaccgagctcgtccaatcgggccagcatatcgcgcaactggccgataaacgcatctgaaataccgcgagtgaacctatccgcgctggtcgagccgcctgccgacgtcggagacagcgaatccgacccttgttgcgagaggcttgattgtgcggaagcggccgagccgggcatctcgccggcaccggcatcgcgtatgagtttcgcccagtcatcctgggcaaagtagacgcgtagcaaatcacaggtgccgcaatcatctcccgctacggcatggcgcagatgcacggccatgacttgacgcagcaaagcatcctgttccgcaccgttcaacaatcgaggcgacggcaatccagttccctcgcgcgaagctgatatggcccggaatgccacggcacccagcgtggtgaccggcctggcctgcacggaaaacccgagctcacgaatcacccgattgcccaatgcgtcggcggccacacggccggatacggccatcaccgcctgcgtgccaccgtagcggcgcagccccgccatcaacaccgataaggcgaattcggttttgccgcttccaggcgtgccgacaatcagcctcgccgctccatcacggtcgatgccgtccagcactgttccaggttcaagtctcgtcatcatggctccagcctaaacccgaccgtcacagagggaaaaattttaccgaacccgacgaagaatcgtacccttgacggtatcctgtagaacgaatgcagggagagcgcattttccaaggagggagggaacagatggccaatattccgatgaggccgccgaagctgcccggatatgatttcgtccagatgttgggaagcggtgccaccgccacggtgtacctatataaccagcgtatgcccgcacgcccggtggcggtaaaggtcagcgccaaaacccttgacccacgggccgctgccctgttcaaccgcgaggccaacttcatggccaagctgtcatcccacccgtacattctgccggtatatggtgccggcgtcacctccgatggccatggctacattgtcatcgaatatgcgccgggcggcacctacaacagcatcatgaaggcccggtccatgacctgcgagcaggtactcgacctcggcatcaagctgtcaagcgcgctgttcaccgcgcatcgcagcaatatcatccatcacgacatcaagcccagcaacattctcatcacctcgcagggtttgcctgttctgggtgatttcggtatctccaccgatgtgtatgaccgtaccgaaaccggattctcgccgccgtgggcaccgcctgaagtgcttcagcatctgaccaatggttcggaagccgccgacatctattcactggcggccaccctgtacgccatgttcgtcggctgctcgccattccagcacgaatatcatccacgttcgcaatcggaactgatttcgctgatcgtcaatcagccattgcctcgcctcaaccgccccgacgtaccggccgatgtggaagcggtgctgcgccgggccctgaacaaggaccccgaccagcggtactactccgcgttggagttcgcacgcgccatgcagcgtgtgcaattcgcatatttcgggcatgccactcccgttaccgtggaagggatgccggcctaccccaaagacatcgagcgtcggcgccgggccacggaccagcgagatcagaccacccgttcgtcacggcgatgggtcaaaccggtgggtattaccgtcggtatacttgcggcgatcaccgcagcggcactgatattcgccttcgtggtcgttccccgcatggacagcgccaccggatcagataccaaacaggtggcgacgcccggcaccaaggatgatgacaacaaccgcaataatcaggatgacgtgattaccgataccgcgaacgcccagattccttccccggagaatctgaacggcacctatgcggcggatgggtcatccgtgacgttcacctggacgaatccagacccgcaaagcggtgatacctatgcgtgggccatagtgcagggcagcaataccgaccagagcgcgcaaaccgtcacaacgtcagatcccacggtgaccgtcaacgcgcaggaaggctcgcagacctgcattcaggtgtccattgtgcgcaagaaccgccagatgtccgtcagccccgccatcgcctgtgcggccaagccgcaagagtgatccgctcgccactgccgggcataccaccttggcattgcgtatcgcatcaggcatgcgaccggcagtggcgaattcaccaaatggacaacaggaacggcaggtattggaaccgtaaagcgttgtcattacactagcaaccagagaaaccagggttcagggagttcagatggccacatcgtcccagtcatacgatcgtcgccgacgcatcagcgcggctttgcgccgccttatgccctccggagggcatacgtggacggttcccgtaatcacgctcctgctgcttctgggacttgttgccggcgcggtgatcatgagcaccgtcacgcgccgccatgtgcaactggacgatggcaccgtgtgggtcacttcgctgaagaaccagaaggccgcacgattcaacgtaaagaacaaggaggccgacgccggcgtctcctcctccgccccacgattcgacatcgcgcagcataatggcgacaccatcctgaccgaaacgaccaaagcctccaccatcaaggcatccacggtcagcaccggtgtcaagaccgacatcaaagccaacaccaccactgtggtcggcggggataccgtagccctgatcaacgagaagaccggcaatgtgtggaccggcttgtcggaaaaccttgattccgtggcccccaccacttccgatccgaaaatgaagctgggcgagggcgggcgcatcgtagtaacccacgatggcaaggtctacggataccgtccatccgacggtatggtgctgcgtcttgacaatcccagcagcgccaaggccaaaaccctcgaatcgctgaccgacggcaagcagcagaccgttgaaagctttaccgtcatcgggagcacgccggtaatcgcaaccggcaaaaccgtcatattcaagggcggccgcgtcgatgtcgacacgaccggcaccctcacccttcaggagcctcccaccgatgacgtacagtccgattgggtggccgcggcatcaccgagaggccttacgcttatcccgttgaggtccaatgccaaggcgaatttcatagccaacgggggcaaggcgaatccggcacgaccggtatcgtccaagggctgcgtgtactcggcttggagccagaaggccagcaactacattcgcgcctgctcccccgcggataccagcgtcaagccgcaaaccctcgaatccgtcaatactacttccgaattggtgttccgcaccaaccatcgccttgtggtgctcaacgacacggttaacggcaatgtgtggaaccctgaggattccaccaaagtcatcaaaatacagtggaacaaaatacaggccgagcagaccgagaaagaacagcagaacaacgactcggccaacaaccaccacgacttctccaagacctgttccgcacaatccggccaaatcaaagccgaggatgatgaaatcggcgcacgagccggttcggaacagattctcgacgtgctgcgcaatgacgagcagaccgattgttccgtgctgaaaatcaccaaggttggcgcaccaaacaacaaagacgtcaccatttcgccgatttacgacggccggtatctgcaactcgatgcctccgccacatccgcaggcaccgttacctttacttacgatatttccgatggccgcggccagacctcttccgccacggtgaccgtaaccctgaatgatggaggcaaccacgctcccgtacagttcgacactcctcccgagatcgatgtggagcagggagccagttataccgccaatgcgctgagcagcttcaacgatccggatggagacccgctcactctggtctccgctgtggcccagaacaccgaccaggtgcaggtgtccacccgagccgacggccagcttacgttcaacaccggtgcgctggcgtcgggacgcgtgggcgtcgaggtcaccgtctccgacggcacggcgaccggcaccggcatggtgtatttctcggtcaagcccgcgaacaccttggccgcggtcatcgacccggtagcgaaaaccaccgttcccaacacggataccgtcgtcaagctgtcctcttacgtgcatggcacttccttgcagccggcacagctgactcaggtggatacgcccaacggcgcttcgacgaccaccaatgcggcggatatgtcgttgacgttcaaggccaccaatcccggcacctattatgtgccctacaccattactcaaggctcgattccggccaccggattggctcgcgtcgaggtacagcccgccaccggcgaggccgccaaaccggttgccgccaacgatgtcgccctgcttggcgcggataataccgccattgtggagccgctcaccaatgacgtcgatccgatgggcggcgtgctgtccgtcaccacggtgagcgcaccggccgactccggcatcaaggttggtctcgtcagccataagcgcgtgtatatcactgcgcgtcaggtgcccacgaaacccgtcgcccttacctacaccgtggccaacgcctccggaaccgccaagggcaccatcgtgttgcagccaccggctctgaccacctcgaattcagtgcccaaggccagcaatatcaatgcccaggtgcgcaccggcggcatcgtgtccgtggatgtgcttgaccatgtggcctactcggatggcaccacggtcaagctcaagaacaacctgcaatacgacaaggagacgttcaagggtctggccttcgtctctggagacacggtccgctaccaagcatccagcgagaccggcaacttccccatcacctatacggttgaagacaatctgggtaatgtggcttccgccaatatcaccattaccgtgcataagagcgacgcagcgagcaaggccgcgccaaccccgcatgacgccgaagcgcaggttgccgccggacagaaggtccgcatccccatcacactgaccggcatagacacggatggcgacgacgatcagctgttgggtctgggcaacaaggcacccacgctgggccgcatatccgaagtcggttccgactacttggtctatgaagcgtatccggattcgtccggcaccgacaccttctcctatgccgtggaggattggaccggtcagcgcgcacaggcgcagatccgcgtgggcgtattccaaggatcgtccgactccggcgtatacgccagggatgacgaaatcacgttgaggcccaatacggccgcaaccgtgccggtcgcgcagaacgacatctccggcgacaacaccaatctgaccgtcgacaagcatgtcgaggtccaaggtctcgacggggtgagcgtgaaagacaacatgatctccttcaccacgcccggcagcgccaccaccgcctatatcgcctacacggtcaaagacaaggccggcttgtccgatacggccaccctcacggtaaacgtggatccgaatgccgccatcgagccgcctaccgcctacgactatcgtgtgccgtccgccgccaccatcgataagaagtccgtggatgtggatgtttcccagtggatcgccaatccttccggcacagccaatgagctcaaggtcggcgttcatccctccgccagcgctcacgctcacgtcaagggcggtgagcattcgaccaccatcaccgtcgacctgacgtcacaggcgcgagccgtgccttacacggtgaccaatacgaaatacaacatcacctccaccgcgttcatccaggtaccggcctatggtgtctttccgcccacgttgcgtcccaaggcaccggaattgaaggtcaattcgcgtgagaccattgaaatcaacatcaatgactatgttcgcgtcggtgccggcaaggaaccgtatatcgaaagcgctgattccgtcagcaccaccaaggcttccaactccgatttctacgtgaacgacaagaccctgaagttcactgcggcaaaagactacgcaggccccgcctccattacctttaccgctgtggatggcaagcagggatcggataagaccaagattatcaattccgcagtgatcactctccagatcacggtgataggccgcgatgtgccgccgcccacgttctcgtcctccactattgatgtcgaggcgggcgcgaaccccaagaccgttgatctgacggcgctcacccatgcaccgtccggcgtgtatgacgacgagaagcaatacacgtattccggcggaagctcatcgtccgggcgaatcaccgctaacctgtcccgttccggcagcttgcaggtttccgccaccaaggatgccgctcctggcaccaccgcgtccattcccgtgcaaatcgcatacggcgcgggcaccgtgaatgccggtgtgaccgtgcgcgtagtgtcttccacccgtccgctggcacgcgtcggcgacaagacgctgaagatcaaggccggtgccagcgatgccgtgaacgtgcttaccggcgcgtacaatccgttccccgattcctcgctgaccgtcatcagctgcaaggcggatgacgccgccaaactcactatcgccggatgcgatgcctccggaaacgtcaccatcgccgtcgcatccgatccgggtgcttccacgaacaccgtgctcgtcaccgtgcaagacggcagcaagtccaaggatcgtgaagtcaccgcatcgattaccgtgtccgtgatcgacaagcccgagccgccactgctctcccccgtagccggggaaccgcaggacagcgcggtcagcctcacatggacgcccggtgccgccaatggcagcccgatcaccaactacaaggtcagttggaccggcgccgccaccggagagaaggattgcggtgccgtcacctcatgccaggtcacgggtctgaagaacggcaaaacctattccttcaccgtcgccgcgcgaaatgacgtcggttggtccaaaccgtccaccgccgtcgaagccacaccggacaaggtgccgtccgctcccaccgatgttacggtcacaggtggcaataaaaccgccaaagtgacgtggaaagcgccgagcggtgatttcagcgccgtcgacaactattcagtgaccgtcaccggtgcaggtgctccgcagaccaaggaaaccggcaatacggccaccgagctgtcgtttacgttcaacaacaacgacatttccgatggcaccgccattacggcgaccgtcaaagcccataacaaaatcaattggagtgccgagtccgcctcatcacagccaaaggacatctggggagacccggatgcgccgaccattgcgctgtcgaacgacgacaccacaggaacggcgaaagtcactctcggcaacaaccgcaatgccggctgccggcgaatttccttgggaggagacatcaaggacaccatcgattgcagtgacagtggcgctacgttcgatatcaatgagaacgatttgaacacccgggaaatcaccgtaacggccaccgtggtgccgcagcgcgatgcttccgccggcacaggcaagagcaggtttgtcccgcagtacaatgtccagccgcccactgacgtctacaccaccggatccggcagtacatgcaccgtgcattggaccaagcaggggcatgcgcagtcctacaacgtgactgccgatggcatcgattccggtacagctactaaccggaactcactcgacttccgaatgagtccttgggccaaatgcaataccgcatcggtgcaacaggtgttcaacggcgctaccagcgatgccgccaccggaggcccgtacaatggcgctccttacacctatgagaagaaggctgtaatcaacaaaccgcaggagctgcgctggtcagacaacgctcacgtcattaacgtcaccggcggttcggttgaggtctatggcaagcaggccaccgtacaaatcatcatcaatggccaaccgttcacgtggaaccccggccagccattggacgtcaccgacttggccgtggccgccgatggcaactacacgtggagcgtcaaagtcaccggcgggccgggatactccggtctcgacaatacggcggacggcagcagcgtcgcgggcacacgcccctctgattcctcggaggggaccgagtcgctcaaatccggtaccgatgtcaccactttggccaagaacccttggattcttggtttcggtaataccccaatatcgtcaaccaccattcacaagcagtaggagaacatccatgagcgagaacatcgacgacgcgacgcagctgtctgacagcacgcagctatccgacgccacgcacttgtccgatgccacacatctggcatcggaaccgcacactggcaccaccccgaacaccgagacggcacagcaacccgttgcgttgcctaacctgccgcagcggccgtcacaagcgtcgtcagaaaagccgtctcctactactgatgccgcctccattcctgcgggcgatgacagcaccgtgctcaagccgcgcaaggacgcgacgccagccatcccgcagcaggtcggcatgccggcaaagaccagcacgcccaaagtcgcgcttccgcacttcggacgtaaatccggcaagcaggccgctactgcgaatgctgcccccgccacccagacctcccgtcaatggacgaccacaaccgccggcaagaccgcagcatccaacgccgaaaccgtggctggtcgcgggccggtagccaatcagcaggccgccgcgcaatcccagccgcaatcccagccgcagcgtcagtcgagcaaagccgcgcaagcagcagcatcggcactgcccgccagcatcaattccggactactgccccagcccacggctcaggtccgggatttccagcagtccttcaatgcgctggtcgagaatgtctccaaggtggttatcggcaagaccattcccatcaagcaatgcgtcaccgcactgatggtcggtggccatattctgcttgaagacaaccccggcaccggtaagacccagttggcccgaggcttggccaactccatttccaccggtttcaagcgtattcagttcacgcctgatctgctgccttcggatgtggtgggtgtgactttctacgatcagaagcgcggagaattcgagttccgcgagggcccgattttcgcctccatcgtgctggccgatgaaatcaaccgtgcatcgccgaagacgcagtccgcacttctggaggttatggaagagcagaaagtcaccgttgacggcgtcacccatgatgtaccgcagccgttcatcgtgatcgcaactcagaaccccatcgagcagctcggtacctataagctgcctgaggcgcagatggaccgcttccttatcaagacgtcgattggctacccgggccatgatgtgtccgtcgatatcctcaagcaggtcgatatcaccgaccgtgcgcagaccgtttccccggtgctgagcggtgacgatgtcatgcggctgcgtcaggtggccaccgaaatctatgtggatgatgcgattcgtgaatacatcgtcaggctcgtcgaggcgacccgccacaacgagaagatcacagtcggctcctccatgcgtggcgctttggcgctgacccgatgcgcccgtatctgggccgcggccgatggccgtgcctacgtggtgccggatgacgtcaaggaccttgcagtggccgtgctcgcacaccgtatcacgctgactccggaagccaccttcgatggcgcgactccggaaagcctgatcgcacaggtgctcgaagacgttccctcccccaccatcggttcctgatagggcctggaaaggtatccgaccatggcatctacatccgccgcattacgccgtcgccggcgcgctgaacgcatgttcaagcgcgcggtaagacgcatcagacggttcttcgcatcctacgtctcgcccttgggctgggcggtaacgggcgcaggcatcgcatgtcttattgcgttcctgcctctgggctggtatgagctgctcgtattcggcatcgtggcgatggtgatgatgctcgcggcaatcgcgctttccctcggcaacacacgcttccacgcgtccatcgccgtatccgatcatcgcgtgaccgtgggagacaccatatccgttatcgtcggcatcgacaacaccggcagaacgccgacaaccacggcacgcggatatctgccaatcggcgatgcgcatgaacgattcaacatccccatgctggctcccgggcaatccaagcaaaccgatgtggagttccgtacggtatcgcgcgcaatactgcccatcggaccgttgcgcatccgcaagggagacccgttcggcctggtgcgtcacgaaaaggagctggccgaccgcatcatcgtattcatccaccctcgtaccgtgcgtctcgataccctgaatgccggcgtgccccgcgatctggaaggccaaccatccggccagatcgtggatgatgatctcgacttctacggattgcgcgaatacgagccgggcgacgacgtgcgtaacgtccactggctgagctccgcgaaaaccggcacgttgatgattcgccaatatgaagccacgcgccgcaccgacacctcggtgaccatcagcgtgaacccggatgagtacgtcaacggcgaggaattcgagatggcggtgtccatccactcctccatcggcgtcaaatgcctgctgcaggatcgcccgctgttctgtcacgcgggcaacgcgcacggccagccgcgcaacgccatggagttcctcgacaacgccagtgccatagagcctgatcgtgaggacaatccgaatctcgccgagggcacgctgaagcacagtcctgatgcttcgttctattttttcactgttggatcgctgaaagacatcgagcaaatcaagcgcatgaccttggccttgccccgatcggccagctgcgtggtattgcaggccagcgccggcgccaatcgcggcatcagaagattcgccaacttcacattggccaccatcggcgaactcgatgatctcccactgatcatgggggtgctcgcatgaccttcgaccagtccagtatcaccaatgccaataccgctgcgtacgccggatcgagcggcacatacaccggcacttcctccggcacgtacaccggaacctccaccaccaccggctcctgggccgactccacacattcggttatctggatgaccagaggcaatgtgcttcgcggcatgggcctcagtcgccagccgtggggcaaacgaatcaccagcctcgtactcatagcggcgatgatgttgctggcgcaagccaatctcatcgacgtgtacggcggcgtggccacttgggcgatcgccgccgtaccggccaccttgctgggcgcgatcatcgctctggcgggcatgttgccggcgttgcgactgtggtggcaaatcgtgtttctggcgtttgcccaattcatcatcggtccggtggtaacgctgagttccaccacgtcccattacgtgattcccaccttgaagaccttgagttcaggttgggaaatgacgtttggctcgttcaagtacattatttccgtcgatccgcctctgggcacgcaagacggcgtgctgctggcggtatggaccatcggcctgtggcttacgttcctcaccggcgtgtttgccattaatgccaacgcatggttgtctctggtgggagtgctgcctcttgcggcggccgtggccgtatgtgctctgctgggtacggacagcggctggcaaggtgccatctgcggcattgcctttgccttgctgatgattatctggctgtcttggcgtcttgaactgctggaatgggggcgctggatatccgcgctgatcatcgtcgtgctcgctgccggccttgctttcggaggcacgttgctggtgccgcaggaccgtttcgtgctgcgtgaccgctacgatccgccgttaagcccctacgattacaccagcccgctcagcggcatgcgatcctatatcaaggaccacaaaaaagacgtgttgctgaccgtccataatctgccggccggaacaccagtcaaacttgcggtgatggaccgattcgacggcacagtatggaacctgtccgattcttccgaagccacggactcctcgaattatcatcgcgtgggcaccacgatcaaggcggatgagcagggcgaatccttcactgcgaccttcaccgtcgatcagggattgaccgacacctggctgccgctggcgggagcggccactggcgtgagcttcgccaacgatgccgacaacggcaatgacacgttctactacaacacggataccgattccgccattattcccgccggcacgcgtaaaagcctcacctataccgaatccggcattatcgcccgcaagcccaccgataagcagatcagcagtgcggccgcggcccgcatcacccaaccggaagcccaggatgttcccgattcggccagcaaactggccacgtccattgccggcggacagtcctcgggcggtgccgcagccacggcgttggccgacacattgaaagactccggatggttctctcatggactcgaaggcgattatccctccgatgccggccatggcaactaccgtatcaacaagctgctggcaggcacggccatggtgggcgactccgagcaatatgcctccgccatggcactgatggctcgtgagctgggactgccctcccgtgtggtcctgggcttcctgccgaaaaacaaggatggcgaaatcaccgatgcccgcacggagaagacctcgggcaatggcaccaaaatcgaattcaccggcaacgatgtcaccgcttgggtggaaatcaaattgcagggcctgggatgggtggcgttctatccgacgcccaaggagaccaaggtgcctgatgaaaaccagaacctgacgccgccgaatccgcagacgctggtccggcaaccaccggtgccgttgaccgatccgctgcgcgatcagacgcaagccaggggccaaagctcattggccggcgccgacgccgatgattcgccgaccaacctgttctgggtgcggttctggcgagtgacccgcaaggtggccctgtacggcagcccattgtggaccctactcatcgtctgcggtctgattctgatgttcaaggccatgctgctggcgcgagcgcggcggcatggcagtccgaaagcccgtgtggcagcaggttggaatgccatacgcatgcttgccgagcaaagcggcatcacagccaagggcactcgtcgagatcaggccggtgccatcgcccgtcaactcggcacagatgaccaggctttgatccagcttggccgggaagccgactacgtcacgttctcggggcaagacattgaatcgggccaagccaccacatattggacaggagtcgaccaattgcgcaaggcaatgctcacttctttgccgcgtttcaggaggatacgtacacgactttccctgaaaagcgtggctatactgtcaaatagacacgcagccaagtcgcacacgacgcatgtcaagcgcgcgcgtaagaaggggaagacgtcatgaccacaggctccatccgtatcgcgatgaccagtgacgtgggtcttaggcgcaagaacaaccaagacaccggattcgcccaacagggcgtgttcatggtctgcgacggcatgggtggcggcaaaggcggcgagcaagcaagccagttggctgcccagcatttcgcgcagctggcttccatgccctcgcgcacccgccatgacatcgacgacaccctggcacaggctcagcacgacattctcgatttgggtgaccgtctcggcggcgtggccggtacgacctgctccggcctggttttgccccagccttacgcagatgccatcaatgcccacagcgcagctccgtttgacgacgccgactccccggatttctcggaccagacctatgtggtcaatgtcggcgattcccgaacctaccatctcagcccgctgccggatgccgatgcccccgccacggatatcatccccgtgtgggacgcctcctcgctgacccgcatcacgcgggatcattcccaacgccaggaggctatcgattccggtcagatgctgccggaagaggcggaggcgaccattccacgcaacatcatcacccaatgcctgggcgatccagacggcatagtgcccgacgtatatgttgccgatctgaccggccgtttcatcatctgttcggatggattgcacggtgaagtgtcagacgaacagattgcggccatcgccgcagcgcattccagtccgcaggaagccgtggacgccttggtggcggccgcgctcgatgcgggcggaaccgacaatatcactgtgattgtggccgatatgccactgaccgaacccgaacatcacgcgttcagcgcttttaaactggacgagggcgaggacattggcgccattgaagacgcaacactacaaacactacggaccatacgttcggcataaccgagcgaacataaggaggtaatcccatggttgattatgatgctgcggtcgctgccgtacaggatccgaacgcggacccgattctgttggcaaaaatcgcctacgagaatccggaattcggcgcaaacgtcgccgtaaatccgcgttgctaccccggcttgaagcgttggatcgccgagttcggcgatgagcgcgcccgcgagaccctggcgcaatacgggttcaccgccgaggcattcggcggcccggtccaggatcaggaagccccgtcacaggcggccctgcaggctgccgagcagcagcctgcagacgcttacgccgccgaccagtacgccgcagctcagcccgctgccgaccagtacgcagcccagcagcccgcaactgaccagtatgctgccgctgcccagcccgctgccgaccagtacgcagcccagcagcccgcggctcaggcggcattcgaggagcctgtggccaccaatccttatggcttcaccgccgaacaggccctgaccaccaccgaccagatgcaaatcgcccagattgcccaatacgcgcctgaactacgcgcctgcatcgcccgtaatcccaacacctatccggcactgatcgaatggctgggccagctcggcgacccggcgatcaacgccgctttggcttcccgtcagtgaaaggacggcatcatcatggccaaacttccctaccctccagcacctgaactgggttggtattctgacgatccggtggaaggcaccccggattccgcagttggcacagccgaaccgcagaacgactacgggcagcccagcaccgcggaagcggcaaccaatgccgcttttaccgcagagcccgccgccactgccgccgctgagcccactgccgctccggtagacaccacaccgcacgccgccgaaaacgacatcgaggattgggacagcaccgtgctctcctcgtcgttcacttccaaggcaccgaagaagacgtacctgctgcataacgatgtcaccggccagaccattgtgatcgacaagagcacactgttgggccgcaagccatccatggatgtgccgcagggtgccaaggccgagcgtatcgaagacccgacccgcaccacgtcccgtaatcacgccgccatcagcatcgataccgatggcgcgttgtggatcgaggactatggctcgttgaacggcacctacatcatcgccgacggccaggagacccaagtcaccaagggcacaccgctcaagctcagcgcgcctgccacggtgcgtatcggagaccagttcttccagttctccgaacagcagtgacctctggactgtacaggccagcgatacccccccagatatcaataaaccgcaggtaacgtaccaagcaagctgtgagaacaacttgtacccgtacggtacctgcggtttattgttgccgttggcgggcggtcagtgacggttgctcggctatgcctataccgggctgggcggtcactgaccgctgaacgcagtagttacttcttcgagtctgacttgttatcgctggatgagctcgacgaacttgacgagtccgactccgagtccgacgaatccgaatcactctcgctttgcgacgaactgttgctcagatccggtgcggggtcgcccggggcctgaccgatggtcacaatcacgtctccgctggattccgggctccacgccatccattccatagcggcatggtcgcacaccgtggaatcatcacccaatggcaattgcgtgtacttgcccacggacttgccttgcgcatcaacgatgatctgctcatccgtggtcttcacgtatatggtcttggtcagatagttgatgcccttgaaactgccgtcggtcaacaacagacgaccccactgcgacccatccaacacttccgtgggcttcagatcggacgacagcaggaacacgcgtttgctttcgttgccgttaccatccgtctgcacgtagagggtgccgtcggagaattggtcaatggccttgacgtcctcatccttgctcagtcccagcacgtcttccaacgattgccgtttgccggtcgtgctatcgatgacaaacttgccgctatacgaatcatcggtcacatacatgttcttgccgagataccgcattcggctcaaatcacaacttgagtagtccgtatcgcagtaattcaacgggaaactcatgatttccttgttgtcttcgaccgaatacaggtggtacgaattgtctcgcaccatatatgcgtcgtacaagctcacgccgctcgcggaggcattgacctgtttcgcatactggtacccgccagaatcagtggtaagcacgattttgtcttggaaggtctgcaataccttggcggtatcactgtcatgagttacgcccatcacctgcgtgtggttgatggtcgctgagcgctcgtccttgttagcggtgtatttttcatcgctatgccacgttttcttgatggccaccatgttgcgggactcggcgagcaacgagtattcgtaaccctgctcatagtcgataaggttgtcttcctcggttcgcaggtcgatgcggtcagacagttcgccggtatcgagatcgacctcgtgagcgaacagatgcacgctttccggcgtggtgcccactgccttggtttttaccgcatagaacacgaataccgccggattatcgccgtacgtggcggcgacctggggctcggaatactccttctcccccgattcgagcatggatacgtggatttccttcgattcatccagcgccggcgtccagacgccgaaggcatactcgccgctgccgtccagggaatcacttgaggatttggacgacgaatccgaatcgaccgaggaatccccatcccagcagtggatgacgttcgagaccatcgcgccgccagtccacttccagtcactggcggagttgccgtcgcatgagaaatcggtcatcgtcacttcggtggctgccggcttggcgggctcggacttggtcttctgctggtctttggttgttgtcttagtctttgtcttaggtttcgatttggtggtgctggaggtagttgttggcttggcctcggccttctgatgcgcgttacgccagaatataaagcccgtgatgccgccggctatcagcgccactaccacaataatcgctatgatgattggcacgattttacggggctttttgccgttgttgccggcaccattgccgttgttgggcacgcctgcaccagttggcatgccattgttcgaggtcgggattcctgccggaggaacggcaccggcggcaccggcatacgctccgggtaccgggctgcccggcacctggccgccgggcattggaccgttcggactggaaatgcccggttgcggaatattcgtttgaggcgcattcggccgaggtacgctcggctgcggctgcggcacacccggctgcggaatcccgcgcgatgccactaccgtagcgtccgccggtaccggggctccgcaccgcgtgcagaacatcatattgtcaggaaccgcattgccgcattgtgcacatcgtttcatagttcttctcccccgctatcagcgtcatcgcttcggttcttctctgccttctattgtaggagagagatcacgaatgtgtcgtcggccagcgtgaaatcgccgccagatgccgcatattcgcatccgccgcttgccagttcgcggccacctaccgcagtgccgttggccgaatgattgtcggtgatgcaaaaacgtccgtcatccagcatgtcaatcaccgcatggatacggctgacgttggtattgccgcccatgtgaatgtccgcggttttcgatcgcccgatggtggctcgtgtggcgtgcactgttattgctttaccgtcgcgcaatcgtgtgacggtaaagcctctggacttgtccgtgtagaggcgcagcatcgtctcgccttcgctgtcgttctcatcggcgcgcagtgctgtgctgacggcgctgacagggaggatagggcgaacgacgttgctagtggcgggaacgcgagcagcatcaacgttgttgacggtgtgagcaacgtgagcggcggcagcagcgttacccgtgttagtctcggccacggcagcagtagcggtatcacccgcggcagcggcagccgccacattggatgccacatcgcgggcggaatcttcacggatatattgttcgcgaacgagattctcacgagcgggctgcgtttcctgcttgcggggaagatttacggcaatcggcattgcaggagccggctgtgtcacgggcgaggccgacgttacaggagtcggctgtgccggtgccgcgtgtgctgccggcattgcaggagccgccggcgttgcatgcgttgacggtgccgcggaagtcgtcggcattgcggcctgttgcggcgtcgtctgaagtttaggcttggagctcaatactgtggcgccaaatcgcgtggcaccgaccatggtgccgtcagacactacggtcgcgccgaattgcgtctccgaaccattatcttcatgagtcgactgcgctgactgcgcttgacgcggctgaacagtgccgggcagcaaatacgccataaaatcatgcagagcatctgcattaaccagtgaattgcgccccaggaactcggcgagcgcacgctgatagccttgcacaacggcatcctcaagccgggtccggcgtgcatcggccaatgtctgcagcaaagtggtggcggtgttgcgatcgggttccagtcccagcgccggcaccaccacgaacagcggatacccctgtgcggagatatacacgcttttggggtcccactgcacgtacgacagcggcacgcgatgctcctcgcattgctccataacggacaataccgccacgagtatgcccacatattggccgccaggcactaccgacctcaacacgccatgcatggtctcgcaatgagtcacgtcgtaatagaagaggatttccgcgccattactttcaaaccggaacggcagcatataccaatggccttcagcaagccattgtgcctgcccaagatccaacgactcgcctcgcgtggtatgtatggtcagcgtctgagcccccgtacgccgatccttaacagtcttcgctctcatagcacttaagtctagtcctgtaccaaggccaacgctttgcggagacgcaaaactcgtcaacacagtaacacaactccggctaagtaactttaccaaaaaactaaaaattggtaagataaggttaccagttttcctcaatattggtaaggtagcattaccgttttcttgaaaggcacattatggcaaatccgatcatcgccgaaaagctgcgcgattttagaatcgaagatttccacccgattgtgccgcgcgacttggatctaggtaagccactgaccccgagagtaggcaatctggtgaaggtcatcgtaggcatgcgccgcagcgggaaaagctaccgcctattccaagagatagaggccctacatacatccggtgtcagctggaaccaaatctgctatatcaattttgaagatgacaggctcggcgacatcactccaagtgtgggcgatgaagtaatcgaaaccttttgctccatgcatcccgaaagcctagacaccggcttgtacctgttttttgacgaattacaggaaatgcagaactggggcgcttggctacgtcgcatcgtagacaccacaaaagcaacgatctatgtcaccggctcttcctcgaaaatgctctcaaaagaaatttccaccgaatttcgaggccgagcattggacttcgagcttttgcctttctcattccgtgagtttgtccgcgcgcgcggtatcgccgaatcagaattgctcagccggaacgaagcagctggatattccaccaaagaacgattaatgctgtcggccgcattgatctcctacctggaagagggcggattcccagcaatcgagggactgccaacgcctcaacgtgtgaccctgctccagtcatatgtgcagcgtgtcgtatcccgcgatgtagtggaacgttatgacatcgcgcgtccaagagttgcctccgcattggcacgacgcttgcttggcagcaacggcaagccattgtctattcgcaggatagaaaacgaattgcgttcagccggactagccaccagccgtgtgctactgggagatttattggaatattttgaagacgcctatctggtgtttcgaatgaaagacttctctatgtcgctcaaagagagcaccacttccacatcaaaaatatacgccatagatcccgggctggccgcagcctcaagcatggcaagcgccagagatgatggccaacgattggaaaacgccgtttatctcgaactacgccgccgaaccgcaggttatcgtcgcgacggcatatcgtcatgccataccaaggaacatggctatgaagttgattttgtgatgggcgatgcactcgaacatgaacaatatgagctatatcagggcacggcacgcatggatgataatcg

SEQ ID NO: 3727 - DNA, 3916 bp, Unknown
  R150_10m  MAG No. k141_10708
acacggaccccaagggccggccctaccgttcatgacggctcagggaacccctccggacgatgcccaaacgaccggccgaccaggccgggaccgaactggaccgccgggtgttccgggcgtcccacagccgcatccccgagatcgtcgaactcgcccgaaagatccgccgtcatgggcccgacatcctcgggacaatcgaattgggctgttcaaacgccaggctcgaggcgtccgacaacaggatcaaggtcaccatccgcatggcctacggcttccaccacgcgaacaatcccatcgccctcgtcatgctccgccgcggcggactcgacatacgcccaccacaaccaagaacccaacccacgaaaacagcagaagcctcttttttgtgctatcccgtaaaactgcgggacggcagctcattttcgccgtttgagccgtgccgtcccacatcaccctttgcggaccgtgacaccataacaccgagaatggcggaatttcaacgattccgtaattcgtactgcgggacgccacgctagtcaatcgattgacactcgtgccatcccgcaacagtgtgggatacgacgtcaaaatccgcgaaaatcgcgtgccgtcccgcgcgtacggcaccgcacgaatacatgctgatgaaccgcatagaaaatggctccccgtgtggggagccatgagctagttactaactagcgatgcgtcacttctcgttctggccgtggcacatcttgtacttgcggccggaaccgcacgggcacggggcgttcttgccagtgccagggaaggtgcggccgtcggcccacggcgtcttgagctcttcgctcttcggacgcttggaaaccgggaccttgccttcggcgtggctgaccggagccgggccggcaacaggcagcgtggactcgccggcctcggaggcggctgcggattcggcgatcgcctgcttggcgtccgtatcctcgtcctcttcctcgacttcgccctcggcggcctcgaccacggattcgccgttctcgtcggggccggaggccacggcgatggtgtcggcgctttcggtggtctcctcgacctcgtcaacggcctcgtcggtggtggcgacctgcttgatgtcgatgtggaacagcagctggacggactcctccttgatggcctcgatcatggagttgtacatctggtagccttcgcgctggtattcgaccagcgggtcgcgctggcccatgccacgcaggccgatgccgtccttgaggtaatccatctcgtaaaggtgctcgcgccacttgcggtcgagcacggcgagcaccacgcggcgttcgagatcgcgcaagccggtctcgccgatggtctcctccatttcgccgtactgctgcctggcgtcctcgacgatcaggtcgcgcacggcctcgacggccttcgcacccttgaggccgccgacgatcttcctgacctcgtcttcgtcgaccttggtgggaatcacggtgttgagcgccttgaacaggccctcccaatcccagtccttcggtttctcggatcccttgttggcacccttgatgtaggactcgacggtgtcggaaatgaaacgcaggatgtccttgtggatgtcttcgcccttgagcacggcctgacgctcggagtagatgacggtgcgctgcttgttcatcacgtcatcgtacttcaacacgttcttgcgaatctcatagttacgggattcgacggccttctgcgcggtgcgcacgcccttggtgacggacttggcctcgatcggctggccttcctccatgcccttggccatgacctgggccaccagctgggtgttgaacagacgcatcagatcgtcttccagcgacagatagaagcgggactcgcccggatcgccctggcggccggaacgaccgcgcaactggttgtcgattcgacgggactcgtggcgttcggtgccgagcacatacaggccgcccagctccttgacctcctcatgctcgtccttgacctgggccttgatctcgttcagggtgcccggccaacgcttctcatactcctccggggtgtcttccggagagtaaccttcggacttgagcttggcgtcggcaaggaactcgacgttgccgccgagcatgatgtcggtaccacggccggccatgttggtggccacggtgacggcgcccttgcggccggcgacggcgaccacggcggcttccttctcgtgctgcttggcgttcaggacctggtgtgggatcttcgccacgtcgagcagggcggagaccacttcggagctttccacagaggcggtaccgagcagcaccggctgtcccttggcgtgacgcttggccacgtccttgacgatggcggccagcttctccttcttggtgcggtagatgaggtcgtcctggtccttgcggatcatcggcttgttggtcttgatcggcagcacgcccagcttgtaggtgttcatgaactcggcggcctcggtttcggctgtaccggtcatgcccgcgagcttgtcgtacatacggaagtagttctgcagggtgatggtggcgaaggtctggttctcggccttgacctccacgccttccttggcttcgatggcctggtgcaggccctcgttgtagcggcggcccggcaggatacgaccggtgtgctcgtcgacgatgagcacctcgccttgggtgacgacgtagtccttatcacgcaggaacagttccttggccttgatggcgttgttgaggtagccgatcagggcggtgttggccggctcgtacaggttgtcgatgccgaggaagtcctcgaccttggtgatgcccgggtccaggatgccgacgaccttcttcttctcgtcgacgtcgtagtcctcgtcgcgggtgagcttcagcaccagcttggcgaactgacggtaccagcgggtcacgtcgccttcggccgggccggagatgataagcggggtacgggcctcatcgatgaggatggagtcgacctcatcgacgatggcgtagtggtggccgcgttgcacgaggtcggccttctcccaggccatgttgtcacgcaggtagtcgaagccgaactcgttgttggtgccgtaggtgatgtcggcgttgtactgcttgcggcgctccggcggcttctgctcggtgatgatgcagccgacgttcatgccgaggaagcggtagatacggcccatcagctcgctctggtagctggcgaggtagtcgttgacggtgaccacgtgcacgcccttgccttcgagagcgttcaggtaggtaggcagggtggcgaccagggtcttgccttcaccggtcttcatttcagcgatgttgccccagtgcagggcggcaccgcccatgagctgcacgtcgaagtgacgctggccgagggtgcgcttggagacctcgcgcacggtggcgaacgcctcgggcatgatctcgtccagactcttgccgttttcgatttcctgcttgaacttcggggtttgggccttcaggtcctcgtcggagagggcggaaatctcatcctccagagcgttcacggccttagccacgttctccagcttcttgagctggtggccttcacccattcgcagggctttgtcaacaatatcgaccactgggttctcccttgactgataagtggtggtgtccgcgtaccagaatagcgcctcgcaccgtcagcaatcgaatttttcgacctttttacgaaaaaatggaccgcttccatattggaagcggtccatgcggtatcagctgatcatgtcagcaggccttaccctcaggccttcttgacattctccggagtgtcgatttcgaacacgccgtagctccaaccgtgacggtgatagacgacggacgggcgtccggtctccttgttcacgaacaggaagaaatcgtgtccaatcagctccatctcgtacagcgcctcg

SEQ ID NO: 3728 - DNA, 13431 bp, Unknown
  R150_10m  MAG No. k141_10902
cgtgacccacgtagcgctcatcagccaccggccacggctcggcggacagggaatcggcgtggccgagcttgttccacatttcctcgcagatgtgcggggcgatcggagcaagcatcaggatcagcggctcgacggcggcacgcggcacggccttcaagccggtcaggtggttgttgagcacaatcagcttggcgatggcggtgttcgggcgcatgccctccatttccgcggtcacttcggcgatcgtgttgttgagcagtttcagtgtcttctcatcgggcgcgtcctcggtcacgtgggcctggccggtggtctcgtccaccacgttgcgccacagacgctgcaggaagcgcatgccgccgaccacgttgcgggtgttccacgggcgggattcgtccagcgggcccatgctcatctcgtacaggcggaaggtgtcggcgccatagttctcgtacatgtagtccggagtcacgatgttcttgagggacttgcccatcttgccgaattcgcggttggcgtgttcgccgttccaggtgaacgtcggctcgccggaggcgtcggccggcccttccacgacctcgtccgccggcacgtactggccgcggtcgtcggtataggcgtaggcctggatcatgccctggttgaacagcttgtggaacggctcggccgaatccacatagcccagatcgaagagcaccttgtgccagacacgggagtagagcaggtggagcacggcgtgttcgacgccgccgatgtacaggtccacaccgccttcgtcacccgagtacttgttgtggttcgggcccatccagtagtcgaactcgtccttctccaccatgtgcttggtgtcggtcgggtcgatgtaacgcatgtagtaccagcaggagccggcccagttcggcatggtgttggtgtcgcggtagtaggtcttcttgccgtcgcccaagtcgagctcgaccttgacccagtcctcgttgcggctcaacggtgcctcgggattggactcggcgtccatcggatcgaaggtgcgcggctcgtagtccggcacgtcgggcaggttgattggcaatgcggaatccggcagcaggtgcggggtgccgtcttcgccgtaaacgatcgggaagggctcgccccagtagcgctggcgggagaacagccagtcgcgcagacggtagcttacggtgcccttgcccacgccggcggattcgagccaggcgttgaccttggcgatggcgtcgtccacgcgcagaccgttaaggctcagcgcgtcgcccttgacttcggtggcctcgacggaggagttgatcacgatgccgtcatgggaaacgaacggcgccttgccctcgtagttggccaagtcgtcgccggaatccggcagaggcttgacggtgtagatgaccggcagaccgaacttcacggcaaagtcgtaatcgcgctggtcgccaccaggcacggccataatggcaccggtgccgtagtccatcagcacgtagtcggcggtgaacagcgggagcttcgcgccggtgatcgggttggtggcgtacaggccggtgaacagacctgtcttctcaccgccttcgtccacgcggtccttggcggtcttggcttcggcggcgagcctgtaggccttcaccgcctcgaccgggttgacatagccgcccttccagtcttcgggtacatcggccggccattcggcgggcacgttctccagcaggtgatgttccggggaaacaacggcgaacgtggtgccgaacagcgtgtcgggacgggtggtgtagatttccatgtccttgtcaccgtcggcagtggccacggtgaagtgcacggaggcaccatgggattcaccgatccagttgcgctgcatgagcttgaccttctcaggccaatcgatgccgtcgaggtcggcgatcagacggtggccgtacttggtgatgcgcatggaccactgacggagctcgcgctggaagaccgggaagttgccgcgttcggacttgccttcggcggtgacctcttcgttggccagcacggtgcccaggcccgggcaccaattgaccggggacttggagatgtacgccaggcggaagtcgttcaagatatcctgctgctcggcggcagtgaggtcggaccactgcttgccatcggactcgtggccaggaatggccttttcgccggactcgaatttggcgacgagctcggcgatggggcgcgcggatcccttggagccggacgggttggtggcctcctcgtcgtaccaggaatcgtagatgcgcgagaagatccactgggtccaacgcacgtagccggggtcgatggtggcgaacgtgcggcggttgtcgaagctcaggcccatgcggtgcagctggcggctcatgttggcgatgttcgcctcggtggtcacgcgaggatgctggccggtctggactgcatactgttcggcaggcaggccgaaggcgtcatagcccatggcgtgcaggacgttctcgcccttcatgcggtggtagcggctcgtcacatcggaggccagataacccagcgggtggcccacatgcagacccttgccggaggggtacgggaacatgtccatggcgaagtaggcggtgcgcccctcggcgttgcggcccttgccgtccttcaaatcgccgttgacgttggcggcccagaaggtgccttgctcatcccagatcttctgccacttgttttcgatgtcctgcgccagtgcggcgttgtagcggaagttgggctcttcggtttgcgtgctcttctcgttgtcactcataaatcagcaaggtagcctcgcaactggacacgtcgtcaatcgttattcagcatccgagacgatggctttggggtcaccgttcagcgaaaccgtgagctttgtttggcttgtgaacgtatccttggcggccgtccagctgccatcctcaaccatgtcttccaatgcttccgcgattttctgcgccaattggctggtgccttgactcacggcgatgccataactgacctcgcccttgtccgcaatcacgtccatatactggggcccgttggccgcttgaagaccggaaagcaccgccatatcggaggctatggcatccgccgaccctacttgcacggccgtgacgcactgcgcataactgctacgctcctgaatccgagcctgcgggtggttgccgcggaagatgccgactgtctcgtcacctttcactgcgcacaccgtgccgtcgcctacgtcgcccaccgaacctgcgtcattggtgaatcggccacgctcatccgacctgaccagcaaaccgacgctggtcgtgaggtatggtccggcaaaatcaacgatcgcgctggacccatcggtgataggccaagaggcgacgaccatgtcgacctgtccattgtccagcatggagcgccggttttcggggcgaacctgcttgaagacgatctgcttgttcgcatagccgagtttggcggccacgtatttggcgatggtgatgtcgaagccctggtatgtgccgtcatgccatgctcccaccgatggttcgtcggctgcgaccccaatggcgatggtgggtccctccggcgctccggagacggtggtgacttgaatttggccgcaaccggccagaccggacaatggcaatatcatgccaaaggccgcggcgaatcctgccatcagccgggagcgaaatccgcgccgcatcgggcggcgagcgcggagcatgctacggctggcgaacgatgaccaatggtgcataaccgtcaaacgccttacttgaacatgcgcgaacgtgtgaggaaccaggcaaccacaccggaaagcaccatggagatcacgatgatgagcaggaagccccaaggcttgtcggtgaacggcatgcccatcatgccgccgtcgaagttcatgccgtacatcgagaaaatcagcgtcgggatggacagggtgatggagatgatggtgaagatgcgcatcacgttgttcaggttgttggacacgatcgaggcgaaggcgtcggtcatgttcgcaagaacgccgctgtagatgttggccatctcgatggcctgcttgttttcggtgatgacgtcgtcgagcaggtcctcgtcgtccgggtattgcttgatgcgttgcagggtggtgagtttctccatcacgatttcgttcgatttcagcgatgtggtgaaatacaccaaagtcttgctcagctccatgagcatcacgatctcgcggttctgcatggaatggcgcagcttcagttcgagcttgtcgctctcacggtcgatgatgcgcagataccgcaggtacatcgtggcgttgcggtacaggatctgcaggatgaaccgcgagcgcatgaaggtgttgaaacctcgtatcgtgccttccatgaatgggtggagcacgggcgtgtcctgcatgcagacggtgatgatgaggttttcggtgacgatgatcgacagcgggatggtctcgtaccagtcgcgtccgccacgctcctccacggtggggatgtcgacgatgatcatcgtgtaatcgtcttcgacgtccacacgtgaacgttcctcgtcatccaaaggggcgcgcaggtcggccaggtcgatgccggtctgtgatgcgacggtggcgagctccacatcagtgggttcgctcaaacataaccaggagccgttttccggtttctcgatctgctccacttggccattgattgagctgaagattctcagcatgtcgcctcacccgccttccgcgctttcctactgttctatcgctgtacggttccaaaccgagattagtctagacccaccgttcgaatttgcgagcggggtttcgcatagcgaccgtcaccagacgattggctgccaacttggcatgtgcggtccgcgcagatcggtcggcccgttctcccagtcggcgctgtcggcgatggcgggagccttgttgtattcctccaactcccacaggggctgttcggtgggggtgccgttgacgctgtggcgcactttgagccggcaccagcaggcgttgcgcatgccgccgagtgcgttcatgccgtccgggtcgagttcgagcaggttggagatggtggcggtaatccatgagccatgggtgacgagcatcagcgtggtgggcgtgctgtctgaataggcggagtcggtgaccagtgcgcgcacggcatcggcacctcgctggcccacggcggcacggctttccacaccatgcttggtttcgcccccggtgtgctgtttccaagaggcgtagtcgtcggctgccacggctttgatttcggcgcgggtcatgccttcccactcgccgaagctgcgttcacgcagtcgttggtcacaggtgaccggcaatcccaaaatatcggcgaaggcgtgtgcggtctgttgggcacggaacaggtcggaggtcatcaccaccatgcgccggccggcggcgggggcctcctcgaactgtcgcgtatcagtgcgttcggcggcgtcaggaccgggctgggcgatggcttcgggatgctcggcaagccggttcaccttggcccagtagtaccgtgaagcgagcgcgaatccggtctggtcgacctgccattggcctacgatgtcgagcggcacatcgatctggccttgcaagcgatgttcgagattgtattgcgtacggccatgacgcagcatcatcacttcatcgatcatcggttttcgccacctcgttctcttgcggtttgccatactcatctcagcacaacccctagaatggcggcatggagatttctgagtcgacctgggcgttcatcgccaaacaccgccgtgaagatgtgcgtgatgtggccttgcacgccaaacatgatggcgacgtggatgtgccgttcgcgctggagcagattgccggctggcagcgcgcttcactcaagctacctgactgggcgtcccatgatgggctgattttcccgccgcaagtcccaatggaacaatgttccagccagttcacggctcaatacaaagcccggttagcacagcgattgttggccaaggaagcagtcgacgacgattccccgacatccctagtcgatctgaccggcggtttcggcgtcgacttttcttacatgtcccgagtgttcaatcgtgccatatatgtggaacaacaatccattttatgtggtatcgctcgccataatttcccgatactcggccttggccacgccgaaatcatcaatgatgattcaacagcagtgcttgatacgcttggccgagcctccatgatcttcctcgatccggcccgccgtgacgatcatggctcgcgtacctacgcgattgccgattgcacgccggatgtgctgaccctgaaggatacgctgctggccaaggcaccgacggtcatggtcaagctctcccccatgctcgactggcataagaccgtcgccgatttcgccggcgcggtgcatgaggtgcatatcgtctccaccgggaatgaatgcaaggaattgttgttggtgttggggcgcggccgttgcgcctcaccgctcgtggtatgcgtcaatgacgggcaggtgctgtcgtacaaggccggcgataacagcgacaatcacacccctatcagcgattctgccttggttgcacacaatacctgtaataccgaggatttcccggctgaggaaagcgcgaacggcttcgattcctcgcattggaagtacctttacgaacccaacgcctcaatcatgaaggccgggtgctttgatgttctcgaacagcgcttcgtcgtgcatcacatcagcccgaatagccacctgttcgtggcggccgaacctattgccgatttcccaggcagatcattcgtcatcgaatccatcgtcaccatgaacaagaaagaactgaagcagctattggccggtctcacgcacgccaacatcgccgtacgcaatttccccctatccgtggcccagctgcgcaaaaaactcaaactcaaggacggcggcaacacctacctcttcgccaccaccgacctcaaaggccatcacctagtactgcgcactgaaaagcgaaaaagtggctccctctgacgaggaagccaccaatacgtcagctaatcagtccttggcgatggtcttgccggcggtcggaccggaggcaaggttctggatctcggtgacttcgagaaccggaatcacggccggcttcttggtgcccttttcctcggcgatcttgacctgctcgttgtagatgtcgtcgtcaacgtgcagcaccacgttgccgcggaagcggtagccctgcttcttctcgaggttggcgaaggcgatgaccagcggagagccgttcttgaggttctcgtagtgctggccggcggtgcgctcgtggtaggcgatgtgcgtgtcgtccagcacgaacagggacatcttcgggccgaggtccagttcgccgtccttggagacggtggtgatccaaccgaggttgttcttgatgaattccttgatttccggagtaatgactgccatgtcgaatcctttcatgattgctatggacaacgtatttttttactctttccagagtaccggtttcgagcgcgactagcccggatgttcgctgtgagtaacctcaccttcgcacagctttcatccggttcttacctgcttggcggtgccgcgccccggccgcgcaccagccacacacctgtcacacacccgacgcccatcgaccggtcgattttggccggtagttcccgtaatctgtgagccgagagagccacaagttttcctaactgtcctgaggtgcaccatgggtttggtcgaacgtttcagcaagctgcgcagccgctggtcccgcagctttcccccgaatctcgcccgactcatgttgctgggctgcgccgcattatggggtggcagttatctgctcgccaaattcgccatggaggcgattccgccccaatggctgatgggtctgcgcatgataggcgcctgcctgtgcatgctggccttgttccataagcacatcgtgccgtatctgacgccgaagatcattgtgccggcgctcgtggtgggtctgacctactggggcacgatggtcacccagaccgtcgggttgcagaccattgaaccgggccgcagcgcgttcctgacggccgcctactgcgtactcaccccgttcgccacgtggatcatttcgaaaacccgcccgaaggccatcaatctggtcgccggcgtgatctgtctgatcggcgtcggcttcgtctcgttgaagccgggcggttcgttgtcgctgggcgccggcgactggctgaccatcgcaaccgccgtcatcttctcgttcaatctgacctgccttggtgtctacaccaaacgcttcgaccctatcgccgtcacttttgtgcagttcggcgttgccggcgtattgttcatcatcggcgcgttgttcaccgaacccatgccgaacgccagctggctggcaccctcagtagtggccagcgtgctctatctgttcctcggcgccacgatgagtgcccagatcatgcagaacatcggtctggctcacgtgcctgcctcgcaggcgtcaatcatcatgtgtacggaaagtctgttcgccgtcacgttctccgcgttgttctggggcgagacaatcatgtggacttcgctggtgggtttcgctttgattttcgccgccgtactgatgtcggtgatcagaccgaccgggcagtcgctgcatcgtaattgacgatgtcccgcggcctgcggcgacgcgaaacgcacgtgtgtgcgccgcagggcgtgtccgacctgtacgaaggccgattttgaaggtctcgtgtaggcctcgccccgcttccatcgagtctcaggcaacctgtcagcccgacaccctacggtcgtgcattgtgaagaagttttttgaaggaatctccctctcatccatcgtggcgggcacccttgccgccgtcacctcgttcctgctcgcatcgaagatcggcatcggcggttcggtgatcggagcggcggccagttatgtcgtctccgccgtggccaccaagatctaccagaacgtgctcaccgcctccggcgaaaaactccaatcggcctcgtcctccggcagcgggatcacgaaggacgccgagaacggcgatgccgatggcggcaccccccgaacggccggcagccggaccgacgttcgggacgagcccgatacggcgacgggcgtgaccgccgatgatgcttcctccacacgcagaccgcgtgaaatcgtgttcagccgggcgaacggcaggacgtactcggtcgatgagctgcgcaagtcccgcttccgcgcttcgaagcacaccgccatgatcgtcaccttggtgtccggcctgctcgccgtggcggtgacggccggcgtcgtgatgctggccacgcagggacgcggcacggacaatctcgtatcccccaccacgaccacgcccgcgcgcaacgacaccggcacgcgaacgggcacccccgatcagaacaacgctctgccccagacgggcaccggcgatgattcgaagggaaccagcaaggattcgaaaaccgacgccccctccaccgacctcgacgccaacggcacctcgggttcgaccggcgccggcgcctcggattcgaaaaccgacggcaccgccaacggttcgaatggcaccggcacctcaaagaatccgaccaccgaagacccgaccagccaaggcgtcggcggcagccagaccggttcgaacggcaccggcaccggctcgacgcaaaaagatccatcgggatcgacttcaaccagtaccggcaccagcggcaccagcggatcgccggccaccggcccagacgcgggcctgtctcgttaagtgtgtaactggcgttttcattgttgtgttccctcgcttggccagcggtcggcgaaggtgatggcaaaggcgttgagcgcgggcttccggcgcgcgctccatcgtatccgtcccttgccggtggggtccagcgagcggacggtcaggtacatgcacttgagcgcggcctgctcgtcggggaagtggccgcgggcgcggatggagcgcttgaatctcgcgttgagcgattcgatggcgttggtcgtgcagatcacgcgccggatctccacgtcatagtccaggaacggtatgaaccgttcccacgcgtccatccacagcctgcggatcgcgggatatctcgcctcccacttgtccagcatcgcgtcgtcgcccgccgccgcggcggggggcggcgcccagatgcccagcacgtcgcggtcgccctccagatccacgccaacggccacgtagaacgcgcggttggcgacctgcccgtcgcgcaccttgacgacggtcgcgtcgatgaacacggccgcgtacacacgatccaggggacgcgagcaccattcgtccttctcggccacgacccgctcggtgatgcgactgacggtctccctggacacgtccgccccgtagatctcctggaagtgggcgctgatctcgccggtggtcaggcccctggcatacagggacagcaccacctcacccaccccgggcagccgccgctgccgtttcctgacgacgaccggctcgaacgagccatcgcggtctcgcggcaccccgatcccgaccggacctaccgaatcggtgaccacggtcttggcggtggtgccgttgcgcgtgttcgcggccctgccatccttggatttcttgtgcttggcgcggcccaggtgctcggtcatctcctcgtccagggccgtctccagcacgcttttggtgaactgtttgagcagtccgtcgggccctgtcaggtccagtcctttttccttggccatgcgcacgaatgtgagcgccgcctcccgctcggcgttgcgtttttccgcgtccggcttcttcgtcggtgtcatgtttcccattgtcccagcacacatcgtccaccagcctttccgaccggccacacgaccggccagttaaggccagttacacacttcgagagacagtcccacgtataccggttctttgtttatgtaagggaatgattgatggttcggtttgcctgtttgtataatgcgcttatttatcttggtaccggatgtttttcggtctactatatggtggcctatcatgatgtgggcctgtcggtgctgctgatctccatcgtcaatgtggtgttcgacgtcagcgaatcggccagcgagctgcccacgtccgtgctgttcgaccggtggtcccgggaacggacgctgatcatcggcgtgttgtgccgcgtcgcgggattcatattgatgctgttctggtccgcgaacttcgccgtgctgtgcctggccaacgtgctggccggcatcggggccgcggtcgaaagcggcgcggcgtcctcgctgtacatcgaatacgcccgcaagcacgatccctcgctgggtatgaagaccttggtgtcaagactgtcggcgatgatcgctgtgtgcacgatatgcggcggtgcggtcggtgccgtgctgttcctgcttgactcccagctgatctggctgggcgcgacggtgttctacgtattggcgatcatcccgcttctcggtctgatgagggccgggtcgcgcaccaaggccgcagcgacggatgggagcgggacgacggaacggcaggccgaggcgtccgtcgaatccgatggatccgccgagccgggcgagtccgggacctcgctgacggtgttggatcatgtcaggcagaccgtggcggccgcggccgtgctgctgcggaagccggagatatggaatatggtggtgttcaatctgggtacgttgtcggtgctgacgttctggcagctgctgctgatgggccaccagaccggggtctggtggcagttcgccggcctagtgttcactaatatcgcgcagatcgtcggcagtcgtctgggtatgctgcggctgcatccacgttccggcgacattgcgatcctcgtgctcatcgtgtcggcggtggtgcttgcggccacgccgatgccggcggtgaggatcctggcgttcttcgtgttctcctgcgcgcagatgtacgtggcgaacacgatctccagcagcttgcacgagagcattgacgattcgatccgcgcgaccgcgttctccgtgggatcgctcgtattgatggccttcaccgcggtcgtcaccccgctgtgcggctacatcgccgacacgttctcgatttcctggggtacactgacgacgatccccctgctggtggccctcctcatcgccggacttgcgcgaaagcctgaatccgacaaacgggtaaaagtcgatatttcgttggattgagacgtcaagggcttgcgggcacgatgcccgcaagcccttgacgtctatatgtcattcattcatggttggaatgcgctcctcctacgcgtgcggttgaatggttagtccatcgctatcgtcggagggtgtcagggccgaagatgaaaccgtctgttccgggtgcgtgatccaggtggaatggattggcaacggtgtacgacttgtcgccgggtttcacgtcgtccgtgtcgaattcgttggaatccttgtcgagcagtgggccgtccagcgaggcgggacagtacacggtgacgtgccagttgccgtcgtccatggggatgagcacggtgcagtgccttggagaccgtctgctgcggcatcccttatggatgattccttgataaaggagtttcggggggcgggtaacaaaaacccggaaccgaagttccgggtttttgtctggctcctgcggctgggcttgaaccagcgaccgtccgattaacagtcggatgctctgccaatagacaacgggcaattcgactgccatgtcaggtatggtaatctcgaaccagccagaagatcgataagccaaattacctgcgactgaagtgaggacggaatcatgcgtagcgagttctctggtctgttgtattgcgcgggtgcattaatcgcagtgacctcttgggctcttttcatgttctcgaaagaagtccatcggaaaggccgaacagtatccatcctgagattgcccgtcatttggatactgttcctcgtgagttcggcgccggctctcgcatcatatccggtttttgaaatatactcaggatctatggatccagatgtcctcgatttctacagtcagccgttcatacggctactgccggcggcgacctgcatagtgaatctgtgcgtatcggcatgctgctccatggctcttgtcagtaagcgcagaaaaaccgaacatcgaaaaatctgaaccacagcattcgagatgagatgccatggaaaaaccgctgtttctgctggccttggtgccgctggccgtcggattggtcctgatatacgtcgtgattggatccaaaaaactgggaagagaacgcaaaaggactcttctgcgtgtcttctcggcgctcatggtcgttgccggcgcgttggccatcgcgagacaactcgtatgacgcttcacgctgcggctcggcttcc

SEQ ID NO: 3729 - DNA, 16487 bp, Unknown
  R150_10m  MAG No. k141_11312
acccccgattcggcggcgagagcgccacgaaccgcatcgtctatcgtgcggccgcgggcgaaccgcgcccggtaatcaccggctccgaacgtatcgacacatggcagcccgaaggcgatggcgtgtggaaagccgtaatcctgaacgcattcttcaacggatacaacccgtacgtggaaaccgtattcggcgattggaccgtatacccggacccaaaggtcgaggtacgccacctgggcgatgtgtatctgaatggcaaatccttctacgaagtcgcctcgctggacaaggtgcgcaacccacagcgttgggataccggccgtgacgccgccaccgattccatcgtgccgctgattgatccggataccaccgtgaacgtgtggtgctgtgcggtcgatgatgaggccacaaccatttgggccaatttccatgaagccgacccgaatgcggaacttaccgaaatcaacgtgcgcgagacctgtttctacccgagccgcccgttcgtcaattacattacggtctccggctttgaaatggcgcaggcggcctgcccctacacgccgccgactgccgatcaggtcgggctggtgggcccgcattggtcccgcgggtggattatcgagaacaatcgcattcatgacgcaaaatgttcggcgatctcgctgggcaaggagatctccaccggcgacaacgaatcgacgcgcactcatcgcaagtccgggtaccaataccaaaaagaggccgtctacaaggcgctgcatgccggttgggagaaaggcgtagtcggcgggcacgtggtgcgcggcaacgtaatctacgactgcggccagaatggtgtggttggtcatatgggctgcgccttctctctgattgaaggcaaccacatataccacatcggcaccaaacgcgagttcttcggctgggaagtggccgccattaaaatgcacgcagccgtcgacgcggtggtgcgcggcaaccgggtgcatgattcggtgctgggcatgtggcttgattggcaggcgcagggcaccgtggtggattcgaacgtgttctaccgcaacacgcgagatgtgatgaccgaggtgacccacgggccgattacgtttatgaacaacgtgtttgcctccgagttcagtttcgacgactatgcgcaaggcgcggcgttcgtcaacaatctgttcgccggtcgcattcgtcacaccgccgtcttggaccgatccacgccataccatttcccgcacgtcaccgatgtggccggcgaggcattcgtctacggtggcgatgatcggtacatcaacaacctgttcttggctgtgggcgattccgccaaaccgttgcgtaccgcggatgccgccggtgcggccggtatggcggaagccggaaccgcgttctttgacggctatccgtgctcgcttgcggagtatgaacagctgattgaagaggccggccttggcgatgaggagttgtatcgcagcgtgaagcagccggtattgctggcttcgaacgcctatgtttcgggcgcgaaggccgcttccggcgaagccgaggctgtggtgagtgatgacggctcttcgttggcattgcgcgaaaccgatgatgagctatggatgaccatctcgttgcccgaatcgattcggtcggcgactggaccggtgatctccactgctgatcttggccagccgcgcatcgttgaggagtatttcgaaaatcctgatggttcgccgattatcgtggaccgggatgtcaccggtgccgtgcgcggcgagcgttcggcccgaggcccgttggcggaatatgacgatagggaagtacttatctggtcgaaatgacggaatctgcggtttacggtttgcagcgcgacatcatgatctggttgctggcctgttgaatggccttggcggggtcaatctgccagtgtttggcaggttggcttcgctgaggggtgttgtgtggggtcgttttgccagtgtttggcaggtcggccccgctgagaggtgctgttggagccgggccgccaatgtttggcaaatcagcccttttcggtttgcattggtaacaaattcgatatatggttaaatcaacgaactaaatattgtaagtccatgcgtacctacgcaacgtcaatggagatactgctatgcgcgcacatcgtattttgctgctctcgctctgcctgttggccgtggcctatgccgtcctgctgtttgttgcgccggccgccgcgccaatcggcatcgcactgaccgccgccggtctggtgctggtttcgacacgctatgcgtggcgtgccaagttcctcgcgttattcaacgaagcgtgattgatgcatcacggtgattgactggttcggttcgtcctaggactcccatgcaattcccggccaattcgcctgtcgcattatgtatcgtgcggttatatggagtcatggccgcaaggcctgacaattgaatcttcatcctctcttctcctttgaagcccggcccgccgctgggctttttctttggtcggcatgtcggggcagtgactggtatttttgtgaccgatctcatggcttcagtttcggcgtgtcgttatttccgacgaatcgtatcgataaaattcatgtttcgtatggtctataaaaatgccgggaaatcagcgttgttaccgctcacatttagttaatcgaatgaatcaagtatgccataatccgctcagttgtggggaaaataggcgatatcaaattgttaaatcaaaaaaccaatggtatatttttatgcaggttcggcaagggttgcctgaccaaaaggaagaggaaacaagttcctatcaatgtcgaaaggaattcccatgaataagtggaccaaggtgctcggtgtggttgctgcaaccgccatgctcatcccgctggccgcctgtggcggtagccgtggcacgaccactgccggtggcaacggcggtagctccgacaccgtcaaggtcggtatttcgatgcctgagcagatgctcgagcgttggaagatcgatggcgagaacctgaagaagcagcttgaaggctacggctacgacgtcaccctgcagtatgcagatggcaagaccgatctgcagacctcccagattcagaacatggccaacaacggcatgaactacgtagtcatcgcctccatcgacggcactgcgaccggagctgctgccgagcaggtcgcctccaacggcggcaaggtcattgcctacgaccgtctgatcatgaacaccgacgccgttgactactacgccaccttctccttggaggatgtcggcaagatgcagggcgagtacatcgagcagaagctcggtctgaaggatggcaagaagggcccgttcaacgtcgaactcatggccggttccccgaccgataacaatgcaggctactacttcaagggcgcttgggacgtgctcggaccgtacttcaagtccggcgtgctgcagtccaagtccggcaaggttccttcctctgctgatgattggcagtccatcggtatcgataactgggatcgtcagaaggcccagaacgagatggagaaccgcatcaactccttctacaacgatggcaccaagcttgacgccgtgctcgcccagaacgacgccgaggcaaccggtacctacaacaccgtagaggccgctggctgggactactacccgatcatcaccggtcaggacgccgagaaggccaacgtgcaggccatcgtgcagggcaagcagtccatgaccgtctacaaggacacccgcgagctggccaaggccaccgccgaaatgatcaaggacatggtcgatggcaaggatccgaaggctcctgacaccttcaacaacggcactaaggatgttccgtcccagctgctgaccccggtcaccgtggacaaggacaacctcaaggaaatcctcgtcgacggcggctacatctccgccaaggatgctggcctgtgatccgcaggatcgctgattcgattcatccaacggcctaacggctaacagataaggggggcgccgcgctgcgtggttgcggtacggtgccttcatcatgcacaggggcattactatcggaggaggtaactgtggctacgaacggtgacgtgattttggagatgcgtcatatcgtgaagcgtttcggcccggtcaccgcgttgaacgatgtgaatatcatggtcaagaggggccagatgttctcgatctgcggtgagaacggtgcgggcaagtcgaccttgatgaacgtgttgtcgggtgtgtacccgtacggcacgtacgagggcgacatcgtgtacaacggcgagacgtgcaagttcaggacgattcgcgattccgaggagaagggcatcgtgatcatccaccaggagcttgcgctggtgccgtacatgtcgatccaggagaacatcttcctgggcaatcagaagaggaagggcatcgcaatcgatgccgacgagcagcgccgcgtcgcgtacgacgtgatgaggaaggtcggtctggacgagaacccggacaccctgatttcgaacatcggtgtcggcaagcagcagttggtcgagatcgcgaaggctttgaccaagaacgtgaagctgctgatcctggacgagccgaccgccgcgttgaacgacgaggattcgaggaacctgctcgacctgatcgacgggcttcgccgcgagcagggcatcaccgcgatcatcatttcgcacaagctcaacgagatcgcctattccgcggacgcggtgcaggtcatccgcgatggccgcaccatcagccatatcgacatcgacgcggcccacccgctggaccaggatgtgctgatccgcgacatggtgggccgtccgttgaccaaccgctacccggtgcacacctccaggatcggcaaggagatgttccgcatcgaggactggaggatgcgccacccgctcgacgaggcgcgtctggtctccaaggacgtgagcatcaacgtgcgtgccggcgagatcgtcggtctggccggcctgatcggcgcgggccgcaccgagaccgcgatgagcgtgttcggccgccagtacggcaccaacgcgtccggcaggattttcgtggaaggcaaggaagtcaagttcccgaccgtgcgttccgccatcgaccacggcgtggcctacgcgaccgaggaccgcaaggtgtacggcctgaacctcatgaagacgattcgcgagaacacgtccctggccagtctgaaggaactgtcgaacaggctgggcgtggtggacgagacccgtgagaagcggacggccgagaagtaccgcaaggagttccgcaccaaggcgccgaccatcgagatgcctgccggcaacctgtcgggcggcaaccagcagaaggtcgtgctggccaagtggatggccaccgacccgaaggtcctgatcctggacgagccgacccgaggcatcgacgtgggcgcgaagtacgacatctacgagatcatcgaccaattggccgactcgggttccgcggtggtcgtgatcagctccgaactgcccgagctgctgggcatctgcgaccgcatctacacgatgagcaacggcgtgatcaccggcaacttcgacgccaggaagaccagccaggaggagctcatgcgctgcatgacctccgccgtcccgctgcccaaggagcgggccttcgcctgacccgttcgttgaagaacgttagtttttgaaaggatagtttccgaaatgtctaccgcaaccgtaacccccgcagccaagaagggcggggacgaacagagcctcaagaccctgctgttgggcaacatgcgttcctacggcatctacctggccctcgtgctggtgatcgtcgtcttccagatcctgacgggcgggcgcctgctgaacccgaacaacgtggtcgccctgttccagcagaacgcgtacgtgctcgtggccgccatcggcatgctgatggtcatcatcgccacgcacatcgacctgtccgtgggctccgtggtcgccttcatcggcggcgtgggcgccctggccatgaagcacggggtcccgtggtgggccgcgatcctgctcatgatcgcgatcggcctggccatcggcgcgtggcacggcttctgggtcgcctacgtcggcgtgcccggcttcgtgaccaccctgggcggcatgctcatcttccgaggcctggcgaccgtggtcgccggcgagtccatcccggtgtccaacgcctcgttccgcgccatctccaaggactacatccccaccatcttcgtcgggccgttcgccctgaccgccctgatcgtcggtctggccgccatcgtgctcgtggtctggagccaattgtccaagcgcgccagggccatcaggaacggcctgcccgcccagcccatgagcttcgtcgtcctcaagtgcgtggtcgccgcgctggccatcggctacgtgacctacctgctggccatgtccggcaacgccacccagggcggcatcccgatcgtgctcgtcatcatcggcgtgctcgtgtgcgtctactacttcgtcctcaaccgcatggtcttcggccgcaacgtgtacgccgtgggcggcaaccgcaaggccgccatcctctcgggcatcgacaccaggaaggtcgacttcgagatcttcctgaacatgggcttcctggtctccatcgcctcgatcatcaccctgtcccgcctggcctccgcctccgcccagaccggcatggagttcgagatggacgccatcgcggcctgcttcatcggcggcacggccgtcaccggcggcatcggcaccatccccggcgccatggtcggcgccctgatcatgggcgtgctcaaccagggcctgtccatcatgggcgtggacgccgcctgggtcaagaccatcaagggcctcgtcgtcatcgccgccgtcgcctacgacctgctctccaagaaaaagaagggctgagccaaactcggcctccgggcccgcccggtggccacggggatgggaacctgggttccattcctcctccgaaagggacgctgttgcacgcagcgtcccttttccgtttgtcgcgatggatggatcccggtgtacgttcttcgcgaaatcagccctgacttggggtgtagacaatatgattcggcgatgtgcctcagcggatatgtacggccaatgaaaaacgggataccgatgtcgatatcccgctttcagcgaataggtaaggccggagcttacttcttcttgactttcttgacgcgcttgggagcgggagccgctttcttgggctcgaagaacggccacttgtgcaaagcccaggcgtgcagcgcgggaatcttggcaacggcgaagccgatgaccagaccgattaccatggcccaggtctccagatcatggcctgcgaccagcaagccgatgaacactatggcaacgatgaagctcaccatctgcgaggcctttgactgcttggcggtcaccagatcggccttcatgggaacgagccccagaaacaggccgcaaggcgcgcatatgacgcccagcaccacgctgatcacggttgacacggttgttacttccataatgttcctttgctgaagtgggatgattcgcttgattcgggcgaacgataacgatggttactggcgattagtggttggcggtgcatcggcatccgtggttgcgacgtcggtttcgacatcgtcatcggtgtcgtcctcggatccctcggcatctgcggtgtcggtatcggtaccgtcaggcgtatccgcggcgtcatcgttctccgcatcctccttgctgggttgacgccaccacaatatcaatgcgttggcggcgcagtagacggcggcaatgccgatgcataccaaaaagatgatgtttgaggtgctgatcatcgtgccatcggccattgcttctttggcggattgccatatccaaatcacgcatgcgacggcggtcagggcgtacagcatcatacgggagcggtcgttcatagaagaatctccagacttgttcaaacgacttgattatagccgtatttgtggattgcgtgggaaacgaaaaatgccgccatgtgtgcttcagcgaggagcgcggtataacagcggctcttcgcgatgcttgccatggcggcattcatcaggaatcgttattcagttgttatctcatggattgtgctggcagcgtatcagccgcgcgccttggcatacgcctcgtacacggcttcggtgggctctccggtctccacgccctcgatggtgagctgccaggtcggaggttcggcctcgccggacagcacccaggcggcctgacgggcggcgccgatggccacgtattcgtcggtggccgggcgagtcacatccatgccaagtatcgagggagccagcgtgcggatcgccacggacttcgcgccgccaccaatcagcaggatacggttgatctcggcgcccagcgaacgaatcagctcgaggcagtcgcgctgagagcatagcaggccttcgacgaacgcacgggccagattctccttggtcgtgttgtgcagggtcagaccggtcagcgaggcggtggcgtcagggcggttcggcgtacgctcgccgtcgaagtacggcaccagggtgatgccgccggcacccggctcggccttaaaggccagttcggccagctcgtcgtagtccacgccaagggcggcgcgaccggcgtccagaatgcgcgaaccgttgatggtgcaggcaagcggcagataatgaccggtgcagtcggcaaagccagaaatcgctccggtcaggtcgtacaccgggttttcagcgatggccgcggccacgccggaggtgccgagcgatacggacacatcgcccacggccatgccgaggcccagcgaggccatggcattgtctccgccgccggggccgatgatgcagccgccttcaacgtccttgccggcaatggcggggtcggccttgacggcggctgcctcacgcgggcccagcacggtgggcagcacaatggcgtcggcgtgggccttggcggcttcctcgccctcggcgggggtcagcaccatggcgatgagatcgcggcggtactcgtcatgcgcggcatcgtagtaaatggtgccggaagcgtcggaacggtcggtgaacagggcttcgagatgagcgtcctcgccctcggccaccgggccatagccggcgatacgccagctcagccaatcgtgcggcagacagacggcggcaatcttcttggcgttctcaggctcgttctcggccacccacgccaccttggtcagcgtgtaggaagcgacgggggaggatccgacggccttgacccagcgctgcttgccgcgggcggtcacgtcgtccggttcgtcgccctcggccggagttgcaccgagcttgtcgatcagggcggcggcctgcggggcggaactggtgtcattccagagcatcgcatcgcgaatcacgttgccctgcttgtcgagaatgaccatgccatgctgctggccgccaaccgcgagggccgcgacatcgtcaagcccgccggcctgctcggcggccttggtgaaggcctcccaccagaattccgggttgaccgaggtgccatccgggtgcttggcctgcccgaaccgaacctgttcgccggtggcggcgtccgtaatgcggacctttgttgattgagttgacgtatctacgccggcaaccagtactttcgtcatgcattcctcctcgatgagggtcgcgcttgcaagtttcggcgcgccacaaccaataagttagacgattaaactatactgtattgcagtgtatgattgcaaacggaaacacgcgagggtgcgtatctggttcaatcgtttgacgcacaatatcattgtgcgatagacggatgtgagcgcctgtgcggcgttcgagactaggggtgcaaggaggtaggagcctatggcaagtctacgcaggatcaatcaggaggatctgcgcaaccataatttgtcggtggttctcgacactttgttgcgcgcggagaaacccatgagcagggccgacttggccaaggaaacgggcctgaccaaggccacgctttcgctgttggcctcgatgctgatcgatagtggcgtggtgcaggaaggcgagccggtcgtctccaccacatatgggcggcccagcacgccgctggagattcatggcgggtccatcgccggcatcggcctgcagatcaacaccgatggctacggttgcctggcactcgatctgaacggcgacactctcggtcaggagtgggtgagtgaggatatgactggcactgacccgtacgagatcttcgccaagctcgatgcgatgaccttcccgttggaaagccgactcaaacgacgtggctgcaaagtggtgggagccgggcttgcgctgccgggcatcgtcaccgacgacatgtggctgttggtggcccgcaatctgggttgggaaaacgtcaacctcacccggttcaacgtggcacgccggctggatgtggtggccggtaacgaagcgaagatggccgccatcgctcagattccggggtatgccaccgaacgtgcgtccttcctgaatgtggtggatcgcacggattcctttatttacctgtctaccgatatcggcatcggcggcgcggtggtgcgtgacggcgaagtggtgatgggctcgcacggattcgccggcgagatcggccatctgtccgtggcgatggatgggccgttgtgcagctgcgggcgccacgggtgccttgaggcgtttgcgggccgtcgcgccttggtcgaggctgccggcattgccgaggatggggatgccaccagcagcgaggccatcgatacattcctccagcgttggcgtgcgggggatccagacgtggccaaagtggtcgatcaggccgctgatgcgctggtttccgccatcgcttccgccgtgaatctggtggatgtcgatacggtgctgttgggcggactgtggacgcacttcggcgacgagctggccactgtgcttgaaggccggctgcgttcggaaattctgggatacccgaatgtgaagatccgcgtgttcgtgccgccggtggcgctgcatccctcgctatatggcgcggccgaaatgggcttgcgacggttcatcgagaacccgttggggtacatgggggagaagtagcgccgggagatgccgcttgttgtgctggcgggtgcatggcatgggtgcatggcgcgtgtgccggcgttggtgggttcatgctacactttgcaagttggctgttttacgcagcgaacgtggggccgtagctcagtcggttagagcatgcgactcataatcgcccggtccagggttcaagcccctgcggccccactcttttgcgtcgcctcctgcggcggcacagcgcgtcttcacgtccagataggcgcgtacaatcccttaggttccggttcacgtcctgccataggggcatgacgacccgggtcccccgaatccataggagacgtaaaatgcagcagggtatccatcctgattaccaccccgttgaggtgacgtgctcgtgcggcaacaccttcgtgacccgcaccgctggcaaggaagatcacatgttcgttgacgtgtgctctcagtgccacccgttctacaccggcaagcagaagattctcgacaccggtggccgcgttgctcgcttcgagaagcgctacggcaagaagagcaagtagcatacttcacgccagtccgattcgattcggcatgctccggcatatccgatcgaggactggcgtttttgtattctttgacatttttttgacctgcacaaccgaatagacaccaccgtacgaaagaaagcgtgttatggcagacgaacagttcccggcggcggcaaccgcgcttgaggagtaccagtccatcgaagaacagatggcgagccccgaagtcgtgtccaacccggacaagctgcgcaagctgggccgtcgtcacgccgaactgggtgccatcgtgggcgcctacaaaacctggttgcaggtgaaggacgatctggcagccgctcaggagatggccggcgaggacgccgacttcgccgaggaagccaagcgtcttgaagccgaactgcccgacgccgaggagaagttgcgtaccgcgctgatcccgcgtgacccggatgatgcacgcgacaccatcatggaaatcaaggctggcaccggcggcgaagaagccgcactgttcgccggcgacctgctgcgcatgtacacccgttacgccgagaagcgtggctggagcgtgaacgtacagtccgagaacaccaccgagctcggcggcgtcaaggacgtacagattgccatccgcgccaagggcacgcccgctcccgaagacggcgtgtgggcttcgatgaagtacgagggcggcgtacaccgtgtgcagcgcatccccgtcaccgaatcgcagggccgtatccagacttccgccgcgggcgtcatcgtgttccccgaggccgacgaggatgacgacgagatcgagatcgatccgaaagacctgaaaatcgacatcttcatgagctccggccccggcggccagtccgtgaacaccacatattccgccgtgcgcatgacccacctgcccaccggcatcacagtgaacatgcaggatgagaagtcgcagatccagaaccgcgccgccgcgctgcgtgtgctgaagtctcgcctgctggccatgaaacatgagcaagaggccgccgaagccgccgacatgcgtcactcgcaggtgcgttcgcttgaccgctccgaacgtattcgcacgtacaacttcccggaaaaccgtattgtcgatcatcgcacgaattacaaggcctacaaccttgacgccgtgctcgatggcgacctgcaggccgtcatcgattccgacatccaagccgacgaagccgaccgtctggccaaccagcagtgatagccgacctgattcgtcaagccgccgcgcagttgcgcgaagccggcatcgagacgcccgaacatgatgccaaactgttgctggccgaggccgtggacgctgagctacgcgatatcgacaaggccatgctgatgggggagggcctcgattcgctggcccccgccggcgggggctgtcgcgcagcgactgggggtggtcaggccgaccccgtcaccaatatccttgccgccttccacgccatgctttcccgacgcgccaaacgcgagccgctccaatacatcaccggccacacgcctttccgctacctcgacctgcaggtgggccccggcgtctttatcccgcgcccggaaaccgaaaccgtagtccaggccggtcttgactggctgacccggcacagcatgatccacccgcgcatggtcgacctgtgcgccggttccggtgccatcggcctgtcgatagtcagcgaagtgcccggcagccaagtatgggccgtcgaattatccccgcgtaccgccgaatggacccggcgcaatctggcggtaaccgcgaaacgatacccctccatcgcctccaattaccaactggaagtcgccgacgccacgtcactggccacgctggcgcaactcgacggcaccatcgacatcgtcatcaccaacccgccctacgtgccacaaaccgacatccccgaacaaccagaagtacgcgactgggacccggaactggcgctatacggcggttcggcagacggcacgctcatccctgaacgcattattgagcgcgcctggcgcctgctcaagcccggcggcgtattggttatggagcatgatctcacccaaggcgagcgattagtggcctatgccaaggccacaggtttcgccaccgcctccaccggcaaagattggaccggccgagaccgctatctcttcgccgagaagtagccacaggcgcggggccgccgctgctactgcgcgtaatactgcagggcggaggtgtccgcgtccgtgatttcgcgaatcggacgggccggattgcccacggccacggtgtgcggcggaatatcgcgcgtcaccaccgagccggcaccgatcacgcaaccctcgccaatcgtcaccgggcgacaatccagcacagtgaagttgaagttggcgaacacgcgctcgctggcgcgcggtatacgcagttcgacgggaggcatggtggtggattcagcattgattccgctcattgaacactcctgtaatttcgcgaaagagcatggacgaactcattgtatctacggtctgtgcgtatggggcgaatcggaaaacagcagtacggcaaacgagcgatgatgaactatgcaagtcggggcgcaatggtgcaatggtagattgtgaatacacaggcgaacggaggtgtcgtgagcgtggagggcggaacaacgctgaaagtcacggatgaatcgctggcacaagcggcgcgtgtcatccgggatggtggattggtcgtcattccaacggatacggtatatggagtggcgtgcgatccgcgtaataaggccgccatcgaccgtatctaccggctcaagcgtcgcccacgctataaggcgttgcaggtactgctcgcatccaccgaccagcttgatgaactcggtctcgacctgccgtctccactgaatcgtttgtcggcggcgttcctgcccggcgcgttctcgccgattgccgtagcccggcccgactgcacgttggagactttggccgacaccgccgatggtcgccccggcacgcagggcatccgcatccccaattcggcgctgtgcctcgcgattctcaaggccactggtccgctggccgcgtccagcgccaaccgttccggcgacgaaagcgcacagactgtccaggaggcggttgacgcgttcggcaacgaagtcgacctgtatctggacggcggtcccacccaaggccatgtctccagcaccgtcgtcaaagccgatccgtacgcgcgcgacggcatcgagatcctgcgtgaaggcgtcatcgcccaaaacgtgattcgcaaggccctccacctcaacggcgggggactcggcgcatgagaatctacctactgattgccgccatcgccggtggcgtcacctggctggtgactccgctgattcgccacgtcgccatcgaaatcggtgcggttggcgaggtgcgtgcccgagacgtgcacaccattcccacgccgcgcatgggcggccttggcatgctgatcggttttgccgtggctaccgtattcgccagtcggctgccttttctctcgggattgttcaacggcaattaccagatgtgggtgattcttgccggcggcatcatgatcagtctgctgggcatggccgacgacctgtgggatctcgattggatgctgaaactcgccggccagctgctgatttccgtattcgtggcttgggacggattgcagatcatctcactgcctttgggtggttcgctgattaccgcctcgccgagtctgtccatggcgatcaccgcattcctgatcgtcgcctcgatcaacgcggtcaatttcgttgatggcctcgatggtctggcggccggtatcgtggcgattggtggcatagcgttcgccgcctattcgtatatcatcgcccggtcttccccgagttatgcttcgttggccacgctgatcgacgtgatgatggtgggtatctgcgtgggcttcctgctgcataattggcatcccgccaaactgttcatgggtgattccggttcgatgctgcttggctatctcatcacctgcgcttcgattgtgatgaccggacgtcttgacccggcctcgattcatgccagcatctatctgccggtgttcatgccgattctgctgccggttctggtgttgttcctgcctgtgctcgacatgtgtctggcgattgtgcggcgtttggccaaaggccagtcgcccatgcatccggaccgtatgcacctgcaccatcgcatgctgaagatcgggcattcggtgcgtggcgccgtgctgatcctgtggggatgggccgcgttgatcgcattcggttcgctgacgattctgttcttcaaagcgcagcacgtggccgtgggcatggccatcgctgtggtggtgctgaccatagccacgatgtacccctatctgcggcatcgtattcccgagatccaagccgagaacctgacgttcgaatccgcacgtaaaaacgcgcagcatacagtgcctaaatcgcagtctgcagtaggggagagccgggattcgattggctctcaggcagcggattcgatgactgattcgcctgcaaattcgcgggactcgcaggtgggtgaggtgcaggacccggcagcggataagtgagcgctcacaagcgtgtgtcgtgaaggtcagcgcattttcatatagtgtttacatggctacaaaccttgatgaattaaacgcccagtcggcgtatgctccccttcccccgattttcgccaagctcggccttgcctatgacgatgtgttgctgttgccgaacgagacggatgtcattccctccgaagtggacaccagcactcatctgactcgcaagatcgtgatgaaggccccggtcctctccgctgccatggataccgtgaccgagtccgagatg

SEQ ID NO: 3730 - DNA, 3282 bp, Unknown
  R150_10m  MAG No. k141_11550
gcgtgtcagacttccgatgacccttggccgtccgttcctgtttcgccacattttagggggattcatgagatcttcaccgacactcttgatcatggataacgaccggctggcattgcgattgctttcagccagtctcaaacgcctacttcccggctgtacggttcttgcaccagtcgatactggcgctgaggccatagccgtctgtacttcgcatcactgtccggatctgttgttggcggatgtctccatgtctgatatcaacggattggtggtgtgccggacgattagaaaagagaattggaagacatccgtactcatgatgacatcattcagcgtcgccgaatatgctgcagaagcggtggcttcgggagcccagggaatcatacataaggacaatccgaaaacaatcgccgaggctttgctgcagataaaggaaacaggaatctgttctgatcgttttctgaatgcccacgattcgtttttgcggcagaagtcagagaagaacaaggatctgtcccctcgtgaaatggaaatcgttgatcgatgggcgcgagggagatcgatgtccgacatagcggaggaattatcgatcggtcagaccacggtgcggacccatcttgaacatgccgcgtccaagctgggggtagcgaacaaccgtgcattgatttccgcctggatgcatctcaatcgctgatgaggatttccatgaatacggcgtttacgtttccgtcaaaaataattcggcgctatgtggcacatccctgcttgtcccttctgtcgctgctggggctgtctcttgccctgatggagataatccagattggtcccatgcctcttctgccggcaatgctctatggagtgcttgcggtttcctttgtccttcttcctgccattggaggccaagcatgttgggccatcattgttgcaggttccgtgatctccatctccctcactcaggacagtcccttcgttatcagcggcatgctcatcgctctcggcattcttgcgttctccggaaccgtgcctgaatggctgatcgcaatgctgatttgttcctgtacgtatatagcgcgaagcgttatggtggagaacttcaatgttttcgtttccgtgtcggtcacggtcatgttcttggccagcttgcttgccggcagattggtagcgcttcgccaacaggcttttatcagagaagagcaaaggctgaaattgcagattgagcttcagcagcttgattatatgaggcaaaagaatcgtcttgcgatacagatacatgattccttgaccaataatctttcggatatctcattaatggcccgggttcatatcgatgaaaacatacctgacagcgatgattgggcaatcgttcttgaacatagtcaagaggcgttcacgcaagtgcacgacatcatagacatcctttcctcggaagacaaggacgcgaaatcagaaacgacgttcatggttgaactgcgtaatctgctggatgaaagatgcagccatcttcatgcgctggggtatgacggaaatacggccatcgacggatgctgcatcaaagcttcgccggaagaaaaggaagaagcgttatccctgataagagaactctgcaacaacatacagcgtcacggttccccacgcaatggctcgttcgagttgctggtcaagctatcaccatcgtcaatggaaattagcgagatgaatgatattgcagccggatcggcgctgactgcattcgaacaatcgggaaggggcctttcactgcactcaaaacgaatacaggaaatgggaggcgaacttaactatagaagcgatgatggattgtgggtgctctacgccaaaattccgctgagtcatatggagacaacaaaaacttgaaaccaagtacagcgagaacttttaaaaaacaacaaataatccatcacagattaatactccagtatgacgaatacagagaacgcccgattttttgcgcactttcggattccgggtctgacgtaagagggcatggcccgcgtcctgtgtacgattttcattcgccaaaacaaaaaaccgcgattggaagccaggagacggaaccaagaccctcgaacatcatacagatcgaccagaacctgctcgagaccaggctcgaccgcttggtcgccgaaaaggtcgccgagccattgaacgcgatgctcgacgccgaggccgacgagatcgccaacgccgccaagtacgagcgcaccggggagcggaaggcgtacagggccggccactacgaccggagcctgaccgccaaggccggcaggctcgcgttgaaggtgcccaaactcaagggcgcggtcttcgagtccgcggtcatcgaacgataccggagacgcgaggagagtgtcgaggaggccctcatcgacatgtacctggccggcgtgagcacccggcaggtggatgacaccggccaattgctgtggggcggcaggatgccgtcccagaccctgagcgacaagctcaagaaggtgtacggggagatcgaggcgtggcgcacgaggccgttggaggacgagtacccgcacgtgttcatggacggcgtgtggcacaagcgttcatggggcgggcacgtggagaacgtcagtgtcctggtcgccatcggagtcaacgcggaggggcaccgcgaggtgatcggcgtggccgagggcatgaaggaggacagggacggctgggggcagttcgtccgctccatgatcgaacgcggcctgaagggcgtgcgcctggtggtcggcgaccggtgcgccggactcgtcgccacggtcggctcgatgctgcccaaggcgagataccagcggtgcatggtgcatttcatgcgcaacgtgctctcgaggacgccgccgacacaccgcgaatgggcgtccgccgccctcaaggccatattcgccatggaatcccgggaatccgccctggccaaggccgaacaggtcgccacggagatggaatccaggaggctcaaggccgccgcgaactgcctgcgcgagggcgtcggcgagacgacgacctacctgctggacgagttcccggacgggcaccgcaggaggatccgcacgaacaacatgatcgagcggccggacagggagatccgccggcgcacgcgcgtggtgggcggcttccccgacgggaacagcgcgttgatgctcatatgcgcccgcatccgtcacgtcaccgcgaacgaatggtcgacccgccgctatctcgacatgtcccggctcggtgacaacctcgtggaagcgaactgactatcgcgccatggacggccac

SEQ ID NO: 3731 - DNA, 8186 bp, Unknown
  R150_10m  MAG No. k141_11827
cgcacgtatgtcaggaattcctcggtgatcgaggagagggaaacttcggtcagctcgagtttgttgttggcgatcatgccgagcaaggcatcgaacggaccggaatagacttcgaggttgacttggaagccggaggtggcggattcctccgtgctgatttcggcttccgcggagctcccctcagtctcgctacgcgagccagcttccctcagagaggggagccgagaaagggaagtctcattcatcgtttatcgaaacaatcgttacgccacgatgccgcgagcaatgagctcacgtgccacctcacggtattcctttgatgtcttgtgctcaggtgcatagaccaccacgggcgcggcggcaaccgtggaatcgggcagtttgatggagcgggagatgaacgtgtggaacaccttttcgctgaacgcctcgtaaatgcgctggcagacctcttcgcagtgcagtgtcttggtgtacatggtgatgagcacgccatccacttccaatgcgggattgatgcgggactgcactttttcgatggactgcataagtagggccacgccacgcaaggcgaagaattcggcggccacgggaatgatcacgccatcagctgcggcaagcgcgttcacggtgagcaggccgagcgatggctggcagtcgacgatgatgagatcgtattccgacttgagcttgcgcagcacactgttcaggatctgctcccggcccacttctgtgaccagttggacctcggcggcggacaaatcgatgttcgccggaatcacatcgatgttctcgaatgcggtgtgctgcaccacatcatgtgggtccacggaaatatcgaacagcgcggtgtaaatcgtgttctccacggtattcgcgttgacgcccagtcccacagtggcggcgccctgcggatcgaaatcgacgataagcacgcggcggccatactgggccaacgcaccggcgatattgatggagctggtggtcttacctacgccgcccttctggttgcacatggcaatgacgcgcgccggaccgtgctgttgcagcggttcgggtgcggggaaggtttcgtattcacgtccaagcaaatcggtaggcatactgtctaccttatcaacatccgggttcgctgggggtgcaacgacatacgttcccgccataggcagcgttccttgacggaatgcgctgtctttatcgcggatgtctcgccagtcgtccatcgttgcccctcgccccctttgccgggaatacctgctcgcctatcctaatgtactcgccgggctcgcctcggaacaccgttttgcagcgggcattccagtgttccgaggtttatggatctcgtctcgtactatgtcgatgcgcttactcggtgcgcagtgcggtggccgggtcttgcttggctgccttgcgcgagggaatcaggccgccgatcagcgtgagcaccacgcttaggatcaccagcaccacgccgccggtcaccggcagggcggcattgacgtccgcattgccgatgaagtgatgcaacacggcgttgatcggaatatcgagcagcacggtcaagcccacgcccaacaggccggagcataggccgatgatgccggtctccgcattgaacacctgggacacgttgtgcttcgaggcacccattgcgcgtaggatgccgatttccttggtgcgctccagcaccgaaatgtaggtgatgatgccgatcatgatcgaggaaacaatcaacgagacggacacgaacgcgataagcacgtaggaaatcacgttgacgatggtggtcaccgagctcatcatgagccccacataatccgtgtaggtgatcttgtctttcttcgagacggtgttgttgtagtcggtaatcgcgtcggcgatgtggtccttgtcttcgaagctgtcggcgtagacgttgatcgagctgggcgcgtcacgactcaccacaccgaatgcggcgaggttgtcgtcgtaggtgccggtcgacacgtactggtcgtagatcgcgacaagcacgtcgttcgaagccgtggcgatatacgagtcgaaactgtcggcgagctgctgttcgctcatcgcggccatcgcgtcggcctgatcgccggcacccgccgcgccagcaccagcaccagcaccagcaccagcaccagcggcatccgatgcgcccgtaccggaccgctgcccggcactcatcatcgacttggccatgttcgccttctgcgtcacgcccagcgaaaccacgtaggtgcgcgcgtcggccgccttggtggcgtcgtccgagggcgagaacgtcatgccgttgagcacgttcgtgttcgggttggccttctgatcggtgacgatggcgctggaggccgcacggtcgatcagatcattggtcagagcgcgcgtgtatcccacgccagcggccaacggtgtggccgaagcatccttcttcgccttgacgacgcccaccaccttgagtttggtggccgtttcgaggcgctgttcgattacatccttgtcgttgccgatgaatcggtagtggccgtcatcgcccttgacgtactggtcggatgccggaatcatgtacagcgtctggtcgagcgccttagcatagtcgatcttgtcttgtggagtgctgaccttgtcgccggcgttgagcttggacatcatctcgtggtagtcggaggcgggcagcaggccgagctcgtacagcgtggtcagcggcacgctgttgttgtcgtcgagcaccagcaccacctcgtccttggacttcggccatgaaccgttgaccacttggtagttgtcggtgatgaccttgcctacgagcttgctgtcgtccgctccaggcatgatctcattgaacgagtcgggcgcggcgttctcatcggttttgccggtcagcatcgacatctgctgcgaggtgatcgacgaggtgccggacatgccggacgagcttgtggacgccatctgcgaggccattgaagtggagtcgctggcaccgatcgtcacgccgtccgcattgaccagcgtgccatcggggtcgtggtcgaacacggagaatttcacgtcatacgtgtactggataccggcggaacccacatactggtgaatctcgctcttggaattatccaggtatttcttgaagcgggtcaggttgttttcggtaatcgaactggtcaggctggatgcctgcttgacgctgcggtcgtccgggtagatgccgtcggttctgtgcgtcttgccgccgtatccgtcatcgccgcccatctggccgcccatcatgctgctcaggtcgaaggtctgggagtcgatggtgatcgggtaggcggtcatcgtgtcacgctggatgtcgctgatgtatgcgttcacgccagtcgacaccgatagaatcagcgcaatgccgatgatgccgattgagccggcgaacgaggtcagcagggtacgcgccttcttggttttcagattgttgaagctcaacgccagcgacgtgacgaacgacatcgacgcgcggcccatcgtcttgtgcacggccggctgttcggccgtctcatccacgacaaacgggtcggagtcggagcggatcacgccgtcgcgcaggttgacgatgcgcgtggcatattgttccgcaagttcggggttgtgggtgaccatgaccacgaggcggtccttggccacgtccttgagcaggttcatgatctgcacggacgtgtccgaatcgagcgcgccggtcggctcgtcggccaggacgatgtccgggtcgttgaccagtgcgcgggcgatcgccacgcgctgcatctggccgccggacagctggttcggctttttattgatgtgttcgccgagtccgaccttctccagcgccttgcgcgcacgttcgcgacggtcggccttgccgatgccggaaatcgtcagcgcgagttcgacgttcgacagaatcgtctgatgaggaatcagattgtagctctggaacacgaagccgatggtgtggttgcggtacgaatcccaatcgcgatccttgtattggcgcgtcgagatgccgttgatcaccaaatcgccgtcgtcataccggtcgaggccgccgatgatgttgagcaaggtggtcttgccggaacccgagggacccagaatcgcgacgaattcgctgtcgcgtaggttcaggctgactttgtcaagcgcctgttgaacgaaatcaccggttttatagcgcttcgagatcgatttgatctgcagcatgaatacctcttcctggctgacggttcgctgttatgtactgtattgtcacgccttgaatttccggccgactttggtgctccccccccccgccgcgattccgctatgggcggacgcgtcgcaaaatggtgtgtctcaccgcgctctggggtgtgaggtcagatacgtttcgatcagggtttcggggcttacgtgcgtgtagatctgcgtggtggtcacgctggcgtgcccaagcagttcctgcacggtgcgcacgtccgcgccgccttggatcaggtgcgtggcgaaggaatggcgcaaggtgtgcggatggagtggtttggtgatgccggcccgctccccggttgctttgacgatttcccataccgattgccgcgagatgcgcttgccgcgtttgttgagaaacagtgcgcgtctctcgggaatcttggcgctggagcgccgttccagctcgccacgccccgcattgaggtatgcggtgatggcccggcatgcgtagctgcccaatggcacaagccgctgcttggagcccttgcccatgagtcgcgcgatgtgctcgtccaggtcgatgtcgtccagattcacaccggtggcttccgagacgcggcagccggtggcgtacatgaattcgagcagggccttgtcccgcaataccaccggatcggttgagccgccggctgccgccgcgtcgagcagacgggttacctcgtccacggtgagtacgtcaggcagggtgctggcacctttgggtgccttgactgcggcagaaacgtcggcagtcaccgcgtgctggccgagcgcgaagcgatggaattcatggatcgaggccagtcttcgggctttggagcgggcggactcccccgcctggtcaagggcggcgatgtagtcttcgacgtcttgtttggttatggcgtccggttcgtggatgccgcgggtttcgagccaatcaatgtatttggcgatatcggattcgtaggcggtgacggtggccgtggcgagtcctcgctccacgccgatgtggacgaggaactgctcggtgagtctggtgaatccgttggtcatgagtttgtcctctcccccacccgctgcgcgggagccccccctcgtcagagggggggctaataataggaaaccccgctcggaagcggggtttctagtgtgaagtcacgacttcaagcaatcaggcctcaaccggagcgttgacgtcctcaggcagggcggccttggcggcgtccacgatggtcttgaaggtgttcgggtcggagacggcgatctcagccagagcgcgacgatccagctcgatgccggcgagacgcaggccctggatgaagcggttgtaggtgatgccctcagcgcggacggcagcgttgatgcgctggatccacagcttgcggaaatcgcccttgcgagccttgcggtcgcggaagttgtagttaaaggagtgcagcagctgttccttggccttgcggtacaggcgggagcgctggccacggtagccggaagccctctcgagaacaacgcgacgcttcttgtgggcgttcactgcgcgcttgacacgtgccataatctattcctcagctttctaaagtcttattatttccgggtaagccctatgctcacttctgcagaagctggtgcagcttcttggcctggccgccgcgcagcacatcgtcggcggacagttcacggcgcttgcgagcggacttgtgctcgaggttgtggcgcatggcggaaccgacatgcttcaccttgccggtgccggtgatcttggcgcgcttggaagcggcggaattagttttcatcttcggcattgctgccctccttgctggtttgcttcttgtcggaagtcttctgagaaatcgcggactgcgcgtcggccgcggcctgagcctgagactcctgcttggccgcgagacgagccgcctggcgagcctgacgctcggcgcgggactcggcgccacgacgacgctgctcggactgggtgtggaccttcttgcccttcggcgcaagggtcatgatgatgttgcggccctcctgcttcggcttggactcgacggtgccgtattcctcgacatcgtcggccagacgctgcagcagttccacaccaccaatcgggcgggagatctcacgaccgcgcaacatgatggtgaccttgaccttgtcgcctccgttaaggaagcgggtcacatggcccttcttcacgtcgaaatcgtggtcgtcgatcttcaggcggaaacgaatctccttgatttccgcggtgctctggttgcggcgagcctcacgagcgttgatcttctcgttgtacttgaacttgccgtaatcaatgagcttggcgaccggaggcttcgcgttcggggccacctcgacgagatcgaggtttgcctccttggccaggttcagcgcgacggaagtcgcgatgacgcccacctgctcgcccttcgggccgatcaggcgtacctgcgggacgcgaatctcgtcgttaatacgtggttcgtcgctgatgatgactccaatcctctacttcaattccgtggcggggcctttgctggagtcctgttcaatgctttgggttcatggcaagccaaaaccagcgccaatatgcgctcatcttctgcagacgcatatcagttctttgcgtcattcctgattgcgcgttgtatatcgcaatcgctaggctgtttgccttgaacccgaggccttgaaaagcttccaggtggggttgccccgctttcttgatttctcaagccaaataggaatcttaccacatgcccggacattcgcggaccgtgtgtcgatgggtggataccggctacagtaggcataatgactcaggtatgcgtgatttttggtgcgggcgaatactatgcgggcacgcccgtggttcccaccggtgcgtatgtgattgcggccgatggcggactcgaccatacgcgcgagttgggcatcgtgcccgatgtggtggtgggcgacttcgattcgctggagggccggccgccccgcaccgatgtgcgcaccatcgcgctgcccgcgttgaaggacgacccggacatgctttccgcgctgaaggtcggctggtcggcgggttgccgcgagtttcacgtgtacggcgggcttggcggccgtattgaccatacgatttccggcattcaactgatggcgctgctggcccgacacggggcaagcgggtatctgtatggcgacgggctcatcgtcacggccatcaccgatggcaggctttcgttccccgcgcatccggtgcccgaggacggccgcatggtgtcggcgttctcccactccgatgtttcgcttggcgtgaacgaaccggggctgaaatatgagcttaaagacggcacgctgaccaatacggtggtgcagggggtcagcaacgagttccgcgacggcgtggacgcggccatcagcgtgaaacgcggcacactgatcgtcaccttccccatcgaagtggcgttgccacaggtgagcagattccatgaattcggcggcgatatcggcgagctggacaccgaagtgtccaagctgctggttcgctgacttgcatgccgcgcgcttgctcgtgatgattcgagacattcctccaaaggagaggaaaatcacatgtcggttgcgggcaatccaaattgtgagcgctcacaaaaaatacggcatttttacccaaaacgcacgctgaaacgttgccatgtgtacagagtcggcattacagtagcaactgttggtaaacaatggcccggtgtgccaaagcgcgccaaggccaccctacaagggagaattacatgacagttaagattggtatcaacggcttcggtcgcattggtcgtctcgccttccgtcgcatcttcgagctgcaggctcgcggcggccaggctggtgacattgaagttgccgccatcaacgatctgaccaccccggctaccctggcttacctgctgaagtacgacagcacccacggcaccttc

SEQ ID NO: 3732 - DNA, 2725 bp, Unknown
  R150_10m  MAG No. k141_12216
aacggattggtggtttgctcgccgttcttgtatgcttcgacgcttgtggtcttgtatcccttggggtcgcgcatgatgaagaacggccggtcggtgtctggcttccccgccttgttcgccgcagccagcgccttgttggagaaatagtcggaatcctcgagtttgctgatcttcgattccaccgggaagtaaacgtagaagtcatccatttcgtaggtggcaccggattgctgaccatcagggatatcatcagtcctcacatattgaccatggtcacacccttccgtctccccatagcctcggtagaccgtgccgtcgcataccggccatccgtagccacggtacatctcgaacatgccccactgtttggccaacaagtggttgcgcatattggtttcattatcgggaatcgaaccatccttgtagtgcagaatgcacccgccaatgtctccggtgggcgtgcacagtgtgccccgatcgtcccatatgccattggactcatcgcctttgcgcaccaaatacgggtaaccggacccgtatttcattccgtcttgacccttcgaaatcagcgagatgcatccacccgagccaggtaagaaaccatccttgcaataggtgcccgtaacacgccattcgcccgcagccgagatatacggcaaactcctgtcactcttgctagtgctggcataatccgcgtgcgggtcgaaatcataatcactacctgaaccggtggtcaccacatcttcagtgttgtcggctcccacaccgtagtacagacgtatcggttgcaatattttataatcattttcctcattgctcgcctcaaacggcgcaccaaaaatgtaattggaagctacgattttgccaaaatccttcttggcggaaaatcgcggctcgagaataacctcgatcttgttgttcgatgcgttttctactgcggttttcgcctcatccttatccataccgataacgtcggccggcatgccctcgactgagggatccgggataccaagataaatcgcaccattatcgtccactggctgcccccagccgggtaggtatacacgactttcttcgtatcggccttggatgttgcggctactcgcttggcataaatcggcacacccatatctttaacggccgcagcggccttggcgacgcttatggcccggtaccggcgtctgcggtaccgcgatagtggcgggcgcagacgacgctgggccgaggctagagctgagaccgggggccgggaatgggaccggcgggtggcatcggcacaggcggaacatcagtgaccgtattgtgtcccacggcaagtttcggtgccagcggagcaccgcattccgtgcagaaacgggacctatcgtcattggcagcaccgcacctatcacagttcatcgcgtcttctctctgatgaaatgatgcaatatgcctttcattgtacagagaaaacgcacactggcggagtcaacggaacagactcaccccgcgacgggccgtgcaatacgcgttgcccagccaggtatggcgggaattgggccagacagctcccagtcgcggtgcgttctggctcatccagatgctcggcacgcggccgtctgcggagcgtgagccgagcagattgaagccgttcttttccagcagccactccgggtgctgggtggcgatggccaagccttcctcgagggtgagcggcaggcgttcatcggagtcgataagcttgcgggccacgtccggctcgcgattgatataacacgtgccggtgtgcggattgacgaccagatagaacgggccttccggcggcatgaagccgtcttgaggcaggaagctggcgatgtcacgcggcggcatggtggtgaagccggccatgcgattgatggaggttcgtgcgatcagtgactcaggcgaaaccagttcgcgcgtgggcaccagcaggatgttcgatcccaaatcggaatgctcgagcgccccgatcaggggtcgggccagcgagcggaatgcggcggcggaaatatccgccacatccggatagccgagagccacgatacggtcgagctgtttttgggcctctactgatgcgatagacatggctaccagtgtagaacaccgccgtctcttcgttagtcaccccgttgtctatttagaagtgcaacatccttgttgttcggttaatgatagtagttcgtcggcgaatgcctcggccggggtgcggtagccgagcacgcgcatgggacggttgtcggtctcgtccacgatggcctgtatctcgtcggccatggacgggtcgacgcgcgtgcgcttgggcaggtagcggcggatcgcgccgttgcggttctcgttgccgccgcgccggcacgacgggtacggggcggtgaagtaggcggccatgccgagccgttcgcgcagttccgcgtggcgggcgaactcggcgccgttgtcgtgcgtgacgccggtcctggcgcggcggcgtccggccttccggtgcgcggggccggcgatgtggcaccggccggtccacggccccgtcttgagacgctccggccggtacggccggtaggattcgttctcgttggacgggaaccatgtgttgcgtttgattccgcggctgaccgtggaggcgtgtctgccgatcaggccggcgatccgccgtatgctcgtcccgttgccgatctctatccggatgatccgccgttcctcttccgacaggtgcgaatacacttgaccc

SEQ ID NO: 3733 - DNA, 11241 bp, Unknown
  R150_10m  MAG No. k141_13145
catgttgtgtgaggcatgcagacgcacattatcacccaattgcacatgttgacaatccgcgatatttcgccgattgtcggatgccgttgtccgttttatattcggtctgcctcacactgtttgcgcagaggcatgactagtgtgagacctgagacgacatcatcctcaaggatgagggccggcgcgtggcccctagcccaattcagtctggcgcacgatggggcgcgccgttatttcttcataagttggaatcgtcatccgggcataaggtccggccaaatatggagaggcattatgaacgtgcagaacccgtccgcatcgcgcggcatcgctattcaggccgtcgacttggtcaagaactacggcaccggcagcaatatggttcacgccctgcgtggcgtgaacgtgagtttcgaacgcggcaaattcaccgccatcatgggcccgtccggctccggcaaatccacgcttatgcacacgctcgccggcctcgactccgccacatccgggcatattcttttcggcggggcagacctgacccgcatggacgacaagcagctcaccttgctacgtcgccacaagatcggcttcatcttccaaagcttcaacctgttgcccatgttcaccgccgaacagaacatcctcatgccactgactctcgccggagacaagcccgaccacgcctggttcgacctgctcgtagaaaccttgggactcaagcaacggctcaaccatcgtccgaatgaactgtccggtggccagcagcagcgcgtggccatcgcccgcgcgctgattaccaagccgaagctggtgttcgctgacgagccgaccggcaacctcgactccgtttccagcgccgaagtgctcggcttcctgaagcgttcggtcaacgagcttggccaaaccatcgtcatggtcacgcacgatgcggtggccgcctcctacgccgaccgtgccatcgtattcgccgacggacagatcgtggccgatgaatcgaatcctactgccgaaacgatgaacgagctgcttatggccgaacgcgaacgcgccacgcgcactgccgtcaccagcacacgcgccgacacgctcgcccgtcttgccggcgtagaggatgtgcccaacctgcccatcaccgacgctccattgcccccagccgggagaaccggcaccatacgccatgcccgcgccgccgcacagcacactcgctgagccggaaagcgagagacaggatacccccatgttttccatcactctgaaacttatgaagaaaagcgccaggatgctgattccggcaggcatcgccatcctgatcggcactgcgttcatcgccgctaccttcctgttcggcaacgcgatgaacgatgcgcttgccgcccagaataccgcccagctcggcggcgcgaactacgtgatcagcccggatagcggcaaggacctgaccgataaggaccaggactacatctacacgcgcacggttaacgacttccagcttgaccgcatccgcgccaccaaaggcgtcaaggacgcacgtgccggctacgcgggttccgtgaccgtaacccgtggcaacaagcatgccagcagctacgtcatcaccaccgccacaaagcgcacgctgctgccggtcaccatcacgcaaggagaccagccggcggacagcaacgagatcgccctgaccaagtccgtagccgaccagctcggcgtcaaggtaggggaccgtgtgaccgtcaactcgcaggcggcgcagtatgcgggcaagaccggcgattcggccggtaataccggtgacgctggtgatgagtcggcccagaacgccgatggcacgagctcgcacgacggtgattccgatgccgcgtccggcgcgtccgccccatccgacggcaccgacacggccgccgactccggcatgaccgtgcgcgtggtcggcctcaccgacgacccgaacggtgcctacgcctactacggtggcgcttccgtgctttccgacaacgtcatcaccgcaatggccggcagcaacgatttcggcaacctgcctgtctacctcgtctatctcgacatcgacgatgccagcgacacggccgcggcatccaccgtaaaacaggtcagcacactgctccctaagcatttcagcgtgcaatcccgtgccgcgctcgtcgaggaatccgtcaaaagcatgagctcgggcgaaaccagcatcaccaccatcttcctgctgagcttcggcatgctcgccatgctggtcgcggcactcgtcatcgccaacaccttccaagtgctcgtggcgcagcgccgccgcacactcgccctgctgcgcaccatcggcgcgaacaaaagccagctgtatgtctccgtgctgtttgaagccggtgtgctgggactgatcgcctccgcactgggagtgggcctgggcatcggactcatggccgcactatgccagtcgggcctgatgaaagccactggcatgaccatgcgactggtactatccggtccggtgttcacggtgcctatggcattcggcatcattatgacggtgattgcctcgctaggctccgcgcgttccgctaccgccgtcaccccgctggaagcgttgcgacccatcgaactgaccgacacgcgacgggccggtgtggtccgcgccgtgatttccatgctgctgattgcgggcggcgtggcactgtgcgcattctctgtatggcagatgtccgagaaaatcgccggacgtgattcaatggccgacaagcagtattcgctggtgctgctcgccgccatcatcggatgtgcattgatcttccttggactggtgctttccgccacgttctggctaccggtgctcatgcgcggcgtgggcgcgctggttgcactggccggtccgtccgccaaagtggcacatgcgaacattcagaagaacccgcgccgcgtggccgccaccggtgccgcactgcttatcggcgtgacgctggtctccaccatcgccaccggtgccgccagcgccaagcaaaccatgaacgaggcgctgaccacgcgctacagcgtcgacatgattgccgctggcgccgatatgactggcaaacaggccggcgaggcagccaaagtcaagggcgttcagagcagtatctacgcgccgacccgcatgatgaccatgaaggatgccgacggcaagagcctgagtgtgctggtcgtgggcgtggatggcgtcgacgcgctgcgcaaggtggtgcgctccgatttgtccggtgtgaccattgatggcgattccgtactgatgcccaagtattccgccgctacaggcaaggatattccgctggacaagagcgttacgttcacggctggagcggccgaagcacaagccgatgccgccaatggtccgtccggtaatgatgcgaacggcagcgccgaaaacggcaatggacaatccggcggcacacagacgctgacgctcaaaccgcggaaggtggactatcgccgcattgcctccaactacgccgcggtcgccttcgtggacgccagccacttcaccaacggtggaatcaaggccgacgggcatatcatgcttatgcgtattgacgccgagggcgcgggtgttgcgctgaacgacgtattcaccaacgtgcagaatgtgttctccgccagtgctggcgttaccgtgaccggtccggtggccgaacgtacgcaatgggagaccatgatcaacggcatgatggcattgttggtcggtttgattgcggtggctgtgctcatcgccttggtcggcgtagcgaacacgctgagtctgtcggtgatcgaacgcacacgcgaatccgccaccttgcgtgccatcggcatgacgcgcggccaactgcggcgctcgctggcggtggaggcgttgctgctttcgctcgtctccggcgtggtgggagtggtattgggtaccctgttcggctggctcggatcctacatggtgtttagtttgtacggcgacaccgtgttcccgttcgaatgggccaccaacggtgtggtgctcggcgtcgccgcgctcgccgctctgctggccagcgtggcacccgcccgccgggccgtcaaaacgccaccagttgaagccttggccgaagcgtagagcaataagctccctcatcagagggagcttttttgttacaccagcccgttatcgtacgcgaagactacagcctgtacgcggtcacgggcgttgattttggcgaggatatgcgccacgtgggttttgacggtgggaagggagataaagagcttgtccgcgatctcctgattgctcagaccatgggcgatctccaccagcacctcgcgttcacggtcggtaagcagatccagttcgggatcggtgtatgctgggcgtgacgtattggaaccgtcggaagcggccccggcaggggaggggatgccggtcatcgagccggcaccgttgccggccgcaccgccagagacgccgacggcggaaccgtacacggcaccggagcgcgcgacatcgccggtcagcgaaccatgctgcgcgtaaccgtcctgcatcatcttttcgatgagtcgcttggtggcggaaggcgcgataatcgcattgccttggaatacagtacgaatcgaattgagcaacgtttccggttcggtgtccttgagcaggaagcccgaggcgccggcattgatggccgccatcacatactcgtccaaatcgaacgtcgtcagaatgattacgcgcgtcggccggtcgtcagccgattcggccgagacggtcgcgtcggcggccgggctggccgaatcggccgcgttgtccggcgcggcggagagtgaggtaatacggctcgtggcctcaatgccatccatgccgggcatgcgcacatccatcagcaccacgtcgggatgcagggattccgccaacgccacggcttgggcgccgtcggacgcctgcccgaccacctccatatccggttgcgaaccaatgaccatggcaaaaccggcacgtaccagctcctggtcgtccgcaataatcacgcgaatgcttctgctctcgttcatgctctccactgtatccgtttcctatcggagcgccgctccataaacaccctgattgttccctgagttcttattgggcaaggctctcaccggggggaacgttcccgcgtgttgcatctgactatccaacgaagccgccggtcgcaactgcatatccggctgcacaccctcatgggcctcgtcgctgaacccggtttcacgcaacactctcaacagctgacgcatatgagccaatgcggcgcgcccccgagcaccaatcgcagcaaaagccgcttcaatctgcatactatcaggcgcaggttcggcgttgagcatcaccagtccctcgtcagcctgcgcaatcaccgattccagcgtggtcagtacttcggtttgcatcgccgcactaatacggttgcgctctaagttggccgccagcaccttttgccgctcctgctcggctcgcagcgcctcctcgcgtcgcaacagcaccagagcgtttgcgccacgcgaacggctccatcgagccatcgcaatgcaggcaaaaccggccaacatgattcccgcgcccggcagcaagccggacaaaaccagcctccattttgagagcatggaactaccatcgggcaaaaacagatggaacagctgactgtatccattccacccagccatcaccttgatgcccgcaagccacgaatcggctgccagcgccacgctcacccagcgccaagcggactctcgtccatacaataccgccgaatacacggataccatcgcaaacatattgatggtcaaaatcgatggcaagaacaacagttgcacagcagacagcaccgccatcgccagcgcgctgccctctgggaagcggcgacggaacgccaaaggcgagagcataataatcgtcagcgttatagtcggcacgcggttcggcgaatacggggcattgccgatcatttgcaaatcgccatacgtggcggaatcaaatagcgcaatcagcacgatagtggcgataacgtccatcagaagatagtgccgctcggtccactgcgcaaatcgacccacccagttcgactcacgcgtatctccttggtcgagtactttggggcgcgcccgatccatcaatcctcgtatacgcgagataacggttagcaccggatcctccgtatcggtgccagactgtggggcggcaggggagagcggaatcgtagccgccacaataaagccaccattcggccctgggccggcctgcacgctgccacccaacgactcaatgcgttcatgcataccaaccaatccgtatccgggcttatgaccgtctgctgcagacgtcgcgccacggccgttatcggatacggtaatcgacagcacatcgtttgaccagatttcatcgatggtggctttagcaccctcgcccgcatgtttgcgcgtattggtcagcgcttcctgcacaagacggaacacggcggtttccgcgtcggcggacagccggtcaggttgcgctttgccggtcatatgccgggacaccaccagatgaccgtcaaacagcgaatcgatgtcggcatatccggtactgccactcgcaccgaacacattgaacagacgctgcatatcatgctgcgcgcgttcggcctcatgccgaatcgtacccatcgtgtgcttggcgatggccagatcatgcgcacccgcataccggccgccatccgactgcacaataatcgtggagagcgtatgtgccaccacatcatgcatatcacgggcgatgcgtgcgcgttcggccagcgccgcgatgcgcgtctcctcggcctctttcgccacaatggaagcgttgcgctctcgcatggccgccagcgtggcgttgcgcgctcgctgccacaaggccatgatgatgacgctcagcacgctcgattcgatgaacgccgcctccatgccgaagtccgcgagcatcttggccccgcagttgacggcgccgcttgcccccacgacgccggtgaccgccgggcatgtgggcatcatgatggcatcggacagccagccgtcgcggatgacgcgcgaaccggaggaaggtccggcgaacagcggacccacgttgaaagacaccgaccagaccgtcgccgcgaccagtcccatgacgaacgccgtgacgatgaaccgccaggaatgtcggggattgccgtacagaatcaccgaatacaccatgatcagggcgtagaaatcgaaatacatgatcgccgggccgaacacaagatgcgtgatggtcagcgccacgaacagccaggccgccggctccgggcaatacctgcgcagcatcagcggcacgaagaccggcagcgaccacagcgtcatcgacgcctgagttgcgggaaacaatatgccgcccgtcgaatcagggctggtgacgccgatgaacggcacgcagccggcgatcagcgctgcggcgagcaacgtgtcccatagcagtgtgcgggtcgactcccgtgcgcaccatgccctcacgcgcgccataatctccataacgcgcaaggctagcgtgtccggcgacgaaccggtatcactcttcaggaggatttatggactagagtcttgaaccatgacaatgctgagcaaatactacgtgcccggactggccatagaggaccattccatcgatgttccgctcgactggaccggccatgagccaggccaagcgttcgacggcgaaaccatcaaactgttctatcgcgtggtcaccgcgcccgaacacgtgcatgacgacctgcccctgctgattttcctgcaaggcggtcccggcggtgccggcccgcgcctcaacagcccgacctccgacggatggatcgaggaggccatcaggcacttccgggtgatcctgcccgaccagcgcggcaccggccgctcctcgcgcgtggacacgcacgccatggcccgcatcgccgccgcgcacgacgatgatgccgcggccggcgcacgagcccaagccgactacctgaagaagttccttgccgattccatcgtgcgtgacttcgaacatctgcgcctgaccgaattcggtggccgcaagtgggtgacgatgggccaaagctacggcggcttcctgaccctgaccacactgtccctgttcccggccggcgtaatcgccagcttcaccaccggcggcatcccgcacgtgccggccgacgccgctgaagtgtacgagcataccttcccgcgcatggtgcgcaagacgactcagttctacgagcgctacccacaggacaaggagcgcgtggccgccatcgccgacaagttgccgactactgcggaagtcgccgaattcgttggcaaactcaccgattccgtactgaatccgatggctggtaccgatgtggagcatcgacttggcgtgatcgccggcatggccgcccacggcttcccgctgatgccgaacggcgacccgctcaccgtcgaacgcttccagtgcttgggatccgactttggcatgaagccgagcttcgagcgtgtccattggattcttgacgacgccttccttgatggcgatggttccgcttctgccgactcgccgttgtctgacgaatttttgaccaaagtgatgaacgccacgtcgtcgcgcccactgtactggccgctgcaggaattcatctacgccaacggcgagcttgacgagcccattcgttgggccgcccagcgcgtgcgcgatggcaagcccgaattcggtgctgatgaacgcccgctcaacttcaccggcgaggccatgttcccgtggatgttcgaacaggaggccgcattgcgcccgttcaagccggccatggacctgctcatggaagacacgcacttcggcgtgatctatgacgaaggtcagctggcccgcaatgaggtgccgctgcaggccgccgtctacttcgacgacatgtacgtcgattccggcctgcagctcgacaccttgagccgcgtgggcaacagccactactggaccaccaacgaattcgagcatgacggtctgcacggcccgctcgtcttcaagcatctctacaccgaagccctcaaccgaggcgacctcgaagaactgttctgactcaaggaagcaagctccctctgatgagggagctctgtatacatgcacgaaaggaaaacgtatgactcagaacctcaccatcggttttatcggatatggcaacatggcccaggccatcgcccaaggcttcgttgacgcgggcgtggtcgccggcggccagatggtcgcctgcgccgcccactacgacaagcttgagaagaccaccgccgaacttggcgtgcgtccgttgcacaatgcgctggaagtggtgacggccgccgacgtggtcatcatcgccatcaagccctaccagatcgccgccgtcgtcaagccgctggccgacgaacttgccaagccgggcaagatcgtcgtctccatcgccgccggctggaatctcaagaagtaccaggacctgttcaccaccgaagacggcgaatccgtcgactcttcggacatccatatccagtgcaccattccgaacactccgatggccgtgggcaagggcgtgctcgtcaccgaatccgtcaacaccctgaccgacgacgaaaccgaaaccttcgagcagctattcggccccatcagcctcatcgagcgcgtggacaccccgcatatgaacatcgccatggtggtggccggctgcgcgcccgccttcactgacatgtacatcgaggccttgggcgacgccggcgtgcagtacggtctgcagcgagccaccgcctaccggctcgccgccaagatggtcgaaggtgtcggcgcgctctacatggccaccgaaacccatcccggtgccatgaaggacgccgtgtgctcgcccggcggcaccaccatcaagggcgtcgcccagctcgaaaaggacggtttccgcggctcggtcatcgacgccgtagacgccatcgtcggctgactgccaatcagagttcgcgtatattcgcatatcacagtcaaggccttcgagccgtatgctcggaggcctttgcatatggccggttcaccacatgcacgttcaatgtgtccagcttctccctagactggaatcatgtctcttactatcggaatcgtcggactgcccaacgtcggcaagtccaccatgttcaacgcactgacccgcaacaacgtgctggccgaaaactacccgttcgccaccatcgagccgaacaccggcatcgtaccattgccggacaagcgtttgcccgtgctggccaagctggtccacaccgaaaaggtcgtgcccgccacggtgaccttcgtggacatcgccggcatcgtcaagggcgcctccgaaggcgaaggcctgggcaacaagttcctggccaacatccgcgaggcggacgcgatctgcgaggtcgtgcgcgccttcgaggacgacgacatcgtccacgtcaacggcaaggtggatccggccgacgacatcgacaccatcaacaccgagctgatcctcgccgacctgcagaccatcgaaaacgcgctgcccaagctggagaaggatctgaggggcaagaagatcgagccggcctacatggacgcagtcaagcaggcaaagaccatccttgaagccggcgagacgctcgacaaggccgcacgcgaaggccgcttcgacaaggattccgtctacgacctgcatctgatgaccgccaagccgttcatctacgtgttcaacgtggacgacaacgagctggccaacaaggacctgcaggctaagctcgccgcatccgtggccccggctccggccgtgttcctcaacgctcagttcgaggcagacctgaccgagctcgacgaggcggacgcccgcgaaatgctggccgacgctggcttgagcgagtccggtctcgaccaactggcccgcgtgggcttcgacatcctcggactgcagaccttcctgactgcaggcgtcaaggaagtgcgcgcttggcagatccacaagggctggaccgccccgcaggccgccggcgtgattcacaccgacttcgaaaagggcttcatcaaggctgacatcgtctcctacgacgatttcgtggccgccgacggctccatggccaagatcaaggaggaaggcaagctccgtcaggagggccgcgactacgtcatggccgacggagatattgtggagttcaagttcaacgtctccaagtagttttcctcggctccccttcctgaggggagccgtcgcggaaagctactgacgggagtgtcgcggaaaggtc

SEQ ID NO: 3734 - DNA, 2870 bp, Unknown
  R150_10m  MAG No. k141_13171
atgccgtatttgcagtaccagcgtacggcccacagaatgatgtcacgctgaaaatgccggcctttgaatgggttcatgtgcagctccatcagcaaaaggggatgataagtttatcaccaccgactatttgcaacagtgccgcgacttctcctatcccctgggaacacatcaatcttaccggagaatatcgttggccaaagccttagcgtaggatttcgccctctcccgcaaacgaccccattctgcctgccctcaacgccgtcgagcgggcgagcgccgaagcaatcacccgcgccaaccggcgcatctacgatgccttggccgaaccgctgtcggacgcgcatcgccgccgcctcgacgatctgctcaagcgtcgggacaacggcaaaacgacctggctggcctggctgcgccaatcgcccgtcaaaccgaattcgcggcacatgctggaacacatcgaacgcctcaaagcgtggcaggcgctcgacctgccttctggcatcgagcggtcggtgcaccagaaccgcctgctcaagatcgcccgtgagggtggccagatgacgcccgccgacctggccaagttcgaggcgcagcgacgctatgccaccctggtggcgcttgccatcgagggcatggccaccgtcaccgacgaaatcatcgacctgcacgaccgcatcctgggcaagctgttcaacgccgccaagaacaagcatcagcagcaattccaggcgtccggcaaggcgatcaacgccaaggtgcggctgttcggccgcatcggccaggcgctgatcgaggccaagcaggcgggccgcgatccgttcgccgccatcgaggccgtcatgtcctgggatgccttcgccgagagcgtcaccgaagcgcagaagcttgcgcagcccgaggacttcgatttcctgcaccgcatcggcgaaagctacgccacgctgcgccgctacgcgccggaattccttgccgtgctcaagctgcgggccgctcccgccgcgaaggacgtgctcgacgccatcgaggtgctgcgcggcatgaacagcgacaacgcccgcaaggtgcccgccgacgcgccgaccgagttcatcaagccgcgctggcagaagctggtcatgaccgacaccggcatcgaccggcgctactacgaactgtgcgcgctgtcggagatgaagaacgcgttgcgttccggcgacatctgggtgcaggggtcgcgccagttcaaggacttcgaggactacctggtgccgcccgcgaaattcgccagcctcaagcaggccagcgaattgccgctggccgtggccaccgactgcaaccggtacctgaacgaccggctgacgctgctggaaacacagcttgccaccgtcaaccgtatggcgacggccaacgagctgccggacgccatcatcaccgagtcaggcttgaagatcacgccgctcgacgcggcggtacccgacaccgcccaagcgctgatcgaccagacggcaatgatcctgccgcacgtcaagatcaccgaactgctgctggaggtggacgaatggacgggcttcactcggcatttcgcgcatctgaaatcgggcgacccggccaaagacaagaacctgttgctgaccacgatcctcgccgacgcgatcaacctgggcctgaccaagatggcggagtcttgccccggcacgacctacgccaagctggcttggctgcaagcctggcacatccgcgacgaaacctacggggcggcgctggccgatctggtcaacgcacagttccgccatcccttcgccgagcactggggcgacggcaccacctcatcgtcggacggccagaacttccgcaccggcagcaaggccgagagcaccggccacatcaacccgaaatacgggagcagcccagggcggacgttctacacccacatttctgaccagtacgcgccatttcacaccaaggtcgtgaacgtcggcgtgcgcgattcgacctacgtgctcgacggcctgctgtaccacgagtccgacttgcggatcgaggagcattacaccgacacggcgggcttcaccgatcacgtcttcgccctgatgcacctcctgggcttccgcttcgcgccgcgcatccgcgacctgggcgacaccaagctctacatcccgaagggcgacgccgcctatgacgcgctgaaacccatgatcggcggcacgctcaacatcaagcacgtccgcgcccattgggacgaaatcctgcggctggccacctcgatcaagcagggcacggtgacggcctccctgatgctccgaaagctcggcagctacccacgccagaacggcctggccgtggcgctccgcgagctgggccgcatcgagcgcacgctgttcatcctggactggctgcaaagcgtggaactgcgccgccgcgtgcatgccggcctgaacaagggcgaggcgcgcaatgcgctggccagggcagtgtttttcaaccgcctgggtgaaatccgcgaccgcagtttcgagcagcagcgctaccgggctagcggcctcaatctggtaacggctgccgtcgtgttgtggaacacggtctatctggaacgggctgcgcacgcgctgcgtggcaacggccatgccgttgatgacgcgctgttgcagtacctgtcgccgctcggttgggagcacatcaacctcaccggcgattacctctggcgcagcagcgccaagatcggcgcgggcaagttcaggccgctacgaccgctgcaaccggcttagcgtgctttatttaatgagatggtcactccctccttcccagtactatgctgaggacaggctttcattcggagaaccatcatggaaaacattgcgcttattggtatcgatctgggtaagaactctttc

SEQ ID NO: 3735 - DNA, 19408 bp, Unknown
  R150_10m  MAG No. k141_13315
agattggctttattccgccgtttccgttcgcgttttatgtggttcgtgtaaactggaatgtcctggttctcgaaaacaggccaaaatcacgaaccgggacagcgggttttgccccgatgcggacgtcaaacgattgacatgtgaaccggggcaaatcagaggaggagaggtcttcgggatagagcttgactggggctgggcgcacggttgatgtcgcgtgggccggctcttgcgtttcggtccactgatggtccggaattttgcatactatggttcggttttccggcctgacacgccatcgaacaagcgttcgaatttggtcgtgtgttcgggtatccttgggacagatttggcgcgcgcataaccgtgcgcgcgggaacggtgagatggaaggtggggtgtggctgtggcggcaacgcggactggcgcaaggcgcgcaacaagcgcaaagggcgcgaaaaccagcaagggcaagaacggtgaggtcatcgtcgaaaaggtgatgaccagcgactccttcctgagccgggaaatcaaaaaggcgccgttgatcgaacacgatggttcgctggtagctgatatctcgcacatcccgaacgatctcaagatcacgattcagggtgctcgcgaacacaacctcaagaatgtcgacctggcgattccacgcaaccgtatggtcgtgttcaccggcctgtccggttccggcaaatcctcgctcgcgtttgacaccctgttcgccgaaggccagcgacgctacgtcgaatccctgtccgcctacgcccgccagttcctgggtcagatggacaagcccgatgttgacttcatcgagggcctgagcccggccgtctccatcgatcagaagaccaccaaccgcaacccgcgttcgaccgtcggcaccatcaccgaaatctacgattacctgcgactcctcttcgcccgcaccggcatcccgcactgccccgaatgcggcgagcccgtcgcctcccagaccccgcagcagatcgtcgacacgctgctcggctacccggagcgcactcgattccagattctctcgcccgtggtcaagggccgcaagggcgagttcgtggacatgatcgagctgctgcgctccgacggctacgcccgcgcgctcatcgacggcgagatgacacagctgtccgacgacatcaaactcaccaagcagaagaagcacaccatcgaggtcgtggtcgaccgactcgtggtcaaggacggtatccgccaacgtttgactgattcggtggaaaccgccctcaagctcgccaacggcagcatcgtcatcgacttcgtggacgaggaggaaggcagcccggcccgccgccagccgttctccgaacaccgcagctgcccgaacgggcacacgctcgaactcgatgaggtcgagccgcgcaccttctccttcaacgccccctacggtgcctgccccgcctgcaccggtctcggcttcaaactggaaatcgacccggacctcatcatctccgacccggacaagtcactggccgacggcgtcatcgaaccgtggagcggcaccaagatgacctcccagtcctacggccccatcctcgacggcgtggccaaggaaatgggcttctccatgaagaccccttggaaggacctgccggacgacgtcaagcacgacatcctctacggccacgacttcaaggtcaacgtctcctaccgcaatcgctggggacgcctgcgtgaatactccaccggcttcgaaggcgtgatccgcacgctcatgcgacgccacgacgaaaccgattcgcagtccatgcgcgaatactacgagtcgtacatgcgcgaagtgccctgccaggtctgccacggacgtcgtctgaagcccgaggtgctctctgtcaccgtggacggcaaatccatcttcgacgtatgtgacatgcccgtcgtacgcgaactcgcctggatcaacggcctgaaactcgaaggctcggcacagctgatcgccggcgaagtgctcaaggagatcaaggcccgactcggcttcctgaacgacgtcggcctcgactacctgaccctctcgcgcgcggccgccaccctgtccggcggagaagcgcagcgcatccgactcgccacgcagatcggctccggcctggtcggcgtcatgtacgtgctcgacgagccgtccatcggcctgcaccagcgtgacaacgaacgcctcatcgaaaccctgcaccacctgcgcgatctcggcaacacgctgattgtcgtcgaacacgacgaggacacgatacgccgcgccgactgggtggtcgacatcggccccggcgccggcgaacacggcggcgaagtcatctactccggccccgccaagcacctcatcgaagccaagcgctccatcaccggcgactacatcgcccaccggcgagagatcgccgtgcccgccaagcgccgcaagatccacaagacccaggtgctcaaagtcgtgggtgcccgcgagaacaacctcaagaacatcgacgtgagcttcccgctcggcgtgctcaccgtggtcaccggcgtctccggctccggcaaatcctcgctggtcaacacgatcctctacccggtgctcgccgacaagctcaacggtgcacgcatcgtacccggccgccacaggcgcgtggaaggcgtggaccaggtgcgcaaggtgatccacgtcgaccagaacccgatcggccgcacgccgcgatccaaccccgccacctacaccggtgtgtgggacaagatccgcacccttttcgccaagactcccgaagcccaggtgcgcggctacggccccggccgcttcagtttcaacgtcaaaggcggccgatgcgaggcctgccacggcgacggcacgctgaagatcgaaatgaacttcctgcccgacgtctacgtggactgcgaggtctgccacggcaaacgatacaaccgcgagacccttgaagtcacgtacaacggcaagaccgtggccgacatcctcaacatgcccatcgaggaggccgccgacttcttcaaggcgtacaccggcatctcccgatacctgaagaccctcgtggacgtcggcctcggctacatccgactcggccagcccgcacccaccctgtccggcggcgaatcgcagcgcgtcaagcttgccaccgagctgcagcgccgatccgacggcaaaaccgtgtacatcctcgacgagccgaccaccggcctgcacttcgaagacgtgaacaagctgctcaaggtgctgcagtccctggtggacaagggcaatacggtcatcgtcatcgaacataatctggatgtgatcaaggaggccgactggctgatcgatctcggtccggagggtggcgacggaggcggcaccatcgtcacgcagggcacgcccgaacaggttgccgaatgcgaagcctcatggaccggcaagttcctgaagcccatgctttagccttccattgctgctgacctcgggtgggtgggagtggtatgttgctggacatgctccgggccgctcaggccaagtctttacggtccggcaacacacaccccaacccacccaatccctgatgattggttttgcttaatagcgaggaggattatgacgaacgatattgagcggcatagtccggatgagtggcggaagaccgcggtggcgttaatgccggaaagcgtagctgtgggcgccggggaaacgacggcgaaggtgaatgcgaatggggcacctttgctgggggattctcgcgacctgttccgacccaagacctcggatattcccgccaaacccggtgtgtacaaatggcgcgacggggaagggcgcgtcatttatgtgggcaaggcgaagaacctgcgcaacaggctcaccaattatttccagccgctgtatctgctgcatccgcgcacgcagaccatggtgctgaccgcacgcagtctggagtggacggttgtcgccaccgaactggaatcactgacgttggaatacacgtggatcaaggaattcgacccacggttcaacgtgcagttccgcgacgacaagacctatccgtatctcgcggtcagcacgggggagcgaattccgcgcgtgtgggtcacgcggtcgcgcaaacggcgggatacccggtatttcggcccctatgccaaagtgtgggaattgcggcacagtcttgaccggttgctgcgcacgttcccggtacgcacctgcaccaccaacgtattccacaaggcgcaactgaccggacggccatgtctgttcgcctccatcggcaaatgctccgcaccctgcgtgaaccgtatcgaagcggacgaacaccggcggctgtgcgaacagctggtcggcgtgatgaccggacgactcggacggccatacatcgcccagttgacccgcgacatgaaagaggccagcgccgaactcgaattcgagaaagccgcccgactacgcgaccagatccaaatgctggaaaccgtggtgcaacagaacgccgtcgtcttcgaccaggatgtggacgcggatgtgttcggcttcgccagcgacgagctcgaagcctcggtgcacgccttttatgtgcgcgccggctctattcgcggcgaacgcaactggagcgtcgaacgagttgaggacatcgatgacgccgacttgatggccgaccttctggtgcaggtgtattcggactccgccggggacaatcacccccagtcggccgcgaccatctccaccaatcgcgaggccatcggctccacacagaccatcacggccacggacgctgtggcacgcgcccaggccacccgagaacgcaacacccgtcaggagaccaccggacgcgcggacctgctggcacccatcgcaccggtaccgcgcgaaatcatcgtgcccgtcgaaccggcccgccgcgaggaactcgaaggctggctgaccaatctgcgcgggggcgcggtgaccatccgcgtggcctcgcgaggcgacaagaagcagcttatggaccgcgccaacgagaacgccagccaagcactgcaacgcagcaagatgagccgcatctccgacatgggcgcacgcacccaggccatgaacgatgtggccaaggcattgggactcgcgcaagccccgctgcgcatcgaatgctacgacatttcgaacactgtgggcggtgccttccaagtggcctccatggtggtgttcgaagacgcgatcgccaagaaatccgaataccgacgcttcgccgtccgaggcaaggacggcaaaggcgcggtggatgatctgtccgcgctttacgagacgctcacccgccgcttcaggcacggcaacatcgccggcgactccggcgaaagcatcgacgcggaacagcgcgcggcctcggccgccggcaagatgaccactgccgtggcggcggagacaatcgttgcgaacggtaacgacaatggtgagggcggttccgacatcagtggcaaggggcacgcggtgccggtcggagtgcagaacgatgcacgggagtcctcgcccgacatcgtccagcagaacacaaaccggcatcactttgcctacacgccgaacctggtggtggtcgacggcggtaagccacaggtcatggccgccgccaaggcgcttgaggactgtggcgtgatcgacgtggccgtctgcggactggccaaacgcttggaagaggtgtgggtgccggacgacgactatccgatcatcctcaaacgccagtccgaaggcatgtatctgctgcagcgtgtacgcgacgaatcccaccgcttcgccatcacctaccaccgccaacagcggcgcaaaggcgccctgcgcagcgcgctcgacgagattcccggcatcggcgaaagctaccagaagcggctgctcaaccacttcggctcggtcaaagccatgcgcgaagccagtgtcgaggacttcgagaaggtcaaaggcatcggccacgccaaagccaaagcgctgtacaacgcgctgcacgagcagtgagccggcccggtccagcagcccagagtgaattttcggttgcggggcctgtggttgacatattcgaagcaaagtgtcggctagcatggaaacagacatcaaggaggggatatggccaatcatcgttgcgctgtactcggcaaacccgtcgcgcactcattgtcgcccgtgctccacaacgcggcttatcgttcgctgaaactcgacgattggctgtacgacaagcacgaggtgggggaagacgacctcgacgctttcctcaaaggccttggctcgatgtgggctggcctgagcctgaccatgccgttgaagaagaccatccaaccgtacggtgttccggaaaatctgtgggccaaggaactgaaggtggcgaataccgcggtattcgactggagtgtggctaccgatgatcccgcttggccgaacggcaagccgggcatcaagctgtacaacaccgatgtcatcggcatccaactcgccttcgaccacgccaatcgcgaactcggcgaacaccacaccgcatcgagaagcggcgccgcgttgatcctcggcaatggcaacaccgccacttcggcgttggccgcatgctgcatgatgcccgaaatcggccatatcatcgtcgccgcccgccaccctgggaaaaacaccgggcttaaaccagtggccgaaaagttcgtcaacgtgcataacccgtacagcgaaatcgaattaggcgacgatcaggccctgctcgaggcagcccgcaacgccacctatgtcatcaacacgattcccggacatgcggccgacaacgtcgcggatgccctcaccaatgccggaaccgagccattctccggactgctgctggacgtggtctacgatccacgccccaccaagctcatggaagcctggcgcgctcatggcggtcacgccatcggcggcgaagaaatgctgctgtaccaagctctcgtacaggtattgctgatgaccggtatctgggatgacgacccgcccagcgatgccgaccagcgtctgcaggacaccaccaccgaagacgaccagctggagatcgcgatgcgcaaagctcttgaggaggcgttgtaatgagtcaacagacaacaatccgcgataccggcgaggcggccaccacgaatgcgccggcgaattccgcgacatccacatcgacttcggacaaccagccgaccccgcttgatgccttcgaggtgctgctcatcaccggtatgtccggcgcaggccgctctcatgccgctgactgcgtggaagacatgggatggtatgtggtcgacaacctgcctcccaaactgcttatcccgcttgtcgacatgatgaccacctccggttccggatcggggtcgggcgtccacaagcttgccgccgtcatcgacgtgcgctccagctatttcgacgagctggccgccgtgctcggccatctggatgatctcggcgtcaaaacccatattctgttcctcgacgccagcaacgaagtgctcatcaagcgctatgaatccgtgcgccgcccgcacccgctgcagcacggcaaccgactgatcgacggcatccttgaggaacgtcacctgctggaagacctcaaggagcgagccgactgggtcattgacaccagctccctgagcatccaccagctgtccaccaaactctacgagacgatgctcggttccggccccaccaccgtggcggtacacatcttcagcttcggcttcaaatacggcatgcccatcgacgccgatttcgtggccgatgtgcgttttctgcccaacccgttctgggttcccaacctgcgcgagcttaccgggcacgacaagccggtcgccgactacgtgctttccagcaagggagccaaggaatttctcgacgcttatgagaaagctatcgagattgcgttggaaggatacgcccaggaagacaagcactatgtaaccatcgccgtcggctgcaccggtggtcagcaccggtcggtggcgatgagcgaagagctggctcgccgcttacgcgcacatgggctcaacgtaaccgtttccgcgagagaacagcataagcgtcactcatcgtaagcaggcgtcgagcggtcatcgggcaagcgttcggtgaccacactgcgagaaagcaaagcccataatacgtatcaaacgggttcgcttgtccaccagattaggtatcacagaaagccgatggcttccgaccgtatgacagcagataacggcacgaagcgcctgaagcattgagaagaacgggactgtaggaggtagatcttggctcttctggacgatgtcaaaagcgagttggcggcctttgaaggcgattcgccagccgcgatcaaggcccaagctgcggccatgatccgttttggcggcggtcttcgaccggtacagaatacatacgttatccaagccgtattcacctcgcttgacgttgcagaatggctgaagaacacgttgaggaacacgttcgggcatgaagccgaggtcaaccacctcacccgtcagaccccgaacggccctgtcgagacctacgtggtgctcgtcacccgcaacgtagtggccttggctttgcagaccggactggtcgaccgccgcaagcagcaggtccgtggactgccgtctgaagtggtcaacggatccatcgcccaaatcaaagcagcatggcgcggcgccttcatggcccgtggcttcctatccgatcccggtaaggccagcttcctggaaatcgcttgccccacggaagaggccgccatggccctgtgtggcgtggcccgtcgtctcggcatccaggccaagcatcgcacgctgcgcagctccgagcgcgtgaccctcaaggatcccgacgccatcgaacgcatgctcaagctcatgggcgccacccgttcggcccgcgaatggaccggcaagcgctccgacggcgaggcccgcggcaaggccaaccgtctggccaacttcgatgacgccaatatgcgccgttccgccaaggctgccgccgaagccagcgaaaaagtgcagcatgccttcgaagtgctcggcgataacattccggacaacctccgtcaggccggccagctgcgcatcgatcacgtggacaagagcctcgaggagcttggcaagatcgccgaaccgcaaatcaccaaggatgcgattgccggccgaattcgccgactgcttcagcttgccgagaaaacggagaaggctcgcgcagccgaaggcaagtaacccgacaatccgatttgctgtgcctattcggcaaaacgcgacaacgacgtaacgaaacaccgcattcagtcagtaggcgaatgcggtgttttgttccggaatgcctgtaatatgcaaagtggcaaaattggccactttgacgtgcgattcgtcaaggaaaggatattcatgaagacactcaaggaccttggagatctcaagggcaagcgcgttctggttcgcgctgatttcaatgttccgctggacggcaccaccatcaccgatgacggtcgaatcaaggctgctctgccgaccatcaagaccctgcgcgaagaaggcgccaaggtcatcctcatggcccaccttggccgcccgaagggcaaggtcgttcctgagctgagcctggccccggttgccgcccgcctcggcgagctgctcggcaccaacgtgccgctggccaaggacacctacggcgaggacgctcaggccaaggtcgccgccatgaacgatggcgatgttgtgctgcttgagaacgttcgcttcaacccggaggagacctctaaggacgccgacgaacgcgccgcttacgccaagaagatcgccgctctcggcgaggccttcgtttccgatggcttcggcgtggtccaccgcgcccagggctccaactacgacgttgccgccgatctgccggccgccgcaggcctgctggtcgagaaggaagtcaaggccctgtccaaggccaccgagaacccggagcgtccgttcaccgtggtgctcggcggttccaaggtctccgacaagctcggcgtcatcgagaacctgctcgacaaggccaaccgtctggtcatcggcggcggcatggtgttcaccttcctcaaggccaagggctacgaggtcggcacctccctgcttgaagaggaccagcttgagaaggtcaagggctacatcgagaccgccgagaagaacggcgttgagctcgtgctgccgaccgacgtcgccgtgaacgccggcttcccggccggtgacaccccggttgctccggaagtcgttgccgccgacgccatcccggccgacaagatgggtctggacattggcccggagtcccagaagctcttccacgacaagatcgtcgactccaagaccgtcgtgtggaacggcccgatgggcgtgttcgaggttcctgagttcgcctccggcaccaaggccgtggcccagggtctggtcgacgccaccgcagccggtgcgttcaccatcgtcggtggcggcgactccgcctccgccgtgcgtaacctcggcttcccggaggacggcttctcccacatctccaccggtggcggcgcttccctcgagttcctcgaaggcaaggagctccctggtctgaaggtgcttgagtaatccattttctagctcccctccttgaggggagctacgtattttttagaggggaaacatatggcgtccaaacgcattccgttggtggccggcaactggaagatgaatttcgaccatcttgaagccacttacttcgtgcagaagctggtatggctgttgcgtgacgctcgctttgacttcaaacgctgcgaagtcgcgcttttcccctcgttcacgtcattgcgcagcgtacaggtgctggtcgaagccgacaagctccatgtcgcctacggcgcacaatccgtttccgtgaccacccaaggtgccttcaccggcgatgtgtccgcggacatgatcgcccatctcggctgctcgtacgtcatcgtcggccactccgaacgccgcaaataccatcctgaagatgacgccaatatcgtcgatcaggtacgtgccgtgctcgccgccggcatgcagccgattttgtgcgtcggcgaaagcttcgaggaacgacgtcaaggcattgaactcgatttcgccgtgggccaggtacgagacgtcacccgcgatctcaacgaagaacaagccgccgaactcatcgtggcctacgaacctgtctgggccattggcaccggcatggtggccactccgcaatccgcccaggatgccgcaaacgccatccgcaacgatttgaagaccacttttggcacgaaggtatccgatagcgtacgtatcctgtacggcggatcggtcacctcgaaaaacgcggcggaactcatttcccaacccgacgtcgacggcttcctgatcggaggggcggccctggatgttgaggaactcgccaaaatcgctcgactggcactgaaatccacgaaatcacggaactaataccacggttttcccgtgtgtgcgctatgctggtcaacagtccaatcaatccggaggtaccctgtgaccgctcttaagatcacgctgcaagtcatcgtcgtgctgctcagcttcgtgctgaccctgctcatccttatgcacaagggcaagggcggcggtttgtccgacatgttcggcggcggtctgacccagaacgccggtacttccggtgtcgccgaaaagaacctgaaccgttggaccgttatcatcgctctggtgtgggtggcattgatcatcggcctcgacatgatgaccaagttcaacctcggctgatcggcttgcacgccatatagacttgtcgctcgcgacccatgaccgttaccgtcggtcatgggtcgtatgcgttctatcgagtattacgaaaggacatcaccatggtcactatgaaccgcaacaaagtcgttatcgtcggcactggccaggtcggtgccaccgccgccttcggcatcgtcacgcacggcctgtgcaatgagctcgtgctcatcgaccgctccgccgccaaagccctgggggaggcccgcgacctcgatgacggcagcgaattccaggaccgccacgtcaaggtgcgcgccggcgactacgccgactgcaaggacgcggacatcgtcgtcatcaccgtgggccgcaagccgccggccaactccaaccgcatggccgaactcggcttcaccgtgggccttgtgggcgaagtggtcgacaacgtcatggcctccggcttcgacggcgtgatcgtcatggtctccaacccggtcgatgtgatggcctggtatgcctggaaacgttccggcctgccgcgcacccaggtgctgggcaccggcaccgcgctcgacacctcgcgtctcaagaccatcatcggcgaagagaccggcctcgacccgcgtaacgtgggcggcttcgtgatgggcgagcacggcgactcccagttcaccgcatggtccaccgtctcgctcggcggcaagccattcgcccgcttcctggccgacaaccaagaccgtttcgcctccgtgtccaccaccgaaatcgaagagaagacccgcacccgtggcgatgagatcgtcgcggccaagggcggtaccaacttcggcatcgcctccaccgtggccggcatcgtgcagaccatcctgtgggacgaacgccgcatcgtacccgtctccaccctgctgaacggcgaatacggcgaacatgacgtgttcctcggcgtccccactgaactgcgcgccaatggtgccaacgagatcgtcgaactcgatctgagcgaggacgagcaggccaaattgcaccattccgccgaactcgtgcgtgaacactgcgaggggctgctgtgattctcgacgccatcacaccgaaacaaccccgactgctggtcgccgacctcgacggtacgttgctgcacgacgccgaggtattcgaggaccggttcatcacccagcgcagcatcgacaccatcaaccgcgcgcacgatgccggactgaaattcgccatcgccaccgcgcggccggtgagtaccggcctccagttcgccgaaaaactgccggtggacgccgtaatctatctgaacggtgccctcatcgatttcgacccggcccactccgacttcgacctgctcacctcaggtgccacgccggccgatgagaaccatttgatcaagattggcttctcctcacggcgtgcctgcgaagtctgtctgttcctgctcgatcgcatgcccggcctgaagctcggcatcgtgatgaacgacgtgcgctacaccaacttcgatgtgcgcgtgtattggaaaacacaggccttccaatacacgaacttccacgacgtgcccgaaggcgtggcggataagatcaccatcttccccgagcctgaacagtggaacgagctgcgtgcgctgattccgccggacttcgacatctccattagcgaaggcgtgatgtggatgctcatgaacccgcaggccaacaaggagcacgcgctgcacctgctgtgcgaacgactggacgtgccgctcgaacagaccgccgccttcggcgacgacctcatcgatatcaacatgatgagcgaatccggccggggtgtggccgtggccaacgcgaaccccaaggtgttgtctatcgccgacgagatctgcccgcccaacaacgaggacggcgtcgcccaatggattgaagcgcagttgggctgaaccggccgagactcgagaacacgccaaaattgaacttgtgttgaaccgggagtatgctttgaactgttgttcaaaagataaattgaactcccggttggaggcataaggatatgagcgtatcggtgtttgcggaacgtctgcgcaatgcgatgaacagtaggggattgaagcaggtcgatttggtgcacgccgccgaacatcgtggcgtaaagatgggcaagagccatatcagccaatacgtggccggcaagaccatgccccgcgaagacgtgctcgaattcctggccagcgaactggacgtcgacgcgaactggctgcgcggcgaggaatccaccccgcaattgaactcggacgcttccaacagcgtcacggacggcgaacacgccgccacgccgcttgccacgggcaccgccaagcccctgacggacagcgagattcccgtgggccgccgccgtaccttcggcaaatcgcacaagctcgacaacgtgctctacgacgtgcgcggcccggtcgccgacgaggcgatgcgcatggaggccaacggcacccacatcctgaaattgaacatcggcaatccagcacccttcggcttccgcacgccggacgaagtcgtctatgacatggcccaccagctcaccgacaccgaaggctactcgccgtccaagggcctgttctccgcgcgcaaggccatcatgcagtacgcgcagctgaagaacatcccgaacgtcaccatcgacgacatctacaccggcaacggcgtcagcgagctcatcaacctgtccatgtccgcgctgctcgacaccggcgacgaagtgctcgtgccctccccggactacccgctgtggaccgcctgcgtgaacctggccggcggcaccgccgtgcactacctgtgcgacgaacagtccgaatggtatccggacatcgatgacatccgctccaagatcaccagcaacaccaaggcgattgtcatcatcaacccgaacaaccccaccggcgcactttacccaaaggaagtgctccagcagatcgtcgacatcgcgcgtgaacaccagctcatcatcttctccgacgaaatctacgatcgcctcgtcatggacggcctgcagcacatctccatcgcctcgatggccccggacctgttctgcgtgaccttctccggcctgtcgaaatcgcacatgatcgccggctaccgcatcggctggatgatcctgtccggcaacaagcgtatcgccaaggactacatcgagggcctcaacatgctcgccaacatgcgcatgtgctcgaacgtgcccgcccagtccgtggtgcagaccgcgctcggcggccaccagagcgtcaacgactacatcgtgccgggcggccgcgtgcacgaccagcgtgacctcgtttacgacatgctcaaccagattcccggcatcaccgccgtcaagccgaaggccgcgttctacatcttcccgaagatcgacgtcaaacgcttcaacatccactcggacgagcagttcgcgctcgacctgctgcatgacaagcacatcctcatcagccacggcggcgcgttcaactggcatcgccccgaccacttccgcgtggtgtacctgccgcgcatgggcatgctgcacgaaaccatgggggagctcgccgacttcttcagctactactggcagagctgatccttggtacaggcgaacacgatcgatgccgggctgggcaccaaaccggtgccccgtctggccctgaccatgtcggtccccaccatcgtggcgcaggcggcgaacgcctcgtacacgatcatcgaccgactgttcatcgggcacatccccgaagtgggcaacgcggcgatgaccggcgtgggcatctgcttcccgattctgccggccgtcaccgccttcgcctcgctgatcggcgcaggcggcgcgcctcgcgcctccattgaacttgggcgcggcaacttcaagaaagccgaacgcatcctcggcaccagcgccgcgttcctcatcgccatagccctgaccctcaccgtgctgctgcagttggcgaaaccactgtggccatggtctccgtactcatcggcaccggcatatccatccttcttgaccccgtgttcattttcgtgttcggatggggcgtcaggggagcggccgccgcgaacgtgctcgccacattccccggcttcttcgcctcatggttcacctcggaacagacggtcatcgacatcgtgacccgcatgatgccgattttcgtctgcggctggggtatcttcggcatccagatgggcgcgcaatgcgcactcgtcggcatgggccaggccaaacagtcggtgttcttggccatcttccgcaagatcatcctgctcgtgccgctcgcgctgctgctgccgcactggatcggcgtcaacggcatcttcatcgccgaacccatctccgacgccacctccggcatcgtggccggcttcctgttctatgccacctaccgcaagattcggcgagatatggtctagactcctgattcaatggatgtgccgtctcatgcgttgcgaaacacgggacggatagaatgcctcgcaaaacgggtgcccgttgtttcgtgatatgaaggagattttatgccggtggtgtcgcgtcgtgcgcagccaacgtgatggccataatcgccgaaagcagggagaacaatggcagcacgcacaacacgacggtcagcagtcccaaagcttcacggccgatgcaataagcgacaagacctgcattgtcagttgccgatagcgctgggcagaaatcggtgtgtctaccagtgttatagctgtaggtaaagaacgtgagacctgaccagaacagggcaacgggaacagagccgatggcgcgaaaagccctgtactcccgcaacggtcagacagagaatcgcgacaacactcagcgcagtcaccgtcataaaccacagtggtgaggtgacgcagactccgtaatcgtcagttgcttggcccgagagatagtaggtcattctgccaatcgccggacagttcggatgcagcatcatgccgccctaaatgcgctcatatagtggtgcgaacgatacaccggcaccgctgagcgtcgcaacaaccgccatcaccgaccgaccgccagactccggcacagaccgggaagaactaccgtcgcggagcatcggcgataccaatggcaacaccgaggatagccgggaccacccagccgagctggtattgctgcaagggcagcatggccagcgtcgtgtccagccagccgatggagccgccgaagacggtgattaggctggagatgcaggtggcgaaggagtcgatgcccaccagcagcacggtccagaagtagacatgtgggaatcgcgcgccgagcgacttgtgggtcagcgccaacagcaccagcacgatggcgatcggatacagtgcggacaacaccggcacggaaaccttgatgatcgcgcttagcccggcgttggacacgatgaaactgaacacggtgaagatgacctgccaggtgcggtagctcaacgttctccctgcaacggtctggaaccgagtgtggaagtaggtggcgcaggtaccgatcagtccggtgcatacgttgaggcaggcgatgacgaagacgataccgaggaacgcggtaccgaacgcgccgaacagggacgaggtgagattggtgagcacggtcgcgcccgtgtctttggcgggatcgatggtggcgatggcgccggacaccacgcccacgtagctcagtgcgccgtagatcacgatcagcagcacaccggtgccgagtccggcatacgcggtctccttctgcacttgcgattcgtcatcgacctgctgggtgcggatattcgcggaaatcacgatgccgaaatagagcgcggcgagcagatccatggtctggtagccgtcgaggaagccacgtgcaatctggtttgtggagtagtcgcccatcggtttggccggggtaccgataccgtggattaggcaggcgatgaacaggacggcaatcagcaccagcagcaacggtcccatgaatcggccgagcactttggagagtttttcgggatgctgggcgaacaggaacgccagtgtgaagaacacgagcgagtagatgagttgggccagccagccgtaggaggacggcacgaaaggcgccaccatcatttcgaacgaggtggtcgccgtacgcggaatcgcaaagcaggggccgatggtgagcatgatcgccaagccgaggaacagggcgaatttgggggagacccggccggcgagtttgtcgaagccaccggcgaaggtgaccgccagcacgccgagaatcggcaggccgaccgcggagacgatgaagccgatggccgccggtatggtcgcggaaccggcctgagctccgacaaacggcgggaagatcaggttgcccgctccgaagaacatcgaaaagaaggtaaaggtcatcacaaaccgctggcgtgcgacaagtttgttcattacggttcggcctttctctcatgtgctcgtactactgtagcaacaaacgtaagaagccccgaccggttggggtcggagcttctgtgagctaatcagttaatgcgcgaaatgcgcatcagctaataatctcaggcgttcacgcggtcgatgccggactggacgtcagccagcacggaatcccaggacttgatgaaggcggcgacaccgtcggcctccagcttgtcagtgacgtccttgaggttgatacccagctcagccagcttgttgatgacggcgtgggactcctcgtaggtgccctcgatggacggagcgccgttgccgtggtcggccagagcgttcagggtcttctccggcatggtgttgacgatgtgcttggcaacgagctcgtcaacgtacttgcagtcggagtaggcggcgttcttggtaccggtggaggcccacagcggacgctgaaccttggcacccttggcagccaggtcggcccaacgcggatcctcggcaaacttcttctcgaagagctcgtaagccaggcgagcgttggccacagcggccttgccctccagagccttggcctcgtcggagccgttggcttccagcagcttgtcgacagcggtgtccacgcgggagacgaagaaggaagcgacggagccgatgtgcttcaggtcgtggccgttggcgtcagcctgggcgatgccctcgatgaaggcgtcgatgacctgctcgtagcgctcgagcgagaagatcagggtgacgttgacggagatacccttggccagggtggcggtgatggccggcaggccttcgagggttgccggaatcttgatcatggcgttcggacggttgaccttctcccagagttccacagcctgcttggcggtgttctcggtgtcgtgggccagacgcgggtcgacctcgatggagacgcggccgtcgacgaagtcggtagcctcagcgatctcgcggaagatgtcggtggcgttgcgcacgtcggtggtggtgagctcgcggacagcagtctcaacgtcaaccttgccgagctccttgagctgagcgtcgtacgggccgacctggctcagggccttctggaagatggacgggttggtggtaacgccgaccacgttcttgttggcgatgaggtcctgcagggagccggactcgatgcgggagcgggacaggtcgtccagccagatggaaacgccgttgtcggacgtacgctgagttgcttcagtcatttatttttctccttatattccgttatggaacaaatcttgttaaagccctccctcttagtgagggagggcaatgaaatcacttgg

SEQ ID NO: 3736 - DNA, 3281 bp, Unknown
  R150_10m  MAG No. k141_13480
acgtatgacgccgcgcacgctgtggccgctcttgccggccgtgagcttgcaccatgggagggcgtcgtcgtcagcctataagtgttgctaggcggtatctccatttcaaggggctgatttggcttcgcggggaggtctatctccgtttcagggggttggtgcctgaatagccgggctccgaaaaccgcataataccgctgcaaatgatgtgtcatactcacgcattgcacgatcgggcagcccctcgaagaggagatagacctccccgcgaagccaaatcagcccctcgaaagctgattacgaacgggaattaccgtaaatgagcgctcgttagcgagataagccactgttttcggtgtccccgcgccatacaatggaaagctatggaacaaaaggatgttttgaaggcgctgcagcgtgatcatgcagccgaactgaagctggccgccaaacgtctcaaagggactgcccgtcatacggaaattatcccttcgccggtattgagcgagatgaccggtcatgagattctcctgaagccggaaaacctgcaggtcaccggttccttcaagattcgcggcgcgtacaacaagatcgcatcgctcaccgaagagcagatcgcccgtggcatcgtcaccgcatccgcaggcaaccatgcccagggcgtggcctatgcggcccgtgagcgtggtgcgaaggccaccatctgcatgccgcagatcaccccgccgctgaaggtcgatgccaccaaggcctacggcgccgatgtggtgctgtacggcgatgtgttcgacgaatccgccgcccacgctgctgagctcgccgacaaggaaggcatgatttacgtgccgccgttcgacgattacgaagtcatctgcggccaaggcaccatcggtctggagatcctcgaagacgtgccgaacgtcactgacgtggtcgtgccgctcggtggcggtggcctgggtgccggcgtggcgctcgccatcaagacattcaagcctgaagtgcgcgtaatcggtgcgattccggagggctccccggcatggaaggactcgctggccgcgggtcgtgtgtctccggctgaccatgtggtcacctccgccgagggcgtcgcggtcaagcatcccggcgatctgccgtttgcgctgatcaacgagttcctggatgatctggtcaccgtcaccgagcgcgacatcaacgaaatgattctgctcatgctcgagaagcacaagctggtggtcgaggcggccggtgccgtctcgctggccgcgttggagcatctgaatctgcgttcgcgcaagttcgccgccgccaccggcccgcacgtggtggtgccgatcatgtccggcggcaacatcgacacggtgaccatgggcgcggtgattcagaaaggtatgatcgcccgcggtcgcatcatgaacttcgaggtcgagctgccggatactccgggccagctcgtcaaggtggccaccctgcttgccgagcagcgcgccaacgtcattcagcttgaccacgaccagttcaaggcatccggccactacaccaacgcggtgtctctcggcgtcacggtcgagaccaacggccccgagcacatcgaccgcatcctcgtggcactcagggaagctggattccagcccaagcgcatctactgattccaataccgctggcgggaggccgcgcagaagtgtgctccaatacctcccgctagcgggaggtggcgcgaaagcgccggtgggtggttaaccaacaatcatcagttgcttaaccacccaccggcgctttcgttatgctgaggactacttgttctccgcaatcgtctcgtccaccaacttcggcagcgcgacggcgatatcctcatgaatcaagcggctcgcaagatggtcatattgcgtgtgacccatattcatgatggtgatgggcacgcccgcctgcgcggccaccggcacaatgctcgctgccgggtacacctcaagggtcgatccgattacccatagttcgtcggctttggtggccaagctgtacgacttctccatcgctccgtccggcagtgcctcaccgaaatacaccacatcagttttgataatgccattgcatggcatatcgccgcgatacttcagtttgcgatggcaatgtggatcgggttcttcatccaaacgggccatgatgtccgccgtggcatattcctgatggcacttcatgcaatgcgaggtgccgatggtgccgtgcaggttcacgatgacgctgtcgctgttgccggccttctcatgcagcgcatcgaagttctgcgtggccagcagcgtcagcatgccggcttgttccagcttgaccagcgccttatgcgcggtgccgggctgtgcgttccatactggtgattccttctgccagcgccaggagtactcacggtcttctttgttacgcagaaacagatcgatgtcgtaaacgctcatttgatcaggatgcttggtccacacaccgtccggaccgcggaaatcagggatgccagcggacgtggaaatgcccgccccggttaatacagcaatcttcttggtcataactacaggtatacccgtgattcatgaacgaaatccgatgatggagcgttgttgccatgcattgattgtgcgccggtggtgtggttgccgaacgatgaacatggagctgacagtccgaaaactcgtgcgacacgccagccgaataatggattcgatgttttccggaaacattcgaggggttacgctagccctatcagagcaaattgggctctgtgcgacacgccgaaggaaccgcgctgttatgccgattccttgggttcttgtgcgctttgatttgcgttgtggcgtggttgcgtgtaagttattcacctgttgccgctcagcgcggcgggttccttcctctggttggtttcctgtcttgctggtgtggtggtggtttgagaactcaagagcgtgtttgtactacttctttatagtcaatgattgccagttcattcctcgcctgattgcctgtcgtggtggtcgggtacccgggagggtttgatgaggggtgaggtttttttgagggcgtccttccttaaggacgtgctcgtctttttcttttttggaaatgatgtttgagagtcatctattcggatgcttttcatgaagttttttttgtggagggttcgattctggctcaggatgaacgctggcggcgtgcttaacacatgcaagtcgaacgggatccatcaagcttgcttggtggtgagagtggcgaacgggtgagtaatgcgtgaccgacctgcccca

SEQ ID NO: 3737 - DNA, 103655 bp, Unknown
  R150_10m  MAG No. k141_14102
aacacgcgataatatccgccctgccgcctagtttggtgaaccatgggtattgagaacacgcataagctgattgtcaactgcctgccactcaacgaaggagaacggcgcgctttcgccaaggcggcccgcgatgtgccgcaggaattcgtgggcgacgaagcgcaccgcggcgacatggtctggtcggccgctgttcccgaggagcttcgctcccgagctaccgcagtcatcggcaactttccggtctcgcaggcttcccaatacacccgtcttgaatggttgcagaccttcagcgccggtgtggatgcgtacatccgcccgggtgtgctgcctcgcggcaccatggtcaccaatgcgagcggcgcgtatggccaaagcgtgtcggaacacatgttcgccaccatgtgggcattgatgaagaacctcaaccggtatgcctccaatcagcgtgatcatcagtggcaggatgaaggcccggtattgagcccggaaggtggcatcgcactgattatcggcgtcggcgacatcgggtcgcatttcgctcagcttgcccaatccgtaggtatgcgtaccttcggcgtgcgccgtcatgcggacgtgccggccaagggcattgaaaagatgtatggcttcgagcggctggaagcactgctgccattggcggatgtggtggcgatggcggtgccgcgctcgccgcagacccatcatctgctgaatgcggatcgtctggggcgtctgaaatccacggccatcgtgatcaatgccgggcgtggcgacgccatcgatcccgaggccttggccgacgccttgcacaatggacggctccacggtgccggattggacgtcactgagcctgagccgttgccggcggaaagtccgttgtgggatgagccgcattgcctgatcaccccgcatgtggccggcggcaatcatttggaaaagacttccgaacacatcatccgcatcgccctgaccaacgtttcccgctatgccaaacagcaggaactgttgaatctcgtgcgatactgattcgcctgtatcgggtgtacatgaactcatgtacacggccggcgtgtcgcatcccgctacgactgcggcatcgagatgatacctgcagaggcgtggttgatcagaggcccaatgaacgtggcccgaggtcagtctcagtctgatagttcgtagccgttggcgtctttatgccacggcgagccgggcttgctgcacagaatgatgatgccttcaacaaagccccagatggcggctgcgattgggccaagtccgagcagaatccagccgacaagcgtcagcagcagctgggccacggccttgccggtgttgccgagatagaagttgtgcacaccaagtccgccgaggaagatgcccaacaggccggcagccaacttggacttggatgattgccacaccggggcggcggcatacggagcggcggtgtattgcggctgtgcgtaggcattcggctgctggtaggcctgtccatagccgggctgctggccgtagcccgctgcgggctgtgcgggctggccatactgcggctggccatactgcggctgagcgtactgagactgagtgtactgagactgagcgtatgcgccggcgggctggccgtattgcggctgctgctggccgtagcttccggcggcgggttgagcgtatgcggcgggctgtggggcgccatagccctgcggctgccgtgcggcatcttggccgtacgacggctgtgccggctgtgcaggttgtgccggctgcggaacactgtccgaaccgtacggttgttgttgattatcagtcatgtgggtctatcccttctcaatcgggaacggcagtaccttcttaccgtttctgcacaacatcatctcacgttttgcctaatagtaaaacctgccgcgctacgattgggccatgaaaagtttcctgaccagctggttgattatgactatcgccgccgccgtcatggtcgcggtgactcccggcatgaccccggtgggggagcctccgattctcggcatcgccgcgttcgctttgttcatggcgctgattaatgcgtcaatcaagccgattgtgcatctgatcgcactgccgtttgcgattctatctctcgggctggtcaccttgattatcaattggctgttcatgcgactcgccagctggctggcggtcagtctgttcggcgtgggcgtcttcgtacacggtttctggtggtcggtactggggtccttggttctgaccattgttgcgggaatcgtcgggtccatcttggatcagtgacggtgctcgctgggcgaatatgaataatggcggttggaatcggactgactccgcaagtggttccggattgttgatttttcaacgattcggaaccttttttcatgccgggaatcggtatacatttcggtatatatttgaaggcatgaacggcacggttttctatgacgcgaacaacaagcgatggattgcgcgatatccggcgggacggttcaacaccggaaaagtgatagccggttatgggcagacggcggaaaaggcgatggcgcggcgcgacgcggcgttgaaacgcgcgttgaacggaaccatgcgcggcggaaccatcaccgtccggcatgttcttatgaaatacatggcgtggattgaacagggaaacgacaggcggaacagcatcgcgcggaaacgcgaccggttggaacgctatttgaagccatacatgggaaaaccgatgaaatcgtttgacagcgatgatgtcggcgcgattatcacggcggcacgcgcggcatcgaccgacagcgcgaacagcaagatagcaaaaaccatgtggggcgaaatacaccaaatgtgcgattttgccatacagcgcggcatgattgaaaaaaatcccacggattatgtcattcgaccaaaatacaccagcgcggcgcggcgaaccaatgaacttcacatagacgaacgcattgaacaagggcgctggatgctggaacacgcggcacgcgacggcggaaccgcatacggcatgttattactggcatgtatgggattacgcgccggcgaaatacgcggcatggaatacaaatgctttgcgcacctgctggacggcgcatgggattcaacaaccatgaccgtccaacaaatatatgaccgcgatgtcgaaaccggcgaatggcgattgatgaagcatacaaaatcaaacgccatgacccataggacgctggccgttccaaaaccatgggcatataacattttctgcttttatgaacagatacaggacaaacacaaacttccatatggatatgacggattcgtgtgtttgaacaaggacgggaaacctcttacaagaaaccaacaatccgccatatggaacgatttaagacgggcatacatcaatgaacatccggatagaaaaccaatcgcatcaaccatgcgcatacatgacatgaggcatgtcatcgcgtccgtgcttgtcatgaacggcgcgacattggaacaggtgcgccccatactggggcacatgaacgcggaaatgacggcatattacacggcactttcaaccggattcaaccgcgcgacgatgaatgaactgccggaactcatgaaccacgggaacaatctattgaacttcattaacattaacaatgaaaacaaaaaataaaaataaaaaggaaaaataaaataagcaaaaaaaacgcgaacgcgaacaattccaacgcgcgcgaacaattataaccacattaaaccatagaaatctatgaaattatccggcgagtggtagcgcgttcttggaggattagaattgaacacatgttgaacacatgaacttgtttcatgtgtgataacgcgtgtgattcgtattatgtaatgatttttatgttgtttttgtgtgcgcctttcaaaccgggaaacaaaatggttccatatttaaagtggaaccatggaatcttttaaacatcaccatgtgttgacatcaacggtgatgttgaatatgatttttaattgttatggaatatttttcggattattaatatgaatatttgttagtccaggattcggacacagaattttatctatgattgaatcgatatcccatgtatgaaacggttcaaacaatgaataataatcctcatatgaataatcaggataatattcaaccaacgcaaccgcgttatccatattcttaatattaaaccatgccataacacggcgtgctttattatatactgcgttcaactattatgtttccttccatacctatgaatgaatacacatgaaaccattaaacataacaagcgtttaaacatagtcatcacgcgttttccctttccttcttcgcgtccgccatcatgcgatagacacacgcgtgtgaggttttaagtctcacagcgatgtcatcaatcgtccagccctgttcacggtattccaatgccttacgcgctttacgcatggtgtaagttttcggacgattacaaaccttacctgaacgcttcgctgcttccctgcctgctgctgtccgttccagtattaaagcatgttccatttccgcaacggcggagaaaatttgtgcgttcatcctgcctgccggtgttgatgtatcaacattctcacggatagttcgtatgttaataccgttcttttccaatacattcatattcaatactatttcattgaaattcctgccaaggcggtccatggaataacaaacaatcgtgtcgccctcgcgaaccgcttttgtgaggttgatccagccatcacgctggaagttcacgccgctcttaccggcatcagtgaaaatacgtttttcttccacaccagcattaattaaagcctgcttctgttcttccaatgaatagccgtgtattgcctgcgttccagttgaaaccctcatatacccgtataacataattattaatcctttcaatagaatatgtgtgttttcactatctatctatcaaactgtgttcaaaagccatagtatttgagaattagcattttcgccattgaaattgaaaatgaaaatccagtgtttttcccgttttttaaatgttgatagatagtattcaaaccgttcatcttattataacttttgaacggtggatatttccatgatgaatggaatgaatgataacactgaaatagaacacaataacgataggattaatacaatgagtgatgttaatgaaatgccaccagaatatattacagaacaaattaaagccagtgaatttgaggattgccttaaaatattcggtgaaacaacatttgaacaaattaagacattcaaccattgcgatgaaatcgtgcgccacgcaatgctattgaaaaccgttcaaacattaaatgaccgggttagttttcaaacagcatggtttgaatggcggcgcgataacaatgatttacttgttattgctcatactgaatgttgcgatgaaataatatgccattgcggtgaaatactacatgcgtttaacatgccattgaaaatacatggtattcaaataccgcctatgacattaaaatataaggattcatggttatacaaccttttaaccgcatatgaaaactatggttcaatccctgaatgctgaaatcaaatctgacggcgattctatgtgtttcatgagcaacgtatcgaaaacagggttttccgtgatttcgattaaaacacccgtccacaggactgaatattatgcgctctgtggacggcgtcgattttcacggattttcattcagatacaatgaaaccggtgatttgtattctcaccggtttcattatgaatatggattaatggattgttcacatacatatatatcaaacaatccaatcatattcgtttcaattaatcattttcgccgtatcactcacactattcatcaaatcactattttgattgaacatcaccggagcaatataaacaacaacagccacaccgataccaattgttaagaagttaatgaactggctccattgacgattcaataagaattttaatgaaagtgttcccattaccatgataataatcggcgcaatccattttgaaaccgctgcgttccaaacatcctgtaatgtagcaacgtcataagcataattaataatcataatccataatcctttgtgttaaaatagtttgtttatcatctatcaaaggaaacggcgtgccggtttgttccttgttccggcacgccgcaatatattatttgatgacaatgtttaaatatcatggtttcatttttttaaaacgccgccgtcaggtggacactattctatatatgtttaagtataagaatccctaccctcgggatataagggaatacggtgatacacagtgtaggctccgccggacgctactccatcgtttgccgggctctcgccgttttgctacctacatagaccccaacattagaacaagatttcacattaacacgttgtatcactgccgcgttaatgctatttaaaacctcacctgtatgtctattgcctaccaatgtttgaaccgctacattgaaaacgatcccaatattttaaacaggtttttaagttcttaattcaattatttcatacacattctttttaatcccattgacggcgtatgacagcctgattctcatgatttcaatctcattgcggctcatgtcagcctgatttacattacattgaaatgctgtatgaaaatgttcattccaatgaatgccattcatccaatcaatccgtgattttcaatctcattgacggttcacgattacctgaaaacaatcgccggattcatctcatgattggattaacaacttatgcgtaatccgacgtggttcatttttatctttatctatgttatcaatttgagaacatgaaccatacttacttttatggaattcgatgattcatgttcatcatgctcatatctatcaaacatgtgtttgaaaccattgaatattgaatagaatcattctatggcggttttaacgcggttctataacaaacatgactaatgactcgtgttcatgctgaaaagccgttagaaggccgtttaaacgcgtttttgaggtatgtatgacacaatccgctgaaccatcccatttgagccatggtttcatacactatgaaatgtgaatatattgtgaatattcatggcatgccgccgcttttcaaacagggcacatgaaccggtatatttttcggtatacttccggtggttttcaatacgaacacaaccggaaaccattgaaaatagcggttttatggcaacagacacggaatcggactgattccaaccgccattactcatatcaagctacgggatcgagcagagcgaacgctactcgcgcaccaagcggatatgctccacatcgtcgcgccgggagcgacggaacagcacgaaacgattgccgatggactgcaccacttcggcgttcagctgctcggcaagctcggcggcggcttccttggcggtcaggcccgaaccgtcctgcacggcgcacttgatgagctcgtgcttctcaatggtctcatcggcctgattgacggccgactcggtcaaatcgttcttgcccacatagaacaggggcttcagcgagttcgccatcgcgcgcagctgcttgatttgcttcttggtcaatgccatgggaatttccttacatctttcgtataaccacaccagcatagcaaccggtgctgtctgtgctgtttgccgccctacagcgcgatgatggcggcgatgtaggcgatgacggcgacggcgaacacgagatcttgcgcggcgatggtcagggcacgccagtgggtgcggcggatgctctcctcgtagcagcgggcgtcaagtgcgaggctcaggttgtccgcgtgacgcaacgtgccggcgaaaatcggcacgataatcgcgctcatcgccttgatacgctgggccagcgaaccggtttcgatggaaccgccacgcgcggattgggcatcgacgatggcacgggtctcgtcggtcagcgttggaatgaatcgcaatgccagactcatgaccaacgcgatctcctgggcgtggatgccgagccggttgagcgggctgatcagggtggcgaaggcgtcggtcatggcggtcggcgtggtggtggtgaggaacaccgcgcccaagatgatcaccaacgcgaaacggcaggcgtacagcacggctatggccacgccctgatcggtgatgctcagcgggcccagcgccaccaccggcgtgccggtgcgcaccacaaacagattgaccacgcccatcagcaccagcagaatcagaatcggatgaatggattcgagcacccgtaacgggttcaggcgtgccgccgcgataacggccagggtgatggcgatgcccagcgcaagctggaggggtgtgttcaccgcgaacatcgtgaacatgacggccaggaagcccaccatcttcacgcgcgggtcaagtcggtggatcaccgagtgcgcgggtttgtcaggggagacggactcggcggggaaggcagtctcggttgccgagatgctctcagcaccagccgcgccggcaatcggcatacgtaccacgcgatcggcgatatgcttggcctccgctcggtcatgggtgatgatgagcacggtcacgccgcgcgatttgagcgtgcgcaacagctcatggatgcgctccttggcctggacgtccaggctcgcggtcggctcgtccatgatgagcacgtcaggattgcaggccagcacgccggcgatggccaccaatcgctgctgtccgccggacaggtcgaaaggggagcggtcggcaagatgcccgatatgcagcaggtccagtgattcgcgcacacggtcggccacctcggcctcggcgagcccctggttgcgcgggccgtacgccacgtcctcggccaccgtgtcagcgaacagctgatgctccggatgctgcatcacgtaacccacatgccggcgcaattgcgccaattgcctgcgattcgccggcttcggacgcgcgttgcgaccgcgtttgccggtcgaggccaccggaacgccggccacctcgatgctgccggcggtcggcgcggccagcgcgcacagcatgcgcaccagcgtcgacttgcccgaaccgttcacgcccatcagtgccacggtttcaccgcgcgcgatggtgaacgacaggtcatcgataaccgcccgtttggccgaaggatagcgataggtcagatgcgagacgcgaataatggggttcgtcatatcaccgatgccgtcggagagcagcggcagttcggagccgtcttcgcgcttccgctggcgggggctgtcgttcgtaggacgactgggggcggcttctgtgccgataccaccctcggtctcgctttgcgagacagcctccgctagcgggggtcgattatcggcggctgcagtgacaccaacgattcgcccggcctccatgtgcacgatgcgatcggcatgaacggtctcatccggatgatgcgtgacatgcacaatagtggtgccgcgcgcctgcaaatcatccaaaatgcgcataacttcggcgcgtgcggattcgtccagcatggcggtcggttcgtccaataccagcatcgccgggttcatggccagcatgccggcgatggcggcgcgctgctgctgtccgccgctcatacgggtcgggtcggactgacgcaagttcgccaaccccacggcctgcaatgaatcaacgatgcgctcgccgatgagcccgcgctccagcccgagattctccgggccaaaagccacgtcatcctccaacacggtggtgaccagctgatcctcgggattctgaaacaccataccgatgctgcggcgggcagcgcgataggcgtcggcattcgggccggctgcgtacacgcgctgttccagtagcgtcacttcgccaccgtccggcgcggtcaatcccgcaattagacgggccaacgtggacttgcccgatccattcggaccgaccaagcataggcgctcgccggcatggaccgtgagcgaaacgccatccaaagcccatgaagtgccgcggtcatagctgaaacgaatgtccttgagtacggcggcggggggagcgggctcggcggaatcgtggaactcgtcggcgtcgaaggaatggggtgcaacggtcatgaaacagcaatccgtaactgataggcgaaaacgcagaatcccggcaagggccggagttctgcgttcttgttctttgagtggtcgttgagtggtcgttagtcgtggcgggcataggcccgtctcaggccggtcactgctgcttggacagcaggttggagaccggcttgtagatcaggaaggtgatcacggcgtgaatcgccatcttagccacgttgaacggcagcagaatcggcagaatcatcgcggccacagcctggtagggcatgtgcgcgtaaatcggcgtgatgatgaggttgcccaccagcgccaccacgatggccagcaccgcacccaccagaatgccgatggcggcacccttgcgcgtacggatcttacggtagatgaacgcggccggcacagacaggaacagcgccaccagcacagccatcagcgaaccccacgggtcggcgaacatgtgcggcacaaagccgagcacagacacgattgcggcggcggccggaccgtacgcaaagccggcgatcaggcagacgatgccggacgggtcgtacttcagccaagtgaccggcgtaatcgggaattcaatgaagctggtgaccatcgccagcgccacgaacagcgcatacatggcgatacggcgcgtggaccagcggccggaatcggccacaccagtggtgtgcgagccgagtttggcgctggtgctggcggtggacgcgctggccgaaccctcggcctcgggcgccacagaacgaacaacttgcatgcggatacgcgaagatacgctcataatgagccctcgtttcttccatccggactataccgttggctccggaatctcaccggatcagccgcttgcgcgggtcgcgggcttcccgccatccccgttatgaaacccggggtacaggttaccgccagtaaggaattgcaccttccctgaaactgacaggcttattcatacgccatgcgccggacgtacgcaacccgcgtttcactgtgcagaaattcgtcttgtgccggtcaagtgcaacaatgggagccatggctgaagtgaagaaacccaacaacaccattgacaagcttgccctgatcgtcaccacctacaaacgtcagcagctgctcgaggtactgttcgattcgattctggcgcttgagcaggcaccgtggcgcattgtcatcgtggacaatgagcagtccgatcagacggcggacatggtcgctgcgtttgccggcaaggtgaccggccagtggggcaccaccgtggccgaccagtccggcaacgaagagcgcgtggtctatgcgccgcagaccgagaacatgggtggtgcgggcggtttctccgccggcgtggccaaggcgtatgatctgggcgccgcatggttctgggtgatggatgacgatgtggccgtgctgccggacgccattgccaagctgtccaagtggaccgacaagcacgaggtgattcagggatcccgattcgattacgatggcggcccgttctactggcagtacgacttcattgtgccgctgggcatcccgaacccgatcgcgcccgccgcattcggcccggccggataccgagtgatggacacgctgtgcttcgaaggcggcctgttcaaccgccgtgtggtcacggaaatcggtctgcctgacccgcgcttcttcatctactgggatgacacgatgtatggctaccgcgccagcaaggtcaccaacccgattgtggtgcccgacgtgattttgcgccgtacgcgcgaaatcggcaactgggatatcgccggcgtgcgccagctcaactccacgtccgacatgaaccggtaccacatcatgcgcaaccgcggctatatggcccggtacttcatgacctacggcgacttccgtccgctggtgtttggactgggcaccgtgctcaccgcggccaaggaagtcattcgcctggtgatggtggatcgcgaacacctcaagaccggtttggtgcagattgccaagggctggtgggactcgcgcaagctgatgcacgaccccacctggaagcccatgccgccgcttgagtgacggccatgccccggcccgtccggcgcgtccgcgtgatggtcgcgttagactgggcgcaaccctacgaactgatgaaaacgtatggaaaggaaggtcaacgatgattgaaactgcacaggctttcggtgttgacattggcggttccggcatcaaggccgcacctgtcgatctgaccaagggcgatttcgccgagccgcgattgaagattctcactcccgaggtctccacgcctcaggccgtggccaaaatcgtcaagcagcagctcgaccacttcgaagtgcctgaatccgcacccgttggcatcgccttccccgcgccgatcaagcccggccagaagctcgacttcatggccaacctcgaccagtcttggattggcgtggacgttactgaagtgttctccgaagcctgcggccgcccggtcgtcgtggtgaacgacgccgacgccgccggcctggccgaagtccagttcggtgccgccaagggccaggatggtctggtcatcgccaccacactgggcaccggcatcggcaccgccttgatctacaacggcgtgctcatcccgaacaccgaactcggacacatcatcctgagcgccaagcatctggacgccgagaagtatgcctcctccgcgattcgcgagaacgaggaactgggctacaagaagtgggccaagcgtctgaccaagtactacggccttatggaaaagtacttcaacccggacctgttcaccgtcggcggcggcgtgagccgtcagagcgaaaagttcctgccgtacgtggatatcaagaccccgattgtgcccgccaagctgcgtaaccaggctggcatcgtcggtgccgcctactacgccagcaccaagcagcagtgagctgagttatttctgctggcgcaggagccgtattgaccatatgtaaggccgtccaagtatttcgggcggcctttttttaatgagtaattcgttcattaggtcgattatgtgttcattaggtcactcccattccaaacctgaattgcaatgggctcggaatggcggcgtttcaagcatcaacaattgtgaggctcgactagcagtgacctaatgagcgcgaaaatgacctaatgaatgtagctaggccgttattcgatgtggattgaagtcatagtatgtctgacgactccgctgccgtgccgcacgattgtcgtagggctggatgctggtggatatgaggcctcgatatacctggctcggcaggggtggttttatcgtggagggtatgagcgtgcatttctcttctcgtgtggatatttctgcgccgaatcccattgcggcggccgaggcggcagccaaggcaaacggcatcgcactcagcaaactcaacgattccaatccgacccgccacgggttggcacccgaattggtgccgagcgtgtatacggccgacccgcgtggaccgcgtgcggcacgagaatcattggccgcattcctcaatacggcaaacgtggtagacgcaagcagccctcagttggcttcgcccgccgccggcgagggcaggaacgagcgccatgccgctttcaccaatgtgaataccgccatcgagggcgccgacccggacgccctgtacctgctgagctccacgtccgaggcgtattcgtggctgattaagttactttgcgatgccggcgacgcggtgctggcacccaaacccggctatccgctgattgagtcgattgcacggcttgaatgcgtcgatacggtcgaataccagttgcaattcgacggctcctggttcatcgacatcgccgaactcgagcggctactcagcgagcccggtggcgaacgcgtcagagcattggtactcatcaacccgaacaatccgaccggttcgtacgtaaaaccaaccgagcgtgcacgtatcgtgacattgtgccgtgagcacggcatcgcccttatcgccgatgaagtgttcttcgattactctctcgaacctttccccggcgacgcacggctcgcgggggagcgcggcgtgctcaccttcgccctagacggattctccaaaatgctggccgcgccgcacgccaaagtcgggtggattcaggtgtccggacctgccgaggacgttgccgaggcccagcgtcgactggacgtcatcgccgacgattatctgccgatgggcgacatcatcgccgaacggattcccgcattattgaacgccgcgcccgcacagaccagacgggtgggggagcgcgtgcgcaataacctggccaagttgcacgagttgcttgacgccgatcccaacgggctggtcagcgtgctacgggccgaaggcggctggaacgtgctgttacgagtgccttccgtcatcgatgagaacgaactggtgttgcggctgattgacgagcaccaactcaccggacagcccggctacttcttcgacatgacctccaatggatacctggccgtttccctgctgcccgaaccggacgaattcgagcgtggcatccgcgccgtgctcaataccgtcgccgctttgctgcgataggccggtgtttgccggcaccacacctgtactccacgtacaatggcggcatgggattcttgtttagaccgaaagaactgccacacccggcatcgctgacgttcactttggaacaggccgggcatacgtatgatgatgggcacgtgggacttgctcccacggacatcaccatcagcgagcggcgggtggccgtgatcggactgaacggcgcaggcaaatccacattgctgggtctgctggacggttcgttgaaggccaacgccggcacggtgaccattgcgggcggtgaggaacgtcttgacccggctgtgaagaaggacgcgaagcgcatcgataatctggtcggcaaagttcgccgcgaggagattccgaacagtttctaccaagcggcgaatatttccgaggctgtttccgaagcgttgaaaaagcacaaggtgcccgagtcagaacgtcatgcgcgcatcggtaatctgttcgcgcattttgatttggcgcaggtctccaaggccaaggccggcgaattggactccgagaaacggcacctgctggctattgcggccgcgctgagctttgagccgagtgcgattgtggcggatgagccgagcaagggattggatgagattggcaccgcgcatgtggccaaggcgttgttcagctacaacaagcaggtgattttcgccacgcatgacacggatatgatccgccggcccgaatacgccatcgaccgcatactggtgctggacgagcacgcggtcgtgtttgacggagcgccggctgaggctgtggcgttttatgaggatctgatccgacgccgatacgagactagagcatcgtgaaccaagactgaacctgatgccagagcgtcggattgttgtcgatcatcgaatcgctgcgcgactgcacgaagcagctcagtatggctatgcccagcgcccacaatacggccagcaccacgacccagcgcatcagccaacgccacggagtgacgcgggcgatgccatcgcctgaagcggcgtcgttggcccccgccaatgaccggctcggttcgcgcccattgaccagccacagtagccccggtatggacgccagcgagatcagccagccgaaatcggcggaataccgccatcccaaaccgccgacgcggctgtcgaatacgaccagcaccgccgccacggccaagcaagacatcagccatggccgcatgccgtgtgtttccaatctgcgcagcaggggcagcgccaaagccatcaaggtcagtggcgtggccgtgaaaatcgcgccgaccatcacctcgtaataaccccattgcggcatcggggcgggagagcccgccagccacgggaaacgatccatgaagcgcagcggcaggaacaggtaataccagatgttggcgggcatatccgcggacggggtggtataccgggtcatatcggatatggagaactgatacgcattgccgaaattgaacggggaatcgaaccgaaccatgttccacgccatcagaggcgtcacgacgagaatggcgggaatgattaccgccagcggcgcgcgcaacgcctgcaacggcttgatgcggcgtgtgcgcagaccggtgcccagcgcgcgaatctgcggccagaacagggggaacgcaagcaatgcggccaaggtgaacgtcggtcggcatccgaaattcgccgcaatgcacaaggcgcccaaggccagtcgtggcagggagagaggcttggcatcgcccgcctgccatcggtccgatggtctcagcggacggcgggacgtgtccgcgccgagccatagccatagtcccagcgacgtcaacgtcagcgatgcggcgaacggtatctgatagaagttcgtgcgatacagcaaataccccacttgcgcgctcaccaacgatgagaccactactaacgacgcggccgccaccgaagtcttcggcatcacacgatggatgacgcgcagcaccagcaaggagaagaagatgatgaacagcagcgcgagaatatactcggcggcggatgtcggcagattatgaccggccagcagacgataggggacgaacagcagcactgcgggcaacacgccaaaataggaataccagtgaccgtcataatacgcgtaatcccagtagagcggactggctccattggcgagtagctgggcacgtgtggctacgtcataggggtgctcggtggcggccagttgttcgggaaccggcaagtcgagccagggccggccggcgaccagcgcatcggccacatgcccatactggtcgaaatcataggtgtaatcgccggaaacgtggaagacgagcgaagacgcgtaccacagttcgtggatgatggatacgccgataagcagggtaggaatcgccagaagccccacgaaagcaagtcgttgccgagtgctggacgggtcaagcgtgatacgccacaggcgcgatcccggcctccagacggcaatcatcagcaacaccaaggccatggcgagcacgcgcatccaattgatgacgaacggtacgcgcacgttggcgcgggcgtcggtgaccggtacgatcgcgccgcgctcttcctgaatccaaatacgcacgatgccggcacccggcgccttgacataatggctgcgaatagcgtcgggattcatcgactgggccttgccggtgatgccatcgacatccgcgcgcacatgaatggtcgccagcggtttgaagacttccttatcgtcgttcgctttggattcggcctcggcctgctcgcgggccttatcgatgaccttgctgctctcggtatcgatgcgtaggtaatccgacgtgccgtccgcggtcagttcaagataggccttggtcggatcggtgacggtcaacatgccatcattccggcgcgtgagacccgaacccagcgtgttatgcacggcgttcgtatccgtgctcgctccgagcgtacgccagaacggcaggttgaacacgatgcactccatggcggcgatggcggcgacggcggccagcaaggcgatcagcaggcgcaccaaacgcagccggtgccgggtatccgggcggctgggcaggtgccgttcatgattcgacggcatcggacggtctgcgcgagtgtggtctatggaatgcacgcatttattctataggctttattcgggcttgatgtcgggcaaacaagagacaatgtgaatcatgccaaaacgtacatcggaccatgggaagcacaaccgcacgccactgctgggcgggctgaaggattcgatgaacgcgctcgcggccgatctgggactgtccaagccgaagaagcacgatacgaatccgttcggcgatgccttgcgggagaccagtgagcgtaaaggcggcattatcgacgaactgactcgccatgcagtggcgctgagtcctgtaatcaagcgacgcaccttccccgaattggagaacgtgccggaagggctggtgcttggatgggcgcagctgccctccaccagaggccgtggcttttcgcttggcattttccccgaccgcgatcattttgcgcaggtggcgttcgccgatacgcatggccgcgtattcgtgggcaccgaccccaacatggacgtgcaggatatgcaggcgcgattcatgttcggcaaggaaaaggaagtgactctgccggacggtgagcggctgggcgaaagcgacgagccgcgttcacgttccggtttctcccgtgcaggccatggcctgggaagtgcgctgcatcatgggcgtggtttggggcgtggccttggtcatggtgctgacggcgtgaaggccattaccggtggcgtggtggggcgtgacgacaccggacgcatgacgtggctcgcctcatggctcaaggccggcaaccggtacacgcttgagcagatgcgtgccaatctgccgcctgtgatgcgtcatgatttggaataccgcgatgccattaccatcgcgttcttcgccacgtatatgttgccgcagatcaatggtctgctcatcggattcggttccggcaatatcttccgccgtctcaaccgtgaggcgccaatcggtgcgattcgccgttcggtgcgtgacactttggcggcacgagcccacggcatgcgggcctccggtctggaggatcacttcgccgatctgatgcgcgaagccggcgccctcgacaccacgccgggactggaagcggtgcatggcgccgaaccgttgcacctgtacacctcgacgtattcgagcggctatttctttacgtgggataagtccttggcattcgggcaggcgctgaaatccttgaagatcgaaggcaacctcaaccgattcgctgcggtgagcgcttggctggagcgcaacgcttccttggggcgcaaccctacggaagatacggtgacccgtgccgaggccgcgcaaatcgacatgaaactcattgagaaccctgcgattatggcgcttgacccgtatgatggcgagcaggagcgtcgggccgtgctgagcctgatcgatatcgccgcacgcacggctgggcagattcacagtgaattccctgatcctcgagatgtgctgacccagcagaacgtgccggattcgggtgtgacgaatgctgcgggcgctgaaagtactgagagtgttgagggcgctgtagagcggaccaataagagcgacaccaacactcaagccgctcggccttcgtattcgccggcgaggagcgacgaatgggtgtatcgtcagaccctctcctcactgttgcgccggttacggttgccgtatcggtttgatgtggagttccggtcgcgcttggattcgggtgaagtggccattggcttcaccactgccggcacctcgatgatgcccgatagccggtatgacaccactcgccgtacgtggcgtgcgctgagcagcgccgaacgcgcgtcgatgagcgccgcctacaacctgcgtgtcggcctgatgatggcagcgctgagtttcggcaccagcgaatccgtgcgccaggtgtcgttgcacatcgattccattggtcttgaagaggcgattgccgaacaggattccgccatcgaggcgatgatgagcgaggccctaagcgccttcgaacatctgcgcagtggcgatttggggcgtgtgggttccaaagccgaccccaaagatggtgatttccatggcgacccgacccgccccatcacccatgaggagacgttcgggcaggcggcgtccggtgacgaacgcggcacggccgggggaacaggcaacggtaccggaccgtctgcggatgctacggatcaggccgcggccgaatccgctgacgccgatggcgccgcgtccatcgattcgcagttcgaagacctgatgaagggcgtcgatatcgacgaaatggcgttcggcatgccggacgataccggcgcaggcgacgacctgggcggtatcggcggcgagggcgtcggcactgacgatgctgatggggccgccggcatggacgatgatccgatgagcgtgctgcgccgcaatcccaccgtgcgcaatatggtcaccgtcaccttcacccgtgatgccttcctcaagcgactggacaccgatgggcttgacaatcccgaggaaacctaccgcatgttcggtgccgtgatggacgtggacggcgaaggcggcctgaaacccatcagcgccgacttcgacttggcggacagccggttctctcccaccggatcccaggaggagcccgaactggccgaccgtcaattcagcccggcgaccgctcacgtgctgggcgcacagaatagtgccggactggctatccagcgagtggacttactgcagcatggcgtcaacgaattccacgatatcgccaggaacacgtcgctcggctccgtggaaaaggcccagcgagccatgcagatcatcgaatcgatatgcgatcccgaactgaccggtttggcctctcaggtcaccagtgcgttgatcgatggcaaggacaccccggacttcacgttcacgcttgccgacgatcttgacaaggagcgtctgcgcgcccgagacatgctgttctcgggccaagccgatcaggccatcgaagcggccgaagcggctgtggcccatttggatcaggtgtatgcggcaggccatggcgtacctcgatacttcaactcctatgccgagcgcgtggtctacaaccgactgttcgccacattggacgagcgtacggtgctcatcccggacaatctgttctacgcacacatggagctggctgacgtgttgagccagatcaagggtgccgaggcggccatcccgcacctcaaccgtatggtggcgtacgcgcccgcctacccgctctcacatctgaagctcgccatccaactggcccgcaatgaggattgggattcggcacgcgccgcctgcctgaatgctctgcgcgtggccttggaccgcgacgatgccgcgttcgcctactaccggttcgcgtacgccgaatggatgcttgaccggttcgacacagccgccgcagcctacattatgagcgatcacatcgctcccggggccattggttcgctggagagcgaactgcaggaactggtttcccgtgcggactcgcagtgcatgccggtgcctgaatcggtggagacggccgcccatgtgcttgccacgcatgatctgccggtctggccgcataacgaagtggctgacatcgtgcgtgacgccgcccgcgtgtgcgtggatgaaggcatgttcgtgccggcccgcacgctctcggtggccgtggcccgcatgaatgacggtgaaggcgacaacatcgacatcatccaagcccagttcctgcgctcgctatccgcgtagccgcctgaggggagttgacggtatagccggccgaggggagccgagcccgctaggatagacaaccatgagcacgaacgaacaactggcatgggatttcgacgatggggatgtggccgaggtccggcctgataccggtattgcacgttttgcccctggctccgaacaatggatagccgcactgcagcccactgacgacgacgcgatacgcctcgaccatttcgacgtgaacacgatgaccgctgaggccgccgcccgcctgtgggctcgcgtggccgcatgggtggaatccgatcagatcgcctactacatcgacgactcacccgtcagctccgacgccgcctacgacgcgcgcatgcgttgcctcgaacgactcgaagcggcgttcccctcattggacaatccacagtcgcccacccatcgcgtcggcggctccttctccaacgacttcgcctccgtgcgccaccccagccgcatgatgagccttgatgacgtcttctccatcgaagagctcaaggattggtacgattcggtgattcgcgacctcgattggcccgaatccaagcccctgcccatgagctgcgaggtcaaaatcgacggcctcgccctgaacctcatctatcgcaacggcgtgcttgaacagggcctgacgcgcggcgacggcgttaccggcgaagacatcaccctgaatgtgcgaaccatcggctccattcccgccaacctcggcggccccaaggaagacgttccggacttcgtggaaatccgaggcgaagtgttcatgcgctgggatgacttccacaccctgaacaacgagcaggaggacgccggacgagcgccctttgccaacccgcgcaacgccgccgccggctcgctgcgtcaaaaagaccctcgcatcaccgccacccgtcgcctgagtttctatgcgcatggtctggggcagctcacctgggggccggaccatccgcgcggcacccatgacgtggtcgccgaccagtcgcaggcctacgatctatacaccaggtggggcgtgccggtctccccgcacaatcgtgcggtgacctcattccaggagatcctggacatgatcgagtactacggcgagcatcgcggcgacatcgagcacgcgctcgacggcattgtcgtcaaggtcgatgacctgggcctgcagcgcgccctcggtgccacctcgcgcgcgccgcgctgggccatcgcctacaaatacccgcccgaagaggtcaacaccgaactgctcaacatcaccgtgcaggtggggcgtaccggccgtgtgacgccggtcgccgtgctcaaacctgtctacgtggccggctccaccgtggctcgtaccacgctgcacaacggatttgaagtcaaacgcaagggcatcctgatcggcgacaccgtggtggtgcgcaaggccggcgatgtgattcccgaactggtcggtccggtgcttgaacggcgcaaagggcgtgagggccagctgcgcgaattcgtcatgcccgagttctgtccttcatgcggcgcgaaactggcacccgccaaggagggtgacaaggacatccgctgcccgaatgtggaaagctgcccggcccagttgaccgagcgcgtgatttcgctggcctcacgcaaggcgttcgacatcgagcatctgggtgaacagtcggccatcgctctgaccaacccggaggagaaccggcctgattcggtggcgacctacgcgccgaacatcaccgaggttctggtcgcccccggcgaagagcccgaaccgtacgagccggtggaggggctggaattgccggccgtgcagaagccggtgttgtccaacgaatccgggttgttcgacctgacctccgccgatctgcgcgacgtgcgtgtgtggcgtgaggccgcaatcgtcgaagtgcatgagacggtcgatgcgaacggtaagaagaaaaaggtgcgtaagcgtgtcggcggctctggcctgtggcatcaggtgcctgccttctggaccgcgcccacgccggccaagaagctcacggccaagcagttggccgaacgcgcgcaagaagaggccgcagtcgaatctgccggaacacagggaggtgccgccagcgagacgactggcgcacctaccggggctgaggctccacttggtactatgccgggctttgccgcagcctcctatcccgagtatgacgtgccggccgacgcggtcatcgtgcgcgtggaccacaagaccacgcgcaccggcgtcacggatgtgccggtgatcgttcggcccggcgaaaacacgcgcaagatgttcgacgaaatggacaaggcccgtcacgccgacctgtggcgtgtgctggtcgcgttgtcgattcgccggctcggtccgcctaccgcacgcctgatcgcctcggcgatgggctcgctggcagccatcgaaaacgccacgattgaagatctgacggccatcgacggggtgggtccggaaatcgccgaatcggtggtgaactggttcgccgccgcccgcgagcccggcgactggcgcggcgcgactttgcgtgcttggcaggccgccggcgtgggcgtcgacgaggccgagaccagttcgctgccgcagacgctggccggcaaaaccgtggtggtcaccggttctctggagggctattcgcgcgactccgccaaagaggcgattatcgagcgcggcggcaaggcggccggttcggtgagcaagaagaccgattacgtggtgatcggcgcaaacgccggctccaaggccaccaaggctgaggaactcggcatccccatgctgggcgaagcccaattcgcccagctcctagccaccggcaccatctaaaatagccccctcagacgcttcattaaccccctctgatgagggggctgtcagcctttaggctgactgggggagagaaaaagcgaatcccgccccagtgtgacttactccactccctctggcatgccgccgcatcacacgctagggtagaacaggccctaaaggaggatacggatttatgagcgacgcacgtcagatcgaagccgacatctacgaacgcctgagcaaggtcatcgaccccgagctcggtcgttcggtcaccgacctcggcatgattgccgctatcgaagccgcgcccgcatcgtcggacgccggcacttacgacgtcaccgtgcacgttgagctgacggttcccggatgcccactgagcgagaccatcaccaaccagatcaacggcgcggtcagctcctatccgggcgtacagctgctgcctcatatcgaagtcggttcgatgagtcgtgacaagctggccgatctggttgccgacctcaaggccgaacgcaagcggaaccccttcagcaagccgggcgtcaagacccgcatcttcgccatcgcctcgggcaagggcggcgtcggcaagtcttcggttaccgcgaacctggccgccacgtttgcggccctcggcttcgacacggccgccatcgacgcggacatctatggcttctcactgccgcgcctgttcggcgtgcacacgcagcctaccaatctgaacggtatgcttatgccggtcaccgcgtggggcgtgaaactgatctccatcggcatgttcgccggtgccgaccgggcgattctgtggcgcgggccgcgactgcagcgctccttggaacagttcctgtctgacgtatggtggggcgagccggacgtcctcttgctcgacttggctcccggcaccggcgacatggcgatttccgtggcccaggcgctgcccaacgccgaactcgtggtggtcaccaccccgcagccctccgcctccgacatcgccgtgcgctccggactcgtggccctgcaggtgccgatgaaggtgcgtggcgtggtggagaacatgagctactacgagcacgagggcgagaagctggagattttcggtgccggcggcggtcagcgcgtgtctgaacagttaagcgcggcgcttggctatgacgtgccgctgatggcccagctgccgctggaacccgaagtgcgcgagatcggcgaagcaggccgtcccgcggtgctggatgtcgatggcgccttgcgcacggatggcattggccagaccttccgagggttggctgaacggctgttggcagtgtgagcctgcgcggcctcacacttttgtaggcggcgctggcgtttaagtccggctcgctgctggtgggcgaatcgcttgaccacagcacccgcgacctggtggtcgaggcagtggagcgcactgccggcgtggataggctgcattaacctgcaggccattcacatggacgaggacgccgtgccgcgctgccttggtatgaatgggggatctacgtcgagcccgatgtctggcgggcacctcgcggtaaatagcggcatagcgcattatcggtgcgatgctaagaggtaatggcccatgagcggttccaatcggcgagattgcgttgccgggacaccacgacatgggccatctcgataaaacgatgccgcgtgtcggctgttctcaggtcatccgcagtgacgagaatggcgatccagccgagcagttgcaatgcgtttcgctttgccgcgtcaattcgcatttgtgccggatcggcgtgataggctccctgatattcgaacgcgacgcggcagtccggatatgccatatccaatatgacgtatgagttgccgatattcacgcgatagttggcggtggggcatcccaagcccgaatccttcagcatcccaaacagcgtgttttccggcggagaatccgtgttctctgtcatgtagggcagtgcctcgtggcatttgttacgacctatgaaccgcggactgatttccaagtaagtatcgaaatccttgcgagtggccattctgcgccgtttatcgcggctcatcaaagaggctccaatggccgcaagttcctccaatgtggagtattgggccatctgagcccacatcatgaccggcgaggcaatccagaaatgttcatagtcctttttgcggatatccagttttcccttaaacacatggaagaccacgtctttgattcgtctgcgtttgttggcactggaaacacaggcgtgcacggcatcaacagatagcgtgcaatgtcgggggatgggcgcgccgtagtagttggccgcattgatgtatcccaccagcaatggaccttttgaacggcgcgcagcatcattgcaacgttcacgttctgctcggcgtcggccgacaatatcctcatgcataaaagagctcatgatgcgaccgtaaagctgatttggacttgaatgcaagccaggcagggcaatgtggttccagcttatggagttatccacattgtctatttgcgcagagaacggttctcagtagtatctgtgcgctcaaatgaacaagaacataacaatctcacatcatcgcaaatggcgacatggcagtgattagggcatattccatgtgcgcttcgggcgtagagaagtgcgcacagatattattgagaaccgttctctgcgcgcctactctccggtggagcctctggccacgacctcggtgggcaggaacaccgtgcgctggaacggtcggccctcgatctggtcaagcactagggtggccaagctgacgccgaatgcgtccattggctggcgcacggtggtcagctgcgggtgcagggctgtggcgtcggcgctgtcgtcgaagccggcaatggcaatatcgtcgggcacacgcacgccgcggtcgagcagataattcatggctccagcggcgatgcaatcactgccgcatatcagcgcgtcgatatgatgctcggcgaggagctcgggcacgctggcgtcggcgccggcaagtcggctacccgacggctcagccagcgagtccagcagccgcacgacggcgttgcggccatcgggccgggtccagccgtcggaccgaatgaccagtgccgggtcgaaatcgccggccatcgcatcctggaatccgagcagtcgttcgtcggaacatggcaagtacggcggtccgatgatataggcgattcgccgatacccgcgccccaacatatgctcggtgagcttgcgtgaagcgagtcgattgtcgatatcgacggtggggaaggggatggcgctgccatagccgacgccggaaaaggcgaccggcacgctgatattggcgaatctctgaaatagcgggtcatctttatggaacgtgttgagaatccatccgtcggcgaatccgctggaggcgagtctggcgatgcgtgcgccggccgcaggggagtcggagatcagcgtgatgagttgataatcggcattgccgagcgtctggttggcgttgagcaggatggtgttgatattggggtcggcgattagcgaatccggctgcccgtgcaccacgaacgccacggtttgcgtgcgttggcgtaccaatgatcgggcggcgttgttcggcgtgtagttcacctgcttgacggcggcggcgatgcgctcggctgccttggccgagacatgcggattgccgttgagataacgggagacggtggcgtaggagacgccggatgccgcggcgacgtccatgatagtggccggcttacggggtatggccatgcccgtctccttcctgtcctagggccattcacagtgattgtaccgcgcgattttcctgatgattccgcatggcccatgtccggtgcctgtggattgccgtgccggcgtatgaaagtcggtaaacattctctgccgtaagggtgtacgaagtaaatagtaaaagagatttaccgatattaagtgaagtacgacacgcacatgatatttgtaaacctttacgtgagtgttatactccttctcgtaaacgtttacaagaaatcaccagtcaatggagacggccagatcaagcgagccgcaacggttcacaactggacgggaaggaacatcatgaagcagcagcacaacgtacgccccgccatccgcagggtgctccaggccacggccatcgtcacggcagcggcccttaccctcgccggatgctcgatgggcgcaccatcctcggacaccggttcgagcgatggcaagctcaccgtctgggtcatgcagggcgatcaaagcgaggccaccatcaaggccatcaacgaccagttcaccaaagagaccggcgtcgaggtcaacatccagaaccagcagtggaaggacatcagcaccaaaatcaccacggctctgtccaccagcaccccccccgacgtgctcgacctcggcaatacgcaggtcgccggcttcgcggccagcggcggcctcatggacctgaccgaccacgctgacgagttgcgccagggcgtcacctggctctccggtctggaagagcctgccaccgtggacggcaagctgtacggcattccggccctcggtgccgcccgcgcagtggtctacaacaagaagacctgggccgcggccggcatcaacgagccgccgaccacctacgccgagcttgaagccgacctgcagattctcaaggacgcgcaccaaggcgaggacttcaccccgttctatgtgccgggtgccgattggaagaccgccatccagtgggtgtgggacgccggtggcgactacgccgtgcagaaggacggcaaatgggtcagctccctgtccaccaaggaatcggtgtccggccttgagcagtggcgtgaattccagcacaagtggtcatccgaagcctcccgcccgctcgacaccgatagccccgacaccagccagctcatggccgaaggcaagatcggcgccgtaatcggcaacagcgcctccatccgcgtgattcaggaatacaacaaagacatcaccgccgacgaactcggctccttcccgatgcccggcctgagcggccagaaccagccgtcgatgatggccggctccgtgtggggcgtggcccagaggagctccaagcaggatctggccctgaagtggatcaagatcgcctccagccctgacatccagaacgactacgtgttcgccaaggacggctacctgcccaacaacgtcgaaggactggacaaggccatggcctccgacgacttcccgaccgccctgaccggcttcttcgaggccgccaagcgcaccaaggccacgcccgcctccccgcagtggaccaccatcgaaagcgacggctcgctgaccctgttcaaggacatcgccaccgacaccagcaaggccgaggcctccgccaagaagttcgacgaacacgccaacgagctgtatgccaagtgatgggttggaccatgacaagctcaacgcaactcgcgcacggcgaggccccggcctcacggccggctaagaaacgcggcaatcgcgccccggcgttcctgctgacgcccgccggcatcgtcatcatcgcactggtggtcatcccgctgggattcatgatcttcacgtccttcacggatttcagccagcgcacgctgttcaccggcgaattcgacttcgtcggcctcaagcaataccaatccgtactcaccgacccggccttctatgcggccctgctacgcaccttcggcttcaccgcagccctcgtggccggcagcgtgctggccggcatgggagtcgcccagctgatgaccaaactcggcggtgtgatgcgctacctggtcatcttcgtgctcatcttcgcgtgggccatgccgaacgtcgcatcctcggtggtctggaagtggctgttccagcccggttacggcgtcatcaactggctgctcacccagctgcacgtcttcggcgacatgaccaacacctcctggatcgacaacacctggctcgcatttctggagatctggctgctcgtggtctggcaggccgtgccatacatcgccatcacgctgtacgcggccaccacccaggtcgaccagtcctgcatcgaggccgcccagctggatggctgcagcaagctgcgctgctactggcagatcgtcgtgccgctgatctccccgagcatcatggtcatcaccatgctctcgattatctgggacttcaacgtgttcaaccagatctggctcatctcgcagggcggcccacaggacacgaccgccaccatcggcatcttcacctataagaaggcgttcgtcagcttcgaaatcggcaccggttcggccgcctccgtgctcgtgaccatcgtgctgctcgcgctgacctccgtgtacatccgttacctgctcaagtcaggagaggacctatgagtacgtcaatgagtgcaagtcctgcacaggccgtatcgcaggccgcagcgcagtccgcatcaccccgccgccgaaccaaccccggcaagatcgcgcgccgcgccggcaccactatcctcgccctgctgttctgcgtcgtatggttcttcccggtctactggatgattatcaccgccgtaaagcctcgcgatgagatcatgaccacgacccccgtgttctggcccacgcacctctcgttcgacaacttcatcgttgccgtgacccagacctcgttcctgaccaacctcaagaacagcgtggtcgtgaccgccatctcgatcgtcctgtcgatcatcgtcgcgttcttcgcgtgcgcggccctgaccctgtaccgcttccgcggccgcaagccgatcatggtgttcgtactggccatccagatgacctccggcggcatcatcccgcagttcatcatctacaaccagctcgggctgctcaacaaatacagcggtctgatcttggcgtacatcgccatggtgctgccgttcgcgatctggaacatgcgtgggttcttcctgaacatcccgaaggacatcttcgaatccgcggccgtggaaggcgcgaacgactggcagatcctgtggaagatcaccttcccgctggccgcgcccggcatcgtctcgacctcggtgttcgcgttcatcaacgcctggaacgactacatgatcgcctatacgttcatgaaggaccagtcgaagtacacgctgccggtatggctgtcgtccttctcgacacccaccatgggcaccgatttcggcgggcagatggccgcttcggtgatcttctcgctgccggtggtggtgttcttcatgctcatccagcgtaacatcatgaagggcgtgacgaccggtgccgtgaaatagcgtatgccgccgtacctcaccaacgattcgtccgctgatggcggcgcgaccacgtgtcgcctgccattagcggacgaacaataataaaaacagtatgaaaggaacagctgtgcccacattcgaatatacagtcgatgccgcaacgctgtgtctcaccctgattcccgctccggtgacattggaatacacgcatggcacggctatgatcgggtccctggtgacgatcgagaaacgaattcccgaatatgccgccaccgaaggtgccgatgagacttgggaaacgctgccgattgagcagctgtccagcgagctcgagcgttactgcggcgtcaccgtccgtacgcgccgtgtccgtgcagccacaggtgaagacgacgccagcgccaatgccgccgaagatgcgcgagatgcgcgtgcgggtgcgccggcagcgatgaacggcaccgtcatatccctgggcctagattcacgattggcgcatgacgaatacacgctggatgtgttcgcctcagataccatcgccgtgcgtggcggcggcgaaagcgggctgcggtacggtctgcagacgctgcggcagatcatcgggcagacctcgcgtgccattccctgcctgcatatccaagacaagcccgcgttcgcggtgcgcgcctacagtctcgacgtgacacgcggacgagtgccgacgatggagttcctcacctggttcgtcgaccagctggccttatataaatacaatcagttccagctatatgtcgagcatgccttcgcgttcgtcgagctcagcgaggcgtggcgtggcaccgatccgctcacggccgccgacatcacgtatctggacgagtactgcgcgcgtcgcggcatcgagttggtgccgtcgttggccacgttcgggcacatgtacatgaatctgcgcacccgtgagcatcgcgggctgggtgagttccccgaagacgccgaccgcccgttcagcttcatcgaacgcatggagcatcacacgctgaacgccgccgatcccaaggcccatgatttcgcctcgcgcctgattgaggaatacgcgccgctgttccgttcgaagtccttcaatatcggcggcgatgagacgttcgacttgggacgtggcaggtccgcgcaggacgcgccggaagccggccgcgatgaactgtatgccggtttcgtcagggatttgtgcgaaacgctcgcccgccatggtcggcagccgatgttgtgggcggacatcgcgctcgaaagcccgcgcacgatggatctgctgcccggcgacatcacgatgctcaactggatgtacgagccgcagatcgacgagagcaacatccagaccatcgccgcgcagggccgtcgccagttcgtgtgccccgcggtgcgggcttggagccggttcttccccgattatgcgggtgcctggctgaacacgtatcacatggcattggcgggtgtcaagtatggcgcggaaggcatggtggtcaccgattggggcgattacggccacgtcaacgatccgcgtctgagcgtgccgggcctgtgttatggcgctcagaacgcgtggaatccgattgagatcgatgcgcatgagatgaaccgtcggatctccgttctggtgtatggcgacgagtccggtcgcatcatggattgcctcgtccgcattgactccgatggggtgtcattcccctgggaccttgccgtgcaggtgctggagctggaatacggttccggcaccggcatgctgaatacggatgtggcatcgtatgtggaacggtcgtgcgggggagagctcgtgtttgaccgtacgctgggatgcgccgatgcgcgccgccggctgctcctgcggaaccatgcccgactcgaacgacgccgggattgcgaccgggcgttgatcgattgcggcagtgcggttgttgcggtgctcgatggctcggcacgaggaggattgaacccggaactgctgtgggtgatgctggatgggcagcggttgttcaatagactgggcgaggaactgctggtactggctggcggcgaggacgcctgtgacaccaaggatgtgaccggccgtgcgctggatgcctcgcgccgcgcccgtcttgccgccgatctggagttgtggttcgaacggtaccgtgtgcagtggctgtccatcggccgctacgccgaattggcgcgtatcgcccatgtggtgtggtcgtttgcggacatattgcgtaggggagcgctatagggagctcacagaaattcggtcctgctgagaacaaggtgaggcttacgcgccgtcaaacgcacatggtgatttcaaaaaatggcgaattgctgccattcttgcacctgtgcgtttgatgggaaatgtgcgtatgcctcacattttttgcataaagcatgaaaatgtgtgagaccggcgtatataacgtatgataaagagtcaacattcgtggtgtggtgggtccattaagggggtgtggtggtggcaggtatcaaagatgtggcggcacgtgccggcgtatcgattagcacggtgtcgtatgtgatgagcggaaagcgctccatcaaagaagagaccaaacgaaaggtgctgaaagcggcgaaagagctgggatatatgccgagtcgcactcaggagctgcggcatagcggcccgaccaaggttctggcgttgagttcgccgctccatgaatacaccgattactcgaattacgccgtgttcttctttgcgctcgccatacgcgccaagcgatatgggtatgaccttctgctgctcatgcacgaatacggcgatcaggaactgacccgggtcgccgccgaaggcatggtcgatggcatcctgctgttggatgtgctgatgtgcgatgcccgtgccgatgtggctcgcgctctcgacatgcctgtggtggcggtcgggtacccgagcaattccgatgcggtgtattcggtggatttggatttcgagcgtatgggtcgcgaggcgatggagaaggcgtatgcgctggggcatcgccatgtgctggtgtccggcgtggacagcagcgcgtatgaagacggctccaattacctggtccgttttcttgacgccgcaaagaaaaagggcgatgatctcggcatatccgtgatcttcaagccctctaccggcaatgggcgtgacgacgtcaatctgatgttggatgagacattccttgaagacccggcgatttccatgatcatttgccagacgaatgcggcgcatgtggccaacgtgctcaacggtctgcaggatcgtggattgcgcgtgcccgatgacgtttcggtgatggccgcatgcacgcatgggctgggatctttgccgcgtggtgtggatgagatgccgatgatgccgaccgaaacctgctcgcgtgcagtggatctcatgatggaggtgctcaacggcgaccgtgacgatgtcggccgtgtggagatgcttccttcgcgttatatcgcacgtggcaccatggcgaaatgctcgcgcagctgacaggagctcgggtgtttatggctattcgccttatgtgaatagtcacattttatgcagtattccgaacatgaattaacagcgttaagaatgagagcgctcacatcgaaaagtcgttgaaattaacgtcgaaatttatcgaaataatttgagaacgtcgttgccaatccgttatatttccagtggatggcatttcgactggtttcaataatcgtcgaaatgttctctcatcagtaaagaagctgaaaaggagaaaacgatgaagtcgactcgcaaatttatcgccgctggacttgcagttgcgaccatgatcggtgttgctggctgtggtggcagcggtgaagtcgcacaggaggagaaccccacctccatcaagatctggcactacgaggaatcgaccacagcgcaaggcaaggcgtgggacaaggctatcgaaatcttcgaaaaggagaccggtgtcaaggtcgaattcgagaagaaggccttcgaacagattcgccagaacgcctcccagatcctcaactccgacgacgctccggacgttatggaatacaacaagggcaacgccacgtccggcctgctcgccagccaaggcctgctcaccaatctcaacgattacgtgtccgaatatggctgggacaagatcattaccggttccttggccgacaccggcaagtacgatgagcaaggcgtgatgggctccggcgactggtacggcatcaccaactacggtgaggactgcctgctctacttcaaccaggacatgttcgacaaatacggcatcgcgattccgaccaccttcgacgagctggaaagcgcgatggccaagttcaaggagaacggcatcaccgcactgtccgtcggctccgccgagtacccgacccagcacctgtggtggcagctggtgctctccaaggccgatgacaagttcatcaaggcctacgagatgtacgacggcaaggtcgattggaattccgaaccgctcacctacgcaaccgagaagatcaaggaatgggtcgacaagggctacatctccaaggattccaccaacctcaaggctgaggacgccggccagaacttcatgaccggcaccaatccgatcttcttctccggcacctggtggcacgctcgcttcaaggaagaggccgccggtctgaatgtttcctactccaagttccctgacaccaagaagattgtcggctcctccggtaacgtctgggtcattcctcagaactccgccaagaaggatctggctgccaagttcatcaacatcaccctgagcaaggaagtccagaattacatggccgagcagggtggcctggccatcaactccgacgtcgattccatcaaggatgagggcaccaaggaattcgtggcccagttcgatgacgccgtcaaggaagaccagctcggcttctacccggattggccgacctccaccttctacgatgagctcaatgcctccctgcaggagctggtcaacggcaccgccgacgtgaagaccgcgctgaaccagatgaaggacaactacgacaagggccttgaatcttccggcatcgtcgtcgattagcattcgattctttcctcttcccttcctccaataggcgaacgaaggcgtgtggtcggtttctccttcccttgccgccacgcgtctccgttcgtgtcccaacaatcttgcatgctctacgtttagaagtgtctgatgaaaacaaagaccaataaagccaagcacccggaagaaaccgcaatgtcgcgcatcccgggcagcccttcgaatcgtttctggttgtacctgattcccggtgtggcaatgctcacctggatcatcatcgttccgggcatctggaacatctatctgagtttcactaactatcgcggcattaggccgccggtctgggccggcctcaagaactgggtccgactgatgaaggacgataccttctggatttccttccgcaactcgatctggatgatcatcgccatggtggtgatcccgattctgctcggtctgatcctctcctcgctgatcttcgacgttgtgcagaagaagttcagccccaaggccgcgtccacgatgcgcgccgtctactacttcccgcagctgctgcctatcgccatcggctccctggtcatgggttggattttccgagctgagaacggtgctctgaactcattgctcagtgccataggccttggaagcctgcaacatgactggcttggcaaaccggatacggccctgatcttcctgatgctcatcatggtctggattcaggtcggctatccgttggtcatcttcatgtccggcctgcagcgcgtcgatccggaactgtacgaggccgccagcctcgacggcgccaactggtggcagcgcttcagggccatcaccctgccgtccatcaagccggagatcttcgtggtggccctcacctgcaccatcgcggcactgaaggtgttcgccccggtgtacatgctgaccaagggtggccccggcactaccaccatcgtgccgtcctactactcctacacccagttcttccaggtacagcaggtcggctacggcgccgcgattgcgaccgctctgacagtcgtcatcattatcgtggccatcgtgttcaccaaccttcagcagaaggtcgaagctgaggacggagagtgattgaaaaaatgagcactatgagcgcagctgaattgaagaaaatcgccaaagtcaagaagaaccgcaccgccggcgactggctgatcatcgtactgctgattatcggcggcttggtgatgctgttcccgttcgtcgttctttgcctgaacgccttcaagacttcggccgactacaacgccaacggcccgctgtcctggcctgcctcgttcacgcttgatggcttcatcaagttctggacccgcgtcaacttccccgaaaaggtgtggaactcgatctggacctccggcctggtggcaatctttgccgtggtgctgtccgtgttcaactccttcgccctcggcatcggccgagtcaagggccgtcgctggatcattctgttgatcatgctcgcgaacatgctgccgcaggaagccctcctgtacccgctgtacatcatgttcaaggaaatcggcctgtacaacaacccgtggtccatcgtcatcatcttcaccgtgatccaaagcgcattcggcacatacctgttgtcgtcggtgtacggcaccttcccgaaggcgattctggaagcggccaccatcgatggcgcaagccgctggaagattctcaaggatatcgtcttcccgatttcgaagccgaccctggccgtcatgctggtgttcttcttcatctggacttggaacgactacatgattccgatggccttcctgatcgacaactcctcgcagaccgtcccgatcgccatcgcctcgctgtccggcgaccgtctgatggatgtgacgaccacggcctccgcctcgctgatcagtatcgtgccgaccttgattttcttcctcctcttccagaggacgctgtcgaacggcatcaccaccggcgcggtgaagtaaggtcattcgcacaacaggcaattcaatcaacaagcagtacatattgattttggtttcggccgccttgttccctgggggtcgaaaccacctctccaccaaggagcagcaacaatgaagttcaccaacggctactggatgattcgtgacggcgtcgacgccctctacgctcgtgaagcctacgaactggcggcggatgccaccaccgaaagcctcaacgtcctcgccccgacctccgtggtgcgcggccgatacgataccctgaacctgcccacattcaatgtggacatcaccacacctgcggaaggcgtgattcgtgtgcgtgccgaacactggcagggtgccaccgaataccccggattcccgctcaacgccgacaagcccggcagccgggattacgtgactgtcagggctgatggcaatggcgacggcgaagtcggcgtcaatggcgcggacgtcacgctgaccaccggcgggctcacggcgaaggtcgtcaagggcgcgccttggaaccttgccttccttgatggggacggcaaggtgctcaccgagtcagcaggcaagtcgctggcccggttcaatcttggtgccggggcgaacgtcaccgcccagccggtcggcgaattcggtgtgagcatggacggctccgcccatgacgagtccgacgtgttcaccgccatccagctgcatctgtcggtcggcgaagacgtatatggcctgggcgaacgcttcggcgcgtacgtcaagaacggccagagcgtcgacatctggaatgaggacggcggcaccgcttccgaacagggctacaaggacatcccgttctacatgacctccaatgggtatggcgtactggtcaacaaccgcggccacgtctcctttgagatcggttccgagaacaccgaggccgtgcagttctccgtgcccggcgaggccatcgacttctgcgtgatctatggccccacccccaagcagattctcgaccgctacaccaagctcgtcggacgcccggcgaatgtgcccgcatggagctacggtctgtggctgaccacctcgttcaccaccaaatacgacgaggccaccatcaactccttcatcgacggtatggccgagcgtgatattccactggccgccttccactacgactgctactggatgcgcgagttccactggtgcgatttcgagtgggacaagcgtttcttcggcgacatcgaatccacgctgaagcgcctgcacgaagacaagggcctgcacatctgcgcttggatcaacccgtacatcggccaacgcggcgaaatgttcaaggaaggccgagacaagggctatctggtgcgcaagcccaatggcgaagtctggcagaccgacttctggcaggccggcatgggcttggtggacttcaccaacccggccgcctgtgaatggttcaaggacaaggtcaaggtcctactgaatcagggcgtggacgccatcaagaccgatttcggcgagcgcatcccgcgcgacgtcgtctggtatgacggctctccgaagctctccatgcacaactggtacacccagctgtacaaccaggccgtgttcgaagccatcgaagaaacctacggcaagggcaacgcctgtctgtatgcgcgctccgccaccgtcggcggccagcagcagcccgtgcattggggcggtgactgcgagtccaccttcaacggcatggcccagtccttgcgtgccggcctgtcgctgacctcctccggcttcggcttctggagccacgacatcggtggcttcgaaggtgcgttcccggatccggccgtctacaagcgttgggtggcgttcggcatgctcggctcccactcgcgactgcacggttccaccgtgtaccgtgtgccgtggctgttcgacgaggaagacgagaagaacggcgtcgcattggtgcccggccagaccgccgtggatgtggtgcgcgagttcaccaagctcaagcttgaactcatgccgtatgtctaccagcttggcctgcagcctcatgtgaacggcaccccggtcatgcgttccatgttcgtggagttccccgatgacccggcatgccgcacgctggaccgccagtacatgttcggtccgtccatgctggtcgcccccgtgttcacctactccggtgaggtttcctactatctgccggacggcgtgtggaccaactggctgaccggcgagaaggcgcagggtggttggcgcaaggaaacccacggctacgattcgattccgctgtgggcgcgcgatggcagcgtcatcgtcaccaaccccggcgaaaccaagccagaccgcgtgtacggtgagaacgcgctggtctccgtgttcgtggatgatgtggagaccgccgaagccgttattacggaaatcgacggttccgccgtaaccttcaccgcgcgccgtacgccggctggcatcgaggtcgcgagctccgatggccgtccgttccgtgcacgtttgggcgcgtctggcgatatcgtcgacgttccggatggcagcgtgatgctgtgacgcgtgctgtgcgtgacgtgcgtggtgcatgtggtgctgtaacacttcggtgttgcggcaccacgcttttgtgctgatatagggatttgtgctagtcgaatccgcgaaatgttcagtaaatgttcacgtagcgaaatcggcatagaatgcgagcaaacgcataacggcacggtgctgttcctgcgtacaccaacgccaggcgaaccgccggaaagaaggggtctccatgattgagacagcggacgatatcaagacgattgcgaacgtcggcacgggaacaatgggccatgcgatcacgttgcagttcgcgctggccggatatccggtgcatctggtcggccgcagcgaggcctcgctggagaaggcgatgaaggcgatccgttctgatgccgaggacttcgccgaagccggactgctcaaggccggcgacaccgtggacacggtgctggcccgcatcaccggttacgccgactatgcgagcggcgtggcggacgtggacttcgtcatcgaatccgtggccgagaaccttgacatcaagaagtccgtctgggccgaagtggagcacgccgcccccaaggacgcgattctgtccacgaacacctccggcctgagccccaccgcgctgcagtcggtgatggggcaccccgagcgcttcgtggtggcgcacttctggaaccccgcgcagttgatgccgctggtcgaagtggtgccgggtgaaaagaccgatccgaaggtggtggacatcaccttcgacctcatggccaagatcggcaagaagccggcaaagatcaagaaggaatcgctgggctttgtgggcaaccgcctgcagctggccgtgttgcgcgaggcgttctacatcgtccagcagggcatagcggacgcggccaccgtggacgacgtgatgaagtacagcctcggccgccgctggaacctggtcggcccgatcgccagcatcgacctcggcggactcgacgtgttctacaacatcagcacctacctgttcgacgacatggacaacggcgccggcccgagcccgctgctcgccgaaaaggtcaaggaaggcaacctcggtgccaagaccggtcagggcttcttctcttggcagggcgaggacggcaagcgcatcatcgaaacccgcaacaaggccctgctgcgtgcgctgaaggacgatgccgcggaagcgtaaagcgcgagcgacgaattctcgcgtaacgtgtgctacgatggaaggctcccttcggggagccttcgttgtgcttgcgttgttcttcggtccaacttttcgacatgcgtatacgttgttgatagcgacaattgcggaaaacgcttacagtatgatgtgcacacggacaacaagccgatgattgcaaggagcggtgacgacgatgacatccacagaacacaatacgcgagccgacatgttggcccacatgggcagccttcagcaggccgcctacgtgcgcccgatcgagtaccaggagggccgtgcccacggcctcaaggccatcgaggtgaagaacggcccgctacgcttcgtatccatggccgaccgcgccctcgacgtctgccagttcgaataccgcggcgagaacctcaccttcctgtccaagccgggcctgaacggccgcaaccagttcgacaccaacgggctggaggcgcagcgctccatcatgggcggcctgttcttcacctgcggcttcgagaacatctgcgcgccgtacgtcacgcctgagggcggcaagtacccggccggcagcttcccgatgcacggccgcatccgcaccacgccggccgagcatgtgggctccgacgcccactggaccgccgaaggcgactacgtgctcgaggtctccggcgaaatgcgcgaggccgaactgttcggcgagaatctggtgatgcgccgcaagatcaccagcgtgtacggccagccgtcgatcacggtcgaggatgaggtgaccaacgaatccttccgcgacgagccgctgatgtggatgtaccactgcaacttcggctggccgttgctcgccgaaggcgccgaagtcgtgatccccagccgcaaggccaccccgcgtgacgagaccaccgcagccgacaccacgccgtggaacgaaatccaagcacccgaggcgaaccgccccgaaagcgtgtacctgcacgagctcgccgccgacgagaacggccgcagcttcgccgccgtggtcaaccgcaagctcggacttggagtcgtcatcgacttcgacgccagcctcttcccatacttcatggaatggaagtcgatgggtgcgggcgactacgtggtcggcctcgaaccctcgaactccagcgtccacggccgcggctggcacgagcagcgcggcgacctgcacaccatcgccccgcagaccagcgaacgtaagtccctgaccttcaccgtcatcgaaggcgaggccgcgattgacgggctcatcgcccgccgcgacgccctgcttggctgaattgtgagataatatcggccgatatgtgaacggctgattagcgtggggagcatggttacccgggattcggaacagtatctgcgattcaaacgggagcacacgctgccctcgcatgaggcgattatggactggtatcgcggcaccggcatgcgtccgtatctgcaggcgcttgacgacgccggccgcaagaagttcgaggccgaagtgttctcccaagtccgcgaggaataccccacacagtcggacggcagcatcatcttccccttcccgcgtttcttcttcctcgcgactcggtagaagctcgccggattcgtgtactgggcggcgcgacctgtttcccgcgccgccagctgtgggttgacctcgctactgggcttgcggtgatgccgctggctgctgcgctgcttccgattgcgatggcatttgcatatgcggtgcgatgctggggagtgtgccgtcatgcatgcactgcttcaatatgaggtctcgctgggcgatgaggtcgtcttcgatctggtcacgcacgtcgcgcacggacgagaaatacaggtagaacgtggcgtgattgtagccggcgagttcggtgatctgacgcaccgagatcttctcgatcggcttggtttcatacagcttccagaacgcctccttaaggcgattgaccgtctgctgcgtaagttgcgggttcttcttgattgcgattcgcggtatggtgatttcgcataagacgcacaaccccatcgattcgtcggtcaaattcgtgaccttctcgatgcgatgctgtcgctggtggtcacgcaggacgtgctgttggaatcccagggaaccgcgcacgcggcgcaatcctcgggactgttcggcatcgggctcggcgtggtggctgtgatcatcggcctgtggatgttgctgagacgtaagtggacggcaacggaataggaatagtgacagcggaatagcgcgcgtgatattggtacgcgacgtatcgtaaaagcggctacaatacttacggcaaaagtctttgcaacgagaaggaagacatgactgagcggcgtcgagcacggatgaggattcgtcgtcaacgaatttacgttgtacggcgcattgtggttgcggtatgcgcattgttgtgctgcgttcttgccgtcttctcgacgattgacgcccaacgggtgtggccccgcggtgagtcggtcgcacaggggcaggcagaggttcaggggcaggcgcagaaggtgagtcaatccgcgcaacagtcggcatcgcgagtgtctgcatcggcctcatccttggaccgccagcaggtaccggtctttaaccaggcgattcaggagcagcgtgacaaggaagcgcaacgtgcgcgatggacgaatcccaccggcaagcagcctgatttgtcgcaatactccgatctcagcgtgaaagtcagtatcgccaagcaggaagtgtatgtgcaatccggcggtgagaccatctacacgatgatcgccagcaccgggctcaacgatacgaccccgcgcggcaactatgttatcgggatgagaggcgatcacttctacaatcccgcagaaggcatgggtgctgattattgggtgcgattcaacggcccgttcctcttccactcggtgccgaccggggcgaactccggcgagtatatggaagaggaaggcaacaagctcggtcagccggcctcacatggttgcgtgcgactcactgtggccgatgccgaatggttctacaaccaaattccggaaggcacgccggtcaccatcgcctgaggcttggcctgagatcgatactgaggctatcgtgctttaggcgtctgatattggtcgtcggtagtgaagcaggtgcgatagaccatggccatgatcagaccgtcggccagcaaggtcagcgcggcgatggcaccgaagaccacgaactggtatttggcggcgttcagcggatctccgccggctatcacctggcccgccatcatgcccgggatggtcacaatgccgctggaggccagcgaagcggtggtgggcaacagtcccagccgaatcgacgagatgacggatggacgggcggactcccatgccgtcgcccccaaggccagcatcatatccacctcgtcgcggcgttcctccatgctttcatagaatcggctcagcccgacagcaagcgcggaaacggtgttgcccagcagcatgccggtcagcggcaccaccagctggggcgcgtaccacgggtgcgggcgcacgatgagctcggtgaccagcgccagcatcagcagcatggtgatgaccaggctcaggaagatcggcccggcaaggcccttggggatgccgtgcgcgcgggacatcacgatctgcaccgccgcgatcagcatgaccgccatcagggcgaacaccatccacacgctgttcgaacgaatcacgtagctgatgatgaatcccatggcgcacagctgcacgagggcgcggcatgccgaccacatcagggtcctgccgatgcccatgtgcatgagttcgctgacgatggccgccacggccaccatgcccaacgccagaacaagaccccaggtgtcgatgtcgtaggcgccgttcatgggcgcacctccttatcccgcgtcagatcggtgagccgtcccgcatcgagcatcagcgtgcgggtggcgcgtccgtccggcggacggtgtcggatgcggatgatcgccatgccgtgtgcggccgcgtccgccatgatcgcggccactttggacgcgttgtcgtcgtcgagtccggcatccacctcatcggccagcagcaccttcgggtcggtaagcagcgtgcgggccaacgccacgcgcgccgcctgaccgcccgacaggtcgtgcggggcgcgcgccaggtcgatgtcctcgcagcccatcgcgtccaacgtcgtgcggatgcgctcgtcgggcagcaaccgtgcggccctgccccccttgcctcgaatcgcgagcgtccagggcagccggatcgcctcggccacgtccttgccggtcagtatcggtttttgcggcaggtaggagacgtcccgccgccactgctgtgcgctgaattcgtcactgcccacgccgtcgaggacgaacgtgccgtgtgcgtgcgggttgagtcgggcgcatgcggtcagcagactcgatttgccggagccggacgggcccaccaggtcgatgatgtcgccgcgttccatgctgaaggacaggttgtcgaacaccgtgcgttcgtcatccgccggcgatcgcgcggggatgacgcaggacacggatatggcttcgaagaaggatcgcatattcatccagtctagtcgggggccacgtgggaaaccccagcgttcacttcctgtatacccggtgtggcataatagccaaggcaatttttgggctttgcctaagctagtttgaatttgaaataggtgaaaaacgtggcacagactactaacgacatcaagaacggatccgtcctgaacctggacggccagctgtggaccgtcatgaagttccagcacgtcaagccgggcaagggccccgccttcgtacgcaccaccatcaagaacgtgctctccggcaagatcgtcgacaagaccttcaacgcaggcatgaagatggaattcgagaccgtcgacaaccgcaccctccagtactcctacgaggacggcgacaacttcgtgttcatggacatgaccacctacgatcagatcatgattccgaagaccctcgtgggtgacaaggccaagttcctgctcgaaggcaccgactgcctcatctccttccacgacggcactccgctgaacgtcgacctgccgggctccgtgatcctgaccatcacccacaccgagccgggcctgcagggcaaccgctccaacgccggcaccaagccggccaccgttgagaccggagccgagattcaggtcccgctgttcatcaatgagggcgaccgcgtcaagatcaacaccgaggacggttcctacaccggccgcgagaacaactgatctccgcatcctcaacagacgaccgaccgtataaaggactaggacagcagcagtatggcacgttccaccgcgcgcaaaagggctctgaacaccctgtacgaagccgacgaaaaaagtcaggatattctctccctgcttgacgaacgcatcgcacatcccggtgcccagaccccgcttcccgactatgccattgaaatcgtcaagggcgtggccgagcaccgtcgtcagatcgacatgaccctggacgaacactccacgggttggaaggtccgccgtatgggcgtggtcgatcgcaacattctgcgtatcgccgcttgggagattctgttcaacgatgatgtgccggacaaggtcgccatcgacgaggctctggcattggccaagaccctgtgcgatgacgattcgcccgctttcatccatggcctgctgtctgcggtgtgcaccgccaagaacgcagcaccggcaccggagtccgcggcagaagaggccgatgaggaatcgtccgattccgatgccgccgcatccgagccgaccgatgagggcgatgtttccgattcgcccgattcgtccggtgcatccgacgagcccgctgccccgtccgctgagattcagccgacggtcgattagtcatttgttgttcagcctccccattcgggaggctttttcatgggcggacacttgtgtcgccacacattctcaagtcggcaccttgccgacagccccgccagcggggtgagactttgcgcccaacggcgtgtgagtctgcgctggccgttaaccttggtacgaatacccgaaaaacataagggggttttggtgagccagaacgagtccgggaccatcgcaattccgatgtatgacaaggatgatgcagtcctcgttttggaagacggacaggtatatgtgggggagccgtacggcgccctcggtgagacgaccggtgagatcgtcttcgccaccggtatgaccggataccaggagacgctcaccgatccgagctacgatcgccagatcgtcgtgcagacgttcccgcacatcggcgataccggcgtcaacagcgaagaccctgagtcctcccgcatctgggttgccggatacatcgtgcgtgatccttctccgaacgtgagcaactggcgtgccgagggcagcctggacgacgacctcgccaagaacggcatcgtcggcctgagccacatcgacacccgtaagctggtgcgtcacctgcgttccgcaggcgtgatgcgcgccggcatcttctccggcgacgccctgaccgaccaggccaccggcgcgctcaagaccattgagcagctgctcgaagacgtcaagaacacaccgcagatgcagggcctgagcctgtacgacgaagtgtccaccaagcaggcctacaccatcgagccatgcggcgagtacgaaggcaaggagccgctgtacaccgtggccgccgtggacctcggcatcaagggcatgaccccgcaccgcatggccgagcgcggctgccgcgtgcacgtggtgccctccaccatcaccttcgccgaaatcgagaacctgaacccggacggcgtcttcttctccaacggcccgggcgacccggaacaggccggccccgaaatcgagctgctgcgccaggtgcttgacgccggctacccgttcttcggcatctgcttcggcaaccagctgctcggccgcgcgctcggcttcggcacctacaagctcaagttcggccaccgcggcatcaaccagccggtcaaggatctgaccaccggcaaggtcgaggtcaccgcccacaaccacggcttcgcggtcgatgccccgatcggcaagcaggtcgacgcgccgtttgaaaacggcaagtacggcaaggtgttcgtctctcacatcgatctgaacgacgacgtggtcgaaggcctgcagtgcgtggacatccccgcattctccgtgcagtaccacccggaggccgcagcaggcccgcacgatgcggcctacctgttcgaccgtttctgcgaacttatgaagaacaactccaaggaaggtaagtgatatgccgaagcgcaccgacatcaaatccgtgatggtcatcggctccggcccgatcgtgatcggtcaggctgcggagttcgattactcgggcacccaggcatgccgcgtccttcgtgaggaaggcatccgcgtcatcctcgtcaactccaacccggccaccatcatgaccgacccggagatggccgacgccacctacatcgagccgatcgccactccgatcctcgagcagatcatcgccaaggaacgccccgacgcgcttctgcccaccctgggcggccagaccgcactcaacgccgccatggcgctgggcgaggccggcgtcctgaagaagtacaacgtcgaactgatcggtgcctccctggaagccatcgaccgtggcgaggaccgtgaactgttcaagaaggtcgtcgacgaggccggcgccgaatccgcccgctccgacatcgcccacagcatcgaggaagtcgacaagatcgccgagaagttcggctacccgctggttgtgcgcccgagcttcaccatgggcggcctgggctccggcatcgcccacaacgaggaggagctgcaccgcatcgccggcgccggcatccattactcgcccaccgacgaagtcctgatcgaagagggcatcgagggctggaaggaattcgagctcgagctcatgcgcgaccgcaacgacaacgtcgtggtcgtctgcccgatcgagaacgtcgacccggtcggcgtgcacaccggtgactccatcaccgtggccccctgcttcaccctgaccgaccgcgaataccagaagctgcgtgacatcggcatcgccatcatccgcggcgtgggcgtggacaccggcggctgcaacatccagttcgccgtccatccgaagaccggccgcatcatcgtcatcgagatgaacccgcgcgtctcccgttcctccgcgctggcctctaaggccaccggcttcccgatcgccaagatcgccaccaagctggccctcggctatacgctcgacgagattcgcaacgacatcacccagtccacgccggcctcattcgagccgaccatcgactatgtggtcaccaaggtgccgcgcttcgccttcgagaagttcccgggtgccgaccccaccctgaccacctccatgaagtccgtgggcgaagccatggccctggccggcaacttccaggagtccctcggcaaggccatgcgttccatcgacaagcgccacatgggcttcaactgggatggcgagaagccgtccgccgaagaagtggccgaactgcttgaggccatccacaccccgaccgaacaccgttacctgcagctcatgcgcgccatctggggcggcgccacgctggagcaggtgttcgcggccaccaagatcgacccgtggttcctgaagcagatcttcctcatcaacgagaccgccatgacggtgcgcgaggccgagaccctgaccccgaagctgctcaagaaggccaagctcgccggtctgtccgacgtgcaggtggcccacctgcgtggcttgggcgatgaaggcgagaacaccatccgcgagctgcgctggacctacggcctgcgcccggtctacaagaccgtcgacacctgcgccgccgagttcgacgccgccacgccgtactactacagctgctacgccgacgaaaccgagctgcgcccgcgcgagcgcgaggccgtgatcatcctcggctccggcccgaatcgcatcggccagggcatcgagttcgactacacgtgcgtgcacgccgtgcaggagcttggcaaggactatgacaccatcatggtcaactgcaacccggagaccgtctccaccgattacgacatgtccgaccgcctctacttcgagccgctcaccttcgaggatgtgctcgaaatctacgaggccgagaagaggatgggcccggtcaagggcgtcatcgtccagctcggcggccagaccccgctgtccttggccgcgcgtctgaaggccgccggcgtgccgattctcggcaccaccccggaatccatcgatctggccgagaaccgtgagctgttcggcgaggtgctcaagaaggcggagatgaacgccccgcgttacggcaccgccctgagcctcgaagaggccatggacgctgcccaccgcatcggatacccggtgctcgtgcgcccgagctacgtgctcggcggccgcggcatggaaatcgtctacgacgacaagcagctcaccaagtacgtggaccgcgcgcttgccgaggccaaggccgataccgtggtctccggccgcctgccctccccgctgctcatcgacaagttcctgcaggacgccatcgaaatcgacgtcgacgccctgttcgacggcgaggaactgtacatcggcggcattatggagcacgtcgaggaggccggcgtccactccggtgacgccgcctgcaccctgcccccgtccaccctgtccgacgaccagatccgccgcctgcgcgaaggcacctacgccatcgccaagggctgccacgtgcagggcctgatcaacgtgcagtacgccttcatggccaacacgctgtatgtgatcgaagccaacccgcgtgcctcccgtaccgtgccgttcgcctccaaggccaccggcgtggcgctggccaaggccgccgcccgcatcatggccggcgagaccatcgccgaccagcgcgccaacggtctgctgctgcccaagggcgacggcggcgacatccaccccggccagcaggtcgcggtcaaggaatccgtgctgccgttcaagcgcttccgcaccccggtgggcaagaccgtcgacatcctgctcggacctgagatgcgctccaccggcgaggtcatgggcttcgaccgcgacttcccgcacgccttcgccaagagccagctcgccgcctacgatggtggcctgccgacccacggcaacgtgttcatttccgtgaacgacaccgacaagcgtcagctgccgctgctcgccgtgcgcctcgaagagcttggattcaagctctgggccaccgagggcaccgcctccgtgcttcgccgttacggcatcgagtcgaacatcgtggacaagatcagcacccgcgtggacaccgatccggaagccccggtcgaggtgcatcacgccgccggctccgtgggcaagaacgtggttcagctcattgaggaaggcaagatcgacatgatcctcaacacgccgaactcgcgcggctcccgttccgacggctactccatccgtgctgccgctattgcagccgatctgccgcagtttaccaccatcaccgagttccaagccgcactgctggctatcgaggccgtgaagcataatgattatcagatcatgagcattcaggagcattcgaagcagctgttcgaattggagcgacgggagttctgatgactacacccagcagtgaggaattgcaggcacaacgttcggatttcggtctgcgactgagcaattcaatggccaaatacggaccgctgtgtgtgggcattgacccacatcgcaagctcctcaccgactggggatacaacgtcgacgccgaaggcgccgaactcttctccatgcgtatgctgcaggccgccaacgggcgcgccgcagcagtcaaattccagacgtcgatgttcgagcgctacggagccaaaggtttcgaagcgctcgagcgcgtgctctacgcggcacgacaaatgggcgtcatcaccatcgtggactgcctgcacggcggcctgtccaccacgatttccgccatcgcggacgcctatttcaagcccggtgcaccgttgctggccgacgccatcacgttgctgccgtactatggcgcgcgctcgttgaacggcttgattaccgaagcgttggaaaacggacgcggcgtgttcatcgcctccctgacttccaatccggaaggcatgagtctgcagaccgcgttgcgccagagcggcgattacaagggacgtaccgtggcctacggcatcgcctccaccgcgcagaagcataacgtggatatcgaaggcatgggctcggtgggtctgatcatcggtgccaccatcggccaatggatgcaggattccggcgtggacccctccaagttcaccggtccgattctttcccccggttacggttggcagggtgccgaggccaaggatctgaaaaccgtgttccgcggtacgcgcggcaacgtgctggttaccgtgtcccgctttatcgcctcgcatgggccggatatcgccgcactgagccaagctaccgagtcgattgcgcttgacgtacgtcagtcgctgatggaagccactgccgaaggcgcagaaaaccagtaatcagaacggaatcagatgtcgcggcatgcgtacgtatctatctcattgcatacgtcgcatcacgattcatattcttccctgttcgtcggggctgtaacagttaccggtcatctcgccggtgagccgttaccacattggattcataatcgctgcacaccacatcatctccggaggaacccatgactgaaaacacccatgccggccgtctaatcgtcctgactggccctaccgcagtaggtaagggcaccgtggaagccaagctgcgcgccgaccaccccgaagtgtgggtgtccgtctccgccaccacgcgtgccccgcgccccggcgaggttgatggcgtcaactactggttcctcaccgaagacgagttcctgacccgcgaagcggcgggggagttcctggaaaccgccgtggtgcacggcatggcccactacggtacattgctcaagcctgttgaggagcatctggctgtcggcatgccaacgattctggaaatcgatttgcagggtgctcgccgcgtcaagcagcgcgccgccgaactcgacttggaagtggtgtacgtgttcatcgcgccgccgagcttcgaagagctcaagcgccgtctgatcggccgcggcaccgaaaccgccgaacagcaggcccgacgcttggaaaccgccaaagtggagctcgccgccgaaagcgaattcgacgtcaccatcgtcaacgaaaccgtcgatcaggccgccgccgacctctggtccgtcatcgccaaagaatacgggctgtaacgtgtgcgaataggttctgttcgtactgagatgtccatgcttggcatggcgtgctcatgtgattatgcgtgttcagtccctgccagtcggccctcacaatagggggagagcctgacggcagggactgattcataccgatacaaaggggcatgcgccaccattgttgcgtcaatcgtttgatgcgaaaatggtggcagaggcggcgattgccgtgttgggggatgaaatctcaggattggcggaattccgaggattctgagttgtggttgtgtgtccccatttgtgcgtcaaccgtttgatatgcaaatgggggcacatgcatgtgtgcgccatcttccaaaaacgtcgaattatgcaaatggggggcacgaataggtgtcggcgtgatgtggtgtggtgcgatgctgcaggtgcggtgtgacatggtgtgggatgccagcggatttcgggtgtttttcctctggcgtcccacagaacctgatgtacggtgtcgtcaccggtttgtgggattggcagaattccaatggttctgtggaatggggtgtgggatgccagccgtgtgcatcgtttgacgtgcgtggcgtcccgcacggttgcgggacgccggccccaaattggccgctaaccgtgtggtatcccgaatttctccgatatgcgagaggaatccgtccactataaggtctctagcccagcgactaatagttttcctctatgtgcgaataatacgggctgtaactaccgctttaccactagctgctggtggagaatttcggtgctgtttctggccggcgcctgcttccaacggattgcttcggattcgtgatgctcggtgacataatgccgcatccattcgaagcactgctgggtctggatggcatcgcttaatgcgcggtgttcctcattgtccgcgatgccgaagcgtacgatcaggtcggccagacggtgatgccgctgcgcggggaacagggcgcggctgatttgcatcgtgtcataatccgcgcaggcaaagccgcagccggcgatatgccgggtgttgtaatccaggaatcgcagatcgaagctgacgttatgaccgacaatcggctcaacggtgggaccggcagccggggtagcgagccatgcgatgaatcggggaagcacctcgtcaatcggatcgaggtcggccaccatcgcatcggtgatgccggtcagcgtggtgatctgacgcggaatcggccgcaagggattcaccagctgctggaattgatcgacgatatgcccctcccgcacgcgcacggcaccgatttccgtgatggcgcaactgttcgggtaaaagccggtggtctccagatccagcgccacataatcggtgggaaagagggcatcgtccatggcgattcgcccgccggcaccatgattgggctgggatggttggccgaaaacggtaatgccggaagtggtcacggaggctcctcatatcagtcggtgttcggtgacttattgtaccggcagcccggtctgacggtaaaatttttccctcccggattttctcggatatattggttaggcggccggcaacatgcggcgcatcgggaagggagcacagctgatgaaacagatagtggcaggcatcgtggcgcatgtggacgcgggcaagaccacgctgtccgaggcgctgctctaccgtaccggtgagatccgcaaattggggcgagtggatcacggcgatgcgtttctggacaccaattccttggagaaggcgcgaggcatcacgattttcgcgcaccaggcattggtagaacacggcgacctgcgcctgaccttgctggatacgccggggcacgtggacttcgcagccgaaaccgaacgtgtgctgcgtgtgcttgactacgcgattcttgtggtctccggcacggatggcgtgcaaggccataccgagacactatggcgtctgctggccagatacggtgtgccgacgttcatcttcgtcaacaagtgcgacgccgccggatttgcccgcgaggccgtgttggctcagttgcgcaggcgtctgagcgatgcgatatatccgttgccggcaatggaacagtccactgagggcagcgcgctaccgttggacgcgttcgccgaagacatcgccaccctggacgaggaggcgatgaacgactatttggaacatggcgcgctgtccgtgggcagattgcgatcgatgatcgccgtacgcgagctgttccccgtatatttcggctcggcattgaaactcgaaggggccaaggaattcctggacgggctggagacgttcacccgcgaacgtgaatggccggccgccttcgccgcacgcgtgttcaaaatcgcccacgacggtcagcacaaccgtatgacgtggctgcgcgtcaccggcggtgcgctcaaagccaaggagatcgtctcctcatcctcgtgcgccgcggcgtcgacaccgtcgccagcgcaggaggatgatgacatggcgtggtccgagaaagtcgatcaggtgcgcatctacaatggcgccaaattcgagacggtcaccgaagtgccggccggcttggtatgcgcggtgaccgggctgacgcaaacctcccccggcgaagggctgggaacggaaccggacgccgaatcgccgtcgttgcaacccgtgttgacctacacggtgttgcccgtcggagcggaatccgatacggccggcacctcgggagcggccaaacgtgggggagccggccatgacagcgcgaatcaggacgatgccgagcatgatgccgccaagtcgggaaccggccgcaatgaggagaacgacaccgccggccagaccgcggcggacaatagctcgccggcccgtccccagttcgatgatctgaccttgcacaaggtcatcaccgcattgcgtgagctggaagacgaagacccgttgttgcatgtggtgtgggtggaacggctggccgagattcatgtgcaattgatgggcgcggtccagctggaaatcatccagcagaccctgcacgaccggttcggtctggatgtgtcctttggccccggctccatcctgtaccgtgagaccatcactgcgccgatcgaaggcgcaggtcatttcgagccgctccgtcattatgccgaagcacatatcctgctggaaccaggggagccgggcagcggagtcactgtggcctcggccctgtccgaaaatgatttggaccgcaattggcaacggctgattctgacccacctgaccgagcgtgagcatctcggtgtgctcgttggcgcaccgctcaccgatatcaagatgactttggtggccggccgcgcgcatctgaagcacaccgaaggcggcgacttccgtcaagccacgtaccgggcgattcgccaagggctgatggaagccagggcaggagtcagtggccggcccgagacgccggtcgagagccggccggacaccacaggggagggcaactgccgactgctggaaccgtggtaccggttccggctcgaagtgcccgcagacatgatcggccgtgctatgagcgacatccagcgcatggccggcagcttcgaatccccggtcaccgatgacgaatacgccgtgatcgaaggcgaggcgccggtgtccgaaatgcgcgactatgcgatggacgtgaaccagtacacgcacggccatggccgtttctccgccaccttcggcggctacaagccatgccatgacgccgaacaggtcatcgcagccgccgcctacgatcccgaagccgatctggacaacacccccgactcggtcttctgcgcccacggtgccggctaccccgtcaaatggtacaaagtccccgaattcgcccacgtagactacgccatgtgaggtggtggctaccaaatctgcggccgaatgaatccgttggcctccaagaaccgttgaatatcgcgcatttccggcatattgatcgaatgggccatgcccggatacacttgttcggtcaacgtgccgtgctcgcgccagaactcacccatcgccgtcacatcggctttcgggaagatgtcgtccgcagcaccatgcccgtagaacacgggcggcttcaacgaagccaattcggcatcgcccgcaacggaccccggtgccagccatccagagcaggagacggctgcggcatatcgcttcggattgaaacgcagcagatgcgcggccaagaggccgccctgcgagaatcccatggcaaccaccggccgagtggcgggaatatgctccgcaacccatgcatcaatggcttgggcggcctcagccgcctgcttgtccaatgattcgccctccggcacaccctcatgcgcccacgcaccgaaccatgtatatcccatgccataggcgatgggtgcctgcaaactggcataatcagccgaaccggcaccgcaatagttcagcagatcgggcagatcgtattcattggaaccccagccgtgcaacagcacgaacaccggggtggtttcaggaccggtcaaacgggtcaaggccttggcaatcttcatggctcccagtgtagccacgtgaccgccgcgaccgcatttgaacggtccataagcaacccatatagcaacgccgttccattcaagtgtccgatacgttatcgtcgtagacgtgccgcacggggaacggcctcgtgcacagcagccatagagaacaccataaagggggtgcgcaatgaccaggttcaatactcagctcgtccacggactgccggttggagacaacaacaccggagccgtgaacccgccgatctacaactcaacgacatatgccttcgagaaggtcgacgcgatgccccgctacgactatgcgcgcagcggcaatcccacacgtgacttcctggaacagcagatcgcccagcttgagcagggaacgcgcggttttgcgttcgcctccggcttggcggcgattcatgccgtgctcagcattttcaagcccggcgaccgtattattgtaggggacaacatttacggtgggtcgtattcgcagctcaatgagttctttacccgttggggcgtcgtggtcgagtcagtcaatacccaggacattgcagcgttggaggccgccgtcaagggcgaccgcgcgaacggcatcgcgcctgcgcaagccgtctactttgaaaccctgaccaatccgctgctcaaggtcaacgacgtacgcgccatctccgcaacagcccgccgttacggtgcgctgtccatcgtggacaacacgttcgtgaccccgtacctgcagcagccgctttcccttggcgcggatgtggtaatccactccgccaccaagtacctggccggtcactccgacgtcaacgccggtctcgtggtcgtctccggtgaggatttggccaatcgcgtgtacttcgcccagaaccgtctcggtggggtcctggcacccgccgaatgtgattcggtgcgtcgcggcatacagacgttggccttgcgtatggatcgtcagcaggaaaacgcgaacgccatcgcccgttatctgctcgctcacccattggtcaaatccgttcactatccaggattgcccggtgccggcgatcagcggctcgcagccaaggggctgaagggcgccggcggcgtgctgagcttcgaagtggtgcctggcgtggaccctgcggatgggctcaacaacctgcacatcttccgattggctgtgtcccttggtgccgtggaatcgcttgcggaactgccttgccgcatgacgcatttcgaactgccccgggaggagcgtctgaaggtcggcatcaccgatgagctggtgcgtctcgccgtcggcatcgaggatgcgaacgatctgatcgaagacctcggacaggctttcgatatcgcctatgcccgatacagggaacgccacatcgactccgatgtacttggcgcattgactccgaaggtgttcgcttgacgtgatatggccgtatgtgccgttacgatggatgcgatgggaagccgcggacgaagcgcggcgcgcagaaaggacatggcatggccattgatgtgtacggcgccacatggtgtggtgattgccgtcaggcgaagaacacgttggatgagctgggtgcggcgtatatctggcataacatcgaagaggaggacggtgccgccgatcgtgccgtggccatcagcggccagcagcatattccggtggtgctgtacgatgatggctccttccaggtggagccctccgccaaggacatcaggaacaagctgcgggagttgaatctgctgactgactgattggcagggcccgcttacggcatgaggcgtgtgccaccgttggattggtggcacacgcctcatgcgttgttgcggctgtgtgtggaccgtacttacaggcttctgaatcgcgcctggccgatggtcacatcgaaggatttgccggcgggggcgtcgtactgcaattcggtgatggcgttgcattgaccctggacgaagcgccagacacgatgccctcccacatcgagatcgaaatagtgctcatcgggccggtcggcgtccccgccttccgtgagacccaaaccaaacacgtcggaccagtgcgcggccaccgccgcggggtcgggcaccgcgaaaatcgcgcgacgggtgtccacttcgccgatggcatgccggtgcagcagtccgccgctctcgtagcgggccagttgctcggattcgctcgcaccccagtcgatgacgaacggatagcgcaggccctgatcatcgcccttgatccatagcaaccgccagcgtatctcctcaccggcggccgtcgtgcgattgcccggaacgatatggccaagatcaaggcctttggccgtgagccgttcggccgcctgttcgatgccatgcacgtgcaatgccggacgatagaatcccacatactcgggcagtagctccccggcttcatggaatatcagcccatggtccggcgtctccgacaaggcttcctcgcggtcgtacaatgccaggaactccaaatagttatcggcgaagtaggccagggagttctccgtgccatgccccacgtgcttgccgccgtattgggaagtcagccctgcgtcggcgaacgtccgttcggcggacttgaggtcattcacgaattcgaccgtatggtcccaggtgaattgttgcgtcatgatcggctcccgtctttactttgcatcgccgccgagcgccgtggtgcgctcgaccgccgccagcaccgcggattgtatggatgccgcgaatccggttttgttcagggtatatgcctcggtgattcccactccgcctggggagttgttgatattgagcagcacttgaggcagcacgtctttctgtttgaggaattcggtgccgccgatgatggtgtcgagcgcgatggctctggccgcgtcccggggcagaccggcaagcacaccggcatccacgtaggcgtcgatgaaatggtagacgatgttcggcgggtaaaaaccggtgattacgtcgataagtcgttcctcgacatacagcactttgccgaaagtgttgaggaacgcatccacgtcctcgcgtgccgcggccccattcagcgccacgccgctgtaaccgtaatccacggtggtgagtgtgttcgggatgatgcgggccacacgccacccatggccgagcccttgctcaagcttggcgatggtatagccggctacgatggagatcaccgtggtcttcgccgggtcgaaacgtcgcgccactgaagcggctacgccggcgacatcgtcttgcgggcgcaccgcgattaccacgatgtcggcatccggggcgtccgtcggtgacgccgtctcggtgttgtacgtggatgccagatattcggcgcgttcccgtgagatttcctcaacccagatgtggtcgaccggatatgcggcggccttacgtcgcaccgcttctatgatggcgctcggcatattgcctccgccgatgaaatacaggtttgctcccatcggttcacctcttctgatgatggatacggatgtatgtcagttcccgtaataccgcatggattcccgaaccgtcgtcgtttcttccgaaatggcatataggtgttcttgataggcgcttcaaggatgcaatgatttcgcggatggataaggcgctataagaaatgcctgtaatacgtgggcggcattccgcttgacatcggcatcgccgatgcgcttcgatgacggataacgttgcgaatcaggagaagggaccccaatatggtcaatcgtcgcgccgacttccacgccatcgtcaatcatcagtcccggacgccgtatctggttagcgcctggcagcatcttgtcggtcatgaatacggtgccgaggaattcgccaaggccaccatcgatttcgtcaatcgctgggattgggaatgggtgaagatcaatccgcgcgccatatactatgccgaggcttggggctctcggtacgatcgcaacgattatgccggattcgtgctgccgaagaagatcggcgccgcaatcaccgaaccggatgatgtgcgtggaatcaaggaactcgacgttcgtgacaatgagtatttcgccgaggctctggccgccgccgcccttatccggcatggccttgaggatcgtgccgtgctgcagaccgtcttttcgccattgtccgtcctgctgcagatcgccgatctgccgctgtacccgggtgacgattacgccaccgcgacgctccgcgtcgaagatctgatcttcgatcagcctggtgtcgccaagctggcgctcgccaacatcgcccgcacactcgcctcctatgcgcgtgcgttggttcgtcccgagtccgaaggcggagcgggactcgacggcgtgttctacgcgctcaccggcacggtgagcgagggttatttcgacgcgcaacgctatcttgaattctccgaaccatacgatcgcatcgtgattgacgcggtgcatcgcgccaacccggacgccgtggtgctgctgcacacctgtcgtgctgaatcccacccgaattggttcgacgtgaagggtgtggacctgctgcagtgggatcagtatcaaccgggaaacccgcaggtggatgccgacctgacggctgtgccggtcgccggtgccccgtacgacctgttcgcgccggacggtgacgtcgaacaggtgcgccgcgaattggccaagaccatcgcgcttcgtacgggcaaaccgtttttgctggcaccaagctgcacggttccgaccccggcgggcgacgaggcgctgcaggcattgagcgacatccgcgtgggctgagccggtccccatttacgcttcatgattattcgaatagagaagggaacatcatgaccatcaagacaatcatccgtacggcgatcgcatccgtggtcactgcgggaacactgattggcgtctccgcatgcggccttggcggggatgccgccagcggttccagcgacgacaccgtgaacatcggagtcatctatccgaagaccgggcaatatgcgcaatacggcaaactgttccagcaaggcttcgatctggcggttgccaaggtgaacaaggatggcggcgtcaagggtaagaagcttggtcttcgatactatgacacgcagtccgatgccaagcaagacgccgcggtggctcccaagatcgtgtcggacaagtcgatcatcgccgtggtgggtgactatgcctcgcccgcatcctcggccgcgtcgcctatcttccagcaggccggcctcgtgcattacggtttcaataattcggcacccacctttaccgataccggggaccacgtatggactccccaaatcggtcaggacaagtatcagaagaccaacgcggatatagtggccaaaaaagccaagaagatcgcggtggtctacatcgagaacgactggggcaaacaggcctatcggtacttcaagcaggaggccgagaaaaacggtacccagattgtgtacgagtccagctatctgcccgactccaccgacttgtcgccgattctgattccggcgcgcgatgccaagcctgacgcggtggtcgacatcggctacgggccggacggtgctctggtgatcaataccctgcgcgacaagctggggtacgacggcctgtacttcggtggtcaggaaaccaaggagttcctcgatctcgccggcaaaaacgccgagggttcgatcatcaccggatccttctccgccactggcaccaaggacgccaaggcccagcagttcgtcaaggacttcaaggccaagtacggcaacaacccgggcaatttcgaagtgaccgcctacgaggcgatcatcgatctggcctatgccgccaacaagaccgaaccgacccgtgaaggcatacagaaggcgctgcagaccgtgacggatttcccgctctaccagggcaatggcggcacgttcaaattcaatcggcagagtcgtcgcgccgataacatcgatccgattctgctcatcgtcaaagatggcaagttcgaacaatacgaaggttgattccccgggctttcccatacaccacgaacgaggtaacgcacacaatgtttgatgttcttttcgccggactgatacacggcagcgcctatgcgctggtcgcagtcggcatgtcgctgatcttcggcgtcaccaacgtggccaacttcgcccaaggttccatcgtggccgtgggcatgatgatcgcctggtggctcggttcatcatggggatggggaatcgtgcccacattcgtggcggtgctcgtggttaccgcactgctggggctggtcatgaacatggcgatcatcgctccgcttgaaggccgtaaaccgattgcggcgctgctcgccaccattggcgtcggccaggtgctcgacaatggtctgcaggtcgtcttcgggccacagacccgaccattcccgaaactgctgcagacctataacctgcaagtcgccggcgtgcgtttcggcacttcggacatcgtgatggtgacgcttgccgtcctctcgatgcttggcttatgggcattcctcaagttcggcaaagcgggacaggccattcgcgccacttcccaggatcccgaagccgccatgcagatgggcatcccggtgaaggccatccgtaacctctcctttgtgatcggtgccgtactcgccggcgtttccggcatcttcgtgggcttgttcaacggcaacatcaatccgatgaacggcggcaccattggtatgacggcgttcgtggcggccacgatcggcggtctaggctccatcccgggagccgtggtcggcggtcttgtgctcggtgtggtggaagcgttcggcatctctctgttcggagacggtgcgcatgacctcatcaccttcggcgcgttgatcatcatcctcatcgtgaagccgcagggtctgcttgggccgaagaccgatgtcaaatccgagccgcttaccggcacgttcctgggaggcggcagggcgatcgcgctgccttggtggggtaatctcatcggtgccgtggcactcgtatccaccccgttcttcttcaatgactacctgtccggcgtgggcactcaggtcgccatctatgccatcgccgccgtgggattgacgttgatttccggctccgcaggccaaacgattctgggcatggcaggaccgttcgccgtgggtgcctatgcctccgcgattctggccacgcaggcgcattggcccttcctggtggcgttgcccgccgcaggtgtgatcgcggcgcttgtcgcctcggtgctcaccttccccgtatggaggttttccggccattatgtcgccatcgccaccatcggcgtaggtgcggtgatggtggcgatcattcgcctcgccgagccgttgaccaaggggtctcttggcattcagggcattccgttcccgaaggtgttcggcgtcacactgtacacgcagcagatgatgtatctgcttgacgtgatcgtgctgcttgtcacgctggtcatcgtcatgcgtatccgaaccgctcatctggggcgcgtgttcgaggccgtgggatcggatcgcgaggcttcggaggcgctgtccatccgcactggcgcctataaggcgctcgcgtatgcgcttgccgcgtttttcgcaggtctcgccggttcgttgctcgcgcaccagtacacgtacattgatccgacgatcttcaattcgaacatgtcgattcttatcctgaccatcatcgtgcttggtggtatgaactctccgctcggcgcggtgcttggctccatagtgctgatcggagcgcccgagttgctgcgtttcgcctccgacgcgcgcatcctgctgtatggcgtgctgctggtgcttgtcatcttgttccgtccccagggcctgttcgcccggaaaggctgagtcgccatgaccgattccgagaccgtattttccaccgtagacgccgtgaccggcatcgatatcgacaacgaacgcctcgataacgcggatgatctggctgaatattccgaaagacaccgccaggccgtccttgacgcgccggtgatgctgcgcgtgcgcgagctcgacaagtccttcgaggggctgcacgccgtcaacagggtctctttcgacctgcatcaaggtgaggtcatttccatcatcggcccgaacggttcgggaaaatcaaccacaatcaacctgatctccggttttctgcagcctgattccgggctcatcgatcttgccgacgagccggttgccggtctgagccctgcggacatgtctgaacggggactgctgcgcaccttccagaacggtcgtgtgttcggcggtcttaccgtcgaagagaacatcaatctcggatatcaccggcgactcgtcgcggcacgcccgttcaaaagcctgcaaaggtatccgatcgcgcgttggctgtcgttgctcgccgagaccggcgtggcgctggttcccggaccgcagactcggcgcgaagccgatgaggtgaacatccgcgtggatcgggaaatcgaccgtttccgtgaacgactgagcgcgcgtcgacgggattgcacctacacgttgtcgtacgcgaatcgtcgtcgtaccgaaatcgcccgtgcccacatcagcgaaccgaagatcctgctgctcgatgagccgaccgccggcatgaaccagtcggagaccgccgaagtgcttcgtcaactgcagtatctgaaagcgcagggacataccatcctattggtcgagcacaagatcgatctggtcactgcattgtccgaccgtgtgcttgcgatggatggcggccgcgtcatcgcgcaaggcgccccggatgatgtgcgcaatgccccgcaggtggtcgaggcgtatctcggcaagcggcgtgaaatgaaccatacccgagtcgccgggcagtcgcatgtgcttgcgatgcagaactccattggcgccgtcgtcgaagtcgagggcaccggtgccggtaccggacgagatgaaaccgggacgttggatgatggcggggatgccctgcttgcgctcgatggagtgaatgtgtattacgggcaggtccacgcgttgcagaacgtgtcgatctgcgtacccaaaggggccatcgtctctctgctgggaggcaacgcttccggcaagtcgaccacgatgaagacgattttgggcatcaatcatccgaagaccggttcgctgtggttccaaggcgaggatgtgaccggactgtccacgcgcagacgggtccaagccggtatcgccgccgtgcccgaggcgaggcgcgtgtttccacagatgacggtggaggagaatctgttgtctggtgcctatacgcgacacgacagggagggtgtggccggcgatctggaagccatgtacgatcgtttcccgcgtttgaaggaacgtcgtatgcagcaggccggcactatgtccggcggcgagcagcagatgctggcgttcgcgcgagccctgatgagtcgcccgaaaatcatctgcatggacgagccgacgatgggcttgtctcccaaactcgtcgaagacgtactcgaacagatagcgcgactgcgtgacgaattgggcgtttccgtgctcatggtcgaacagcaggccgagctggctctctcgatcgccgactatggttatgtgctgcagaacggacgtatccggctgcatggcaaagccggcgacctgctcggcaacgagcgggtgcaggaggcgtatttgggaggagtgaaacaatgagcgaagccgaagggattgagacgtcctcgcatccgtccgtcatcgccgtcacgcaaaggaggttccggtgaccgcagcaacaacccgatcgggcgcatccccgacggcgttcgtaacacttcccgatgctctgaacgctgatgtgcaggaatggtaccgctggttccatcgtcatcctgaactctcctatgaagagttcggcaccacggcgcgcatccgtgagattctggaatcgcatggcgttgaaatcctcgaatcgggactcaggaccggcgtggtggccatcgtgcgcggcgcaagcgccaagcccgtcatcgccctgcgcggtgacatcgatgggctgcccatcaccgagaataccggacttgactacgcttcggataatgccggagtgatgcacggctgcggtcatgacttcaacctcaccgtggcgttgggcgcggcgattctgctcaatgaacggcgtgcctcattacctggtaccgtcaagatcatcttccagccggcagaggaaggtcgtgccaccgcggagcgccccacgggttccgtgcaggtgctgaacacgggtgtgctggacgatgtcgaggcgtttttcggcacgcacgatgcagccggaccggttgggtccatactcatacgtgagggtggcatcaccggcgcggtcgacaaattccaggttgccattcacggcaagggcgcgcatgcagccgaaccggaggatggcatcgacccgatcaccgtgctgacgaacgtggtgcaggggttgcaggcggtcattgggcgcaatctcgaccctcgccatccgcgggtgttgtccgtcacccatatagaagccggcaattcgtggaatgtgattccgcaggatgccttcttcgaaggcacggtgcgcactaccgagccgcaggaccgggttctcgccaagaagcgcgccatcgccatcatcaacaacacggccgccgcctacggtgccactgccgatgtctcgtggttcttcggatcgccttccgtgttcaacgatgccggatggacccgcatcggacgagaagtcatcgccgagcaggggcttcacgcggatgatgatcatcctcaactgggaggagaggatttctcatattaccttgatcgcaagcccggcctgttcgtgcacatcggtgccggtgagaccggtgccgcgcatgggccgacgttccggccgaatccggccgccatcggctacggcatacgctttctcacggccatcgcgcagaaagcgctcaacgagttacgatgaacgcaccccacctatcattccggctgataccgaacgataagaaatgcctgtacccgcaagcacgtgttacggtgcttcgcttcctacactggtgccgtatcagtatgggcgtccgtcggtgtttcctaagggacggcggcatgacattgaggggataatccatggcgagggatttcgttaccgcggctattcacggcggctatgaccgggcggctcacggtgaggcggcgaacccgccgatttacgccagtgcggcgtttgacatggtcagcgccgcacatggtgacgcactgggtgccggcgaagccgagggcttctcgtactcgcgtgtggcgaatcccactgtggatgtgttcgagcgtcgtttggcggaactcgaaggtggcgtgagcgcggtggccgtcgcctccggcatggccgcggtgtcgtatgcgctgttgtgtgccgccgaaggtggtggtcgcatcatctctccaaccaacctgtacggcgcttccgtcgatgccatggagaccttcttcccgcagttcggagtccatgccgatttcgtgcgcgacatcaacgacctcgatgaggtcgcttcgaaaatcgggccggacacccgcgccatctacaccgaatccgttgcaaatccatccactgaaatcaccgatattgaaccattggcggaactcgcgcatcgcaacggtattccgcttatcgtcgacaataccgtgcccaccccgtacctcttccggcccatcgagttcggagccgatatcgtggtgcattccaccacgaaaggcatcaccgggcacggcaacgccatcggcggagtggttatcgacggcggaaacttcgattggaccaacggcagattcccacagttcaccactcccgaactggtcgtcagcgatgaacgcaaaggaatagcgcgcagcttcgccagcagattcggccgcgaggcgttcattcgccgtgtacgcatcaaatatctgcgcactttcggcgcggtgcccagcccgttcaatacatacctgtcgatggtgggattggaaacactggctgtgcgagaacggcaggaagtcgaatcggccacgcgtattgccgagcatctcacgcatgcgccgcatgtgctcaaggtcaattattccggtttgggcaacacgggtcagtatgatctggtcgccaaatacttccccaaaggaatcggcacgatactgtcgttcctcgtcgacggcgatgagaacaacgtgagacgaatcatcgacggaaccgaggtattctcctatgtgccgaacatcggagacgcgcgttcgctgattgtcgatcctgcgcgcatcacgcatcgcgaggttcctttggatgcgcgtatcgccgccggagtcagcgataatctcatcagactttccatcggattggaaaacgtcgatgatttgattgcggaccttgaccaagccattgccaacgcatactgacgtgtatcgcttacgtatgcggataattgttcgttctgagaaaaacctgcgctgttattcttggggcgttgtgaatttgggttgttgtattacgaaagaaggaacaggacatggctattgacgtctatggcgcaacatggtgcggtgattgcaagcaggcgaagaacacgcttgaggagcttggcgccgaatatacgtggcatgacatcgaaaccgaggatggggcggccgatcgtgcggtggccatcagcggccagcagcacattcccgtggtgctctatcctgatggcactttccaggtcgaaccgtcggctgtggatatcaagaacaagctcaacgagctgaatatcaagtaaagacaagagttgtacgagtttgacgatctgctgcatctgtgagcgaacaatacgtcggcgtccgatgtgttattcattggtgtgaatagcactccataggcactggatataaccacgccgaaacacaggtgagcaagcgcgtctacggtaagggattgtgcttcgcgaacgagcgttgacgtgcataacagcagcgaaaagggagtatcgggatgattcggattaggggagtgagcaagagctttgccgacaccaccgtgctggatgggcttgatcttgacattcctcgacaaaatgtggttactgtcatcggcccctcaggctccggtaaatccacactgttgcgcattctggatttccttgagcacgcggattccggtaccgtcgatttcggtgatggtcttgtggatttgaccactaccaaatctgccgacattcacaaggtgcgttcgaaaatcgggttcgtgtttcagaactacaacctgtttttgaacaagacggcattgcagaatgtgaccgaaccgttggtgtattccaagggaatcaagcctgatgaagcccgcaagatcgctattgagcaactcgatcgtgtgggacttgccgattttcatgatcggtatccgagcacactgtccggcgggcaacagcagcgtgtgagcatcgcccgcgccgtggctatgaatcctgagctgttggtgcttgacgagcccacttcggcattggatccggaaatggtcaacggggtgctgggggtcatcaagcaactcggtagcgaaggcatgaccatgctgatggtcacccatgagatgcggttcgcctatgaggcatcgaatcatgtggtgttcatcgaaggaggccatgtggtcgagcagggtgatccgaagcggatcttcgaacatccgcaggaggagcgtaccgtcgagttcctgtcttcaaccaacaatgtgctgatgattccggtgactcggtagaggcgtttcacggctgttgtaattaattgtgacaatatcaagagaagggtttgtcatgttcaataatcaagtgattcgcaaggctgcggctttgctgtccggtgtcgccgtgctggtttcggttgccgcatgcggttcggcttccgcttccaactccagtgcattggagcaggtcaagcaggccggcaaaatcgtgttcgccactgagggcacctatgctccgttcagttaccatgactccaaaaccaatgagctgaccggttacgatgtcgaggtggccaaggccattgccaaggaggtcggtatcaaggccgagtttgccgagggcagcttcgactccctgcttgccggtgtggatgccaagaagtacgatacggttgccgatcagatttccgccaccgacgagcgcaaggccaagtatgatttctccgaaccatacacctactcctacggtgtcgtcattacctccaaggagaacccgaagaacgtcacttcgttcgatgacgtcaaggggcttcgcgccgctgaaaccggtacctccaactggaacaagaccgctcaggagaagggcgctactatcgttcaggttaacgatttcggtcagcaggtcgatgccatcacgtccggtcgtgcagatgtgtcattgaacgatggccttgctgcgctcgactacctgaagcagaagccggatgcggacatcaagattgccgccaagtccgagaagactccggccgcctacctgccgttccgcaagggcagcgatgacttggtcaaggaagtcaacaaagccattgtcaagctgcagaaggatggcacattgaccaagatctccgaaaagtactttggcgaggacttctctcaggagtgacatgtttcccggctctcctgtaattaggggagccgggaaatatgagctggcctcgtgaagattacgagcagacgcaacatataccacacaacaaaggatgaccaatggacgcacgagtatggggaatagtcgtagattcctttgctaagctactgattcccggtatcactgtgaccattccgctgacgctgatttccttcgctctcggtttgatactggcgattgtggtggcgctggtgcgtgtggctaaagtacctgtggcctcccaaatcgcgtggttctacatttgggtgtttcgtggtacgccgttgctggtgcagttgttcgttatcttctttggattgccgtccgttggcattacgattccggcattgccttccgcggtaatcgcgttctcgctgaatgtgggcgcctatgccgccgaaacattgcgtggtgcgattcttgccgtgcctaagggacagcttgaagctggcttggcggcgaacatgccgtatgtgacgattatgcgccgcattattctgccgcaagcattccgctccgccttccctgcattgttcaactccttcatcgcattggtcaaggacacgtctctcgcggcgaacatcaccgtggtggaaatgttcatgacggcccagcgcattgtggcgatttactacgagccgctggtcctatacattgaagtgggcttgatctacttgctcttctgcacgttgcttggatggcttcaggattactgcgagaagaagctcaacgaacacttctgatgtgtttatatggcggcagtgcttgattcaagtcgggtgtttccttggttgaaatgcccgactttgttgtttctgacgtgcgacttggctgattcaaacattagtgcacaagatgtggctgccggagtgaacggaacatgaaatctgacgttcgctttcttggacttgcctgtgagagctatcagttcccgggcgtgcgatggtagcatggatggtgttggggcgcggcacaacgatatgccgtgcttgacccttgtgagaggagttttatatgaccatcgcaagtatgttgggcggaaccatgctgttggtgctaattctattagtcgttcttatcgtgctgctgggcgccgcattgttcatcgttccgcagcagcaggcgtacatcatcgaacgcttcggcaagttcctgaaggttcagttcgccggcattcacatccgtatcccgttcgtcgaccgcatcgccatgaagaccaacatgcgcgtcaaccagctcaacgtgcagctggaaaccaagacgttggacaacgtgttcgtgaccgtcgtggcctccacccagttccgcgtgaacccgaacgacgtggccaccgcctactacgagctgcgcgatccggccggtcagctcaggagctacatggaggacgcgctgcgttccgccattccggccctgaccttggacgatgcctttgcccgcaaggacgatgtggcgttcgacgtgcagaagaccgtgggcgccgagatgagccggttcggtttcaccgtggtcaagacgctgatcaccgccatcgacccgagcccgcaggtcaagaacgcgatggactccatcaacgccgcccagcgcgagaaggaagccacccgccagcgcgccgaggcccaacgcatccagatcgagacccaggccgccgccgaagccgagaagacccgactgcagggtgaaggccaggccaactaccgccgtgagatcgccaacggtatcgtcgaccagatcaagagcctgcaggccgtgggcatgagtatcaacgacgtgaacaacgtggtgctgttcaaccagtatcttgacgtgatgcgctcgctgagtgaatcgaacaacaccaagaccgtggtgctgccagcttccacgcccggcggttatcaggatctctacgagcaggtcaccaaggccatgctcaccgcggccgagacgaagtaatcaccccgtttgcaaatcctcatccatcgatagtgaagcccctccaagcgaggggcttcactgcgttccgcgctgattccgacaagtgcgcaaatgggccgtatgcagatcatgacgagtgtgagaatcatctacttatagattgtgacgaatgcgataatatggcatttatagaacttgataagtgtaaaatacaggatattacaaaatcagacgagtgtgaaacgaaggggtgaaacatgttgaaacgcaaggcatatcagcgtattgctttctggaaagagcataagaccaaccaagcattgctcattactggtgcacggcaggttgggaagacgtatctggttgaggaatttgggcagagcgagtatgagcatatggctgagttcaacctattgcttgacgacagcgtgcgtcgttcgtttgcgcaagccaccagtcccgatgatttgatgctgcgtatttctgttgctgcacaagggccgttggttgtagggaagacgcttatcttcattgatgaaattcaagcatgtccacagattgtcacttttatcaaaggactggtggaccggggagactatgactatattctttccggctcattattgggcgtagaactggaggatgtgcgctccctgcctgtcggatacttggatgaatttatcatgtatccactggattttgaagaattctgttgggcactggggctgtcggaaaccgtcttcgacattgttcgtgacagttacggtgccgtaaaacccgttcctgattttgtccatcagcgtttgacggatttgttccaccggtatctgttagtcggtggtatgccggctgcagtgacttcgtttgttgagagcaaggtcatcgatccagtgcgtgcgattcagaccaatattcgcgcatactatgagcatgacattaagcagtatgcgccgaaggataagagactggtcattcaagaaatgtatcgacttatccctagtgaactgcaaagtcaaaatcgcagattccaagtcagttctattgccgaagtcaaacgattctcgcagattgaagatgaattcctttggcttacccgtgctaatgttgcgctgcccgtatttaatgttgccgcccccgtggccccgctgagagccagcaaagaacgtcgattgctaaaactgttctattccgatgttggattgctgaccagctcgtatggaaaaaagtcagcactgggcatactggatggtcaggctgcgatgaacatggggggagtctatgagaatgtcgtggctcaggaacttaccgcgcatggattcaccaatctgtattactttacgaaaaaaggaattggcgaactggatttcctgatagagaccgatgatggtgatgttttggccctggagattaagtcgggcagatattaccgttctcatgcggcgcttgacaatgcgttgagcgctgatggctacaccattgacaaggcgatggtgttcgcggaaaccaacgtgttccaagaggaaggcgtcacatatttgccgatgtatatgctcacgatgctggttaatgagtgatcagtgccttggtggtgcgatgcaggcgatatttgtgatggcggtcgataaggaggtgctcaacgattctgttgtcggaccggttccgagctggtcatgaggcgtcattggaaagttgcggtgtgtagggtggtgtctttgccgagagtacagtgtttctcgaaaaatgcggtgcatgcgatatgtttaatgtaattctaaatattacattaaacatgagtgagcttcccgaattcaatttgtaagtgcaacgttcgtctttgggtagcttgtcttcgacattagcttgccgagttcgcggtatcaaacctcgttgggtgtttcccagtccaggaccttcatggggtgtcgttgatctcctggacgatggcctgcaagtccgcgtccgtcaggccgtcgaaaccggtccttttgggcaggtagcggcggatgcgcccgttgcggttctcgttgctgcccctctgataggacgagtacgggtccgcataataggtgagcatgccgagcgactcgtccacgagcaggtggcaggaggattcggtgccgttgtcccaggtgcggtcgatgcgcgcgggcgcggggatgtccttgtagatgtcgtattcggcgcgcgcggtggacagcgcgctcttgtcggggatgaacccggcgaacagacggcggctcctgcgttcgacctgcgtgtcgccgcaccgcctcgacggggaggcgccgacggccgtgtcggactcataatggccgaacttgcggcgcgggcccacgcgtttcggacgttcgccgatcggctgtgtcctcagctcgtcgatccggacacgttcctctgccgacaggtgggaatacactctcatatcgagcgcgacactttctctctggttatgaacttgaacactttcagccatagacaggtgttgcgcttctatttagaactcgggcgctctatcattgcatctgtgtttcgctattgtggggagacgttgtaaatgccgattgtcgcgggattccggccgttttgtgatgcggtggcgacgtcgtggcggacgagtgcgtatgcgttgcgtaggcgtccggtgcgtacggtggtgatgtggctgtcgatgttggcgatgatggcgatgccgtcgttgcaggtgtggctgatcggttgggcgtgcggcccggacgggcttggtatggggtcggggctgggcgtgggccggttcgcagtgatcctggcggtgctgacggtgggcgcggtgttgatgtcggtgtcgtcgtcgttggcgcagaacatgcgtgacttgttgcaggagccattgatggccgaataccagtccgatctgaccgacgcgctggcgcgtctgactcccgcgcagacgttggacgacgaggtgacgacgcaggtgcgggccgcgcgcgacgcgatcccgtacaacgtggcttcgcaggccgcggacgcgacctcagtggtgggcgcgctggcgtcgatggtcatgctggccgcgtccttgtggcatatgcatccgttggcggcgctgatgatcgcgttggcgatggtcccggagctgttggcccagttcggcgtggagaagctcacgaacgagttatggcccaagcgcggcagggagtcgcgtcgggcgaactatttcgagcggttgttggattatccaccgtcgagcacggagatcgcggccacggccggttcgttcggcatccctgcgcaggcgcgcgtgcgctatttcaatatggccggcatgtgggagcgtatctcgtggcgcacggtgcagttgaccggtgtgagttcgctcgtgttcgccgtgctgacgggcggcgcgttctggctgatcctgacgtccggccatgcgtccgtgtcgagcatcccggccgcgttggtgggcatcatgacgggattgtcggtcacgcgcaccactggcgaggcgttcggcaacctcatggcgtccacgccgatgattcttgcctacgaacggctcatgggcctgctgcgcgcgaaccccgcgatccccgaaacgaccggtccggtcggcgtgcacgtggagcatctgacgtacgcgcatccgactgttgcaaagcatgacgatgacgcggatgacgcgtcggcagcgtcggttccggccgttcagactccggcgttggacgacgtgtcgttggatgtcgaagcgggatcgatcgtcgcactggtgggcgagaacgggtcaggcaagaccacgctcgtcaagctcatcgccggcatcctcgacgccccggacggcaccgtgaccctgccctcgggcgcggacggcgggaacggtcgtaccttggggtcgtgggccgaacggttgggcgcgtcgagcatggtgttccaggatttcacgcacatcgaggtgaccgtgcgcgagttcatcgatcccgctctgcggcaatcggacgatgagttatgtgacgggttgcgtcgcgcccgcgcgctcgacatcgtggatgggcttcccggcggcttggatacgcagctcggtcaggagtggggcggcgttggcctgtccggcgggcaatggcagcggcttgcgctggcccgcacgttcctgtccggcaagccgttgtggatactcgacgagccgaccgccgcggtcgacgccaccgccgaggccgcaatctaccatgatctgatcgccaaccgtccggcgggcaccactgtgatcgtcatcagccaccggccccgcgtgctaaccggcatggaccggattatcgtcctcgaccacggccacgtcaatgaaaccggcacctaccgtcaactggtcgaccgcaacggcaccttcgcccggctcgcacacgacagcctcgaatgagctcgatggcatatccggttgattgttaaaaactcagtggccggccgacagattcgtccgacgaggctcgcgcgagtgatcataacgcgggtcgcgtcggatatgcgggagatggcacgccttatatcaaaagcgatgattttcaaataaggacacggccccatcagccggtcgcgggtactacagtgaaccacaacgttcctccccccgatggtttggggaaacacagaaagaggttggtcgtcggcctgatcatcattgcgattcgcaccggcttcttccgcaagaagctgggtgccagcgagaaccttcaggagtatttcgcctgaatcgggcttgtcgtccatccgcattccgcctcagctactcatatcgataacttactaacaatccattcattgtcttcttaccagtaaaggaaatcgccatgtccaacttcattcccaacaccgtttccgcagaacgcaagcccgtggacatcgtcaccggcacctatgtggactatgccggcgtgacccgtgccaaatccgttcccgcccgcaggcgtgaagccttcgaacgcaacggattgggcgccgccctggtctgggtggtgttcggcgcggacaactcgttcgccgaaaacgagaaattcaacgtgtccggcgatctgcgcctgcaccttgacacttccgcttctgcattgcgtgccatacgagcgtgaagcggcgtttctctgctcggtgcatgccaacgtatacatggatgtcagccttgccaatacgcatatgggagcgcaggtgagggaagtgctgcgcaatgttctggcgtggtgcgcatttgacaagttgctctatgcgtcggacggcgtcggcatcagtgaattgcattatctggccgcggtgctgttccgcaggtatattgcgcgaatcgccatcgactgggtatcggatggcgcatggaacgcgaatcaggcgaaacgggttatcgacgccatcgcgcatgccaacgcggaacggctatacggtttggcgtgaacgggtacttcgccggtgccgtcacttcccgaggaacgccgggatggcttcagccgccgcgtatcccttgcggtacatcatctccagaccctcgaagttcttcttcagggtgttgaggccgtacaggtcttcgggtgcgaggatcagcactttgccttccgcctcataatgcttggcgagttcgagttcgtcgttgtaggtcttgtaacgcatgcgcagcttctcagccgcagcggggtgggagcgttcgagaatgcgggccggagccagatccttctgctgcttgcgtacttcgtcacgcaagcgggaaagaattagaatcacgcgctcataaccatcatccaacgctttctgcaccggcaccggatcggcgatgccgccatcgaaatacggcacaccatccactacatacggctcgcaggccaccggtacggcggacgaagccttgatgatgtcgaaatcatcaaaacgcacgcgcgatttgtcgaaatacttggtcgagccgtcctcggcattgcaggccaccacggtgaatccggtcggattggcctcaaaggcctcgaaatccaacggattctcaccgtcatggttgctcagcgtgccatagatatagtcgagattggcgaagttgcggttcttgaaatagctctccgcgctcgcgtactccttgcggaacgcgtatctggtgtagaaggtgtggttgcggccgtgctggcgggcgatgaacgaggtcatattggccgcgccggcggaaacgccgtagcacatatccacgtcgatgccgtcctccagcatgcggtccataacgccgcagccgaaaatcgcgcggaacccgccgcccacatcaatcatcgcggtcttcagtgccatatcagcctcctattcatcatcatgcatccgatcacgcattcagcaggttgcgtgaaagccgtgtaacacgttcggaggggtcggagttcgcgagctccacgccgccggtcgcgtcttcgggtgccagtttgcccagggactccaacaccacgtccaggtggcgtacggttccttcgttgccgtcgatgacggcggcccgttcgggcagcagttcgcggaagtagtcgcggtagaacacgaaatgcgtgcagcccagcaccaccgagtcgatgcgctccatgtcgtactggtcgaagtagccgtgcagcgtgcgcatcaccaggtcatggtcgccgagccgcccggattccacaatctccaccaagtcggggcaaggctccttgaaaatcgtgttgttggaatcgaatcgatccatcagcttggcgaacttccgctcacgcaaggtcaggggagtggccgccacaatcaccctctggggaatatgatgcgggtcggaaggcacgtcaccccggtcgcacgccactttcagggccggctccatgccgatgatcggaatatcgtagtgttcgcgcagatcgttcaccgcggcggaagtggcggtgttgcatgcgatgaccacggccttgatgccttgacgcacgaaccgttcgacaatatcgaaactcagggccctcacctgctcaggcgtcttgacgccgtacggggcgttggccgaatcgccaaaatacagcacacgctcggccggcatatccttggcgatttggcgagccacggaaataccgccaagacccgaatcgaatacgccgattggagccgaagagctcatgcctgaatcctccctatagccatgcctgcaaccgtatgttgccgcgaccgatcacaaagccgattgttttgcggtgttgtttcgctccctagagtactctgaaagccatgagtcttccgcaacgagtaaccaagacacacgcaaccggcaatgatttcgtggtgtacctcgacaagtccggcaaattcgagcccaccgccgatgaggtccgattcctgtgcgaccgtcacttcggcattggcggtgacggcctgattcgcctgaccaggcccgatttcgtgtctgatttaagcgatgatcagctttcggacgtactggccgggggcgcgaaatggttcatggactatcgtaacgcggatggatcgttggcggagatgtgcggcaacggtacgcgcgccatcaccttgttcgctcagcgcgagggtgtggccgactccaccgagccgttccgcctcggcacccgtgccggcgtcaagattctgacgccacgcggcaatatgaggccgtacggagccaacgtgttccaagtcgaaatgggggagtggaagatcggcgaaaccgacgcctacgaggtcaccatccccggcgctgagggctcggcgcgcggcacgttcgtggatatgggcaacccgcacgtggtcgcggtgatcgaggatgccttcgcgtccctgccggtggtcgaggcgctggatctggtcatcaagcccgtggtgagcccgaccatcgaatccgaccagaatgtggaattcgtgcgggtcgacgacatcgatcagaacaccggcgtgggtgaagccacgatgcgcgtcaacgaacgcggctgcggcgaaaccctgtcctgcggcaccggcctatgcgccacaggcgttgtgctgcgggccaagaccggcatcagccactgggacatcaccgtacgtggcggcaccctgcgcgtggacgtcaccgacagcgacgtgaaactgaccggagcagccacgctggtcgccgatatcgatttgttgtaaaggaatcaggcagcgaacagggccgcgccttcggtgacgatgatgagtaccacgatcgccacgatccacagtatgtcgaccatgaggtcgatgttgaggcggtaatacctattgagtccggccggcaccgccgcgacatcggcctcgctgtcgccatcatcagccgccacagccttacgtgacggcaatccctgcactgccacggtcgcatggctcaacgccatgaactggatggtggtggagaacatcagggtcaggcaccacgggcacagcgcgtgaatcacgaacagcgactgcgtgctcagccagtacgagtaggccaaagcggccagtccgcccagccacgtgcaggtcgcgaaccaacgcggcaccttcacacgcgccaaaccgatcaccgcgatggtaatgaacaccgattcggcggcgatgccgaagaacgcgttcggatagctcagcccgccgaacttcacgatttccgcctgccaggactgggccaccgccgaacaggacaccaccgagttcagatcgcagccgagcgcggactccggatgcctagccaactgcaaagtctcggcggacagaatgagcgaggcccccaatgccactgccgaggcgatcagcatgatgagatatgtccaagtggcactgtggcgccatccaatcaacggtcgcgcctccgccaagccaagcggcgtggtgttcgtggtactggatgatgtgtcggttgcggtgttacgagtcatcatgtccctttcgatagcgctgcgctccagattagcctctgcggttgtcagctgagtgccggatgtctggtcttggccgttggcagaaggtgacgacctgtctgcgccttgcgtgggaatgctgagatgaggttacgatggaaggtatgactggatatgtgatgcctttggagccgcccgccgtcgggtgggacatccattgccataccgtcttctcggatggcacggaaacgccggccacattggccgaacaatccaaggcattgggactcaagggcgtggccatttccgatcatgacaccaccgccggctggccggaggccgaagccgcatcccatagggtcggtttgccgttgctccgcggcaccgaaatcaccgccacggatgagaacgtctccgtacacatgctcggctaccagtatgatcccacgaatcagcacatcacggacttgttcgccgatactcgagccgcacggttgcaacgcacgcagcgcatggtcgaattgttgtctcgtgattatccgattacctggcaatccgtgctcgcccaagtcaaggagggtgacaaaaccaccattgggcggcctcacatcgctgatgctttggtgagtgccggcgtatatcggactcgttcggaagcgtttgcgaatgcggtcagcgcctcatccaaatactatattcccacgccctcgccgacctctcatgaagtggtggccgccgtcaaaggggcaggtggtgtgattctgatcgcccatgccggtgatgtgagccgtaaccgcagactgctgtccgatgaccagatcgaagcgttgatcagcgagggattggacgggctggaggtatggcaccgaggcaattcaccggagcaacgagaacggctgctcaccatctgccgccggcaccagctgctggtcaccggcggatctgactggcatggcaaaggcaaaccgaacaaactgggggagaacctcaccgacgaggccactgtcgaagagatcgttcatcgcggcgtgctcccgttatatcggtgattcgcggcaatacaaagcggccttgagatgatgcccaaggccgcttatgcgcgattcacggtcacagcgtgccgaacccgacggcgtgcttggtttcggagccgatgatcgcgtaaccgagtgccttggcgggcacgatgatgcgacggcccttgtcatcggtcatatcgatcgtcgcgttgtcggccacggcctgcgcgatggcctggctcacattatcggctgattcgtcggtgctgaagttcaccggtcgtgccacgttctgaatgcccagttcgatatccatataaggctccttgttctgccgtctttgtgacgaacatcatggtaagtggccgtcaccggccgaggttctgtactctattgtgccgcgtgtctgcgtcgtcatgtgcggtgttacgcgctcggcgtggcgcggaacaccgcacacgacattatttggatgatgtggatgattcggccagcggattgccctcgctgtcatacccgtccaacccggcacgggcatcgcgcagagcgcgttcttcccgctccaacagcggaatcaccgtggtttgggcactcgaggctccgtgctgaacgaaactgtccggagtatcgtcattcaccgcatcgtcggtcggggcggcggattgagatgcaggggaagcgtcggttgacgtcgtgccgctatgcccgttcatactgaggagctccttcagcgtgatcgtcaccgaagaatgggaagcgccatgtgagggctgcggtttggtcgatcccgtaccggttgcggtgccggagacactcgcttgcgggtgattggcggtccggtcagcatcgggttcgacttccggggtaagatccacgtcgccagcggccacgatgtcagcggaaccggtgcgatctggatcgggcgtgtcgtccgagacctcggccgccgcggtaccggtttcggactgctgcggttgtgcgggtacctgcgtggcgggtgcctgatgacggtcgtcctgcaacaatgtgccgacggtgattgtggagggggaaccgggctccgtcgacgcggcggcggccgaccctgcggctggggccgatgccggagtgtgcttgatcacgcccaactggtgtgcgagtcgttcgacctgtgccttgaactgcatgatgcgattgttgtccgcacggttcaacgcctgaatgaattcgcccacctgttccatctgcaaccacaggttggccctgagcatgatgagatcgtcaagtcgagagcccatcatgcggccgtatgcggaaagcacggcgttgcgatgggattcgtcgagcttgccgaaaatccaggcaaggtctcgtgccggatcgttgacctgcatatcctgccagttggtcaccgtggtgatggtggaaccggagaacaggaagtcgccgtcggagaatccgccgtgaaccgtgcaggtggagaacgaccacaatccctcggtgtccatgatgcgcgcccagctgtcggtgatttcttggggaacatggccggcggagcgtaagcggcgaatccaggcggtcagctgcgaacgaatctgaccggtggtgactaccggatatttggcattggccagaaaagtcgaaggcagacgatgaatggctccgatggaggtgccgacggccgcgcagtcatccaatgtcaacaggtcgagaggccgcgcctgaccatcacggtggacggcgatcatcacggtcgtctcgcctgtgggaccgggcttgcgcggggtcagcggtgtggactccgcctgggcctgctgccccacggcctgtgcggtggccgtctggccgggttgggaaacgtctcccgggacgaatgcgaccacacggtccatatcgaagccgaggccaccaagctcgcgcgcggctgccagtgtctgcgccgctttcacacggcgaatcagacgtgtacgcccttccctggtgtcagtggcgtatacgtcgtacaacttgcccgaagcatcttggatcacggtctgatcgatgcctttggcctcgtcggttgcgctggcctgcacgttctcgcgtacgccggccacccccagattcggcaggacggctgaggcgagtgccgccaacatataatcgctacgtttcatcacccttccacactaatacatccgtggcgattcgcaccgcagaatgacacgcaaaacgcatgattctggcgatgttttgtcgtgagcccgattcagccataggcgtgagtcgtgccgtgagcgcgaatcgtgccacaatggacgcatggaacaggcgcaggggattcttgaggggctcgatgagcggcagcgtaccgccgcgactacgttgcaagggccggtgcgcattatcgccggcgcaggtgccggtaaaacccgcacggtcacacggcggatcgcctatgcctgcgccaccggggcatggaagccggagcgggtgcttgccgtcaccttttcggtaaaagcggcggcggaaatgcgcgcacggttgggccagctcggcgtaggggaaggtgccggacgttccggttcgggtgcgggaactgccggagtcacggccgcgaccttccactcagcggcattgcatcagctcaacagcgtctgggcggacatatgcgaggctccattcccgcatgtgatcgaagatcagcgtgacgtcgtctcccgcgcgatcatccgcgccaccgcacgtaccgatgccgatccgctgaccgttcgcgatgtgctcgccgaaatcaattgggccaaaatctcgttggtggcggtggaagattatgcccgggcctgtgccatcgcccataggcaaccgcccgccggactcgacaccgctcggttcgccgacgtctacagcgcctacgagcaggaaaagacctcgcgtggcgaaatcgattttgacgatattctgctgctcgtatgccatatcatggatgattttcccgaagccgccgcccaaattcgttccaccatcggctggctcaccgtcgacgagtatcaggacgtctcgcccctgcaacacaggctgctgaccctgtggctgggcgggggaggacctgacggcaagagcgcgatgaaccgcaacgtatgcgtcgtgggcgatccggcccagaccatctactcgtttgccggtgcttccagctgggatctgctgcgtttcgccgatgaattcgggccgctcgccgccgatgtcaatctcaacaccgactatcgttcgacgccggaagtcgtgaatctcgccaaccgggtgcttgcggccgcgccgaaccgtgaggattacctgaaactggtttccgcccgcgaatccggcccgcgcgttacccgaaccgcttatgagagcgatatggaagaggcgcagggcgtggcggcacgcatcgcccggttggtcgccaacggagccaagccgtccgattgcgcgattctcacccgcatcaacgcccaacagccggtattcggtgccgctttgcgcgctgcaagactgaaataccgcgttcgtaaggattcgggatggcaatcatccgcgctcgccgacgatgccgcgtccaaacgtgcgctattggaggcgatgggtttggacgccaccggacttgccgcaaacgacgatcccggcgttacgatttccacgatccacgcatccaagggtctggaattcaagcacgtgtttctgatcggctgttcggaaggactcttgccgtacggttcgccggaaacgggggatgcgctggaagaggaacgccggcttatgtatgtgggcatcacccgagctgaggattcgctgcatttgtcgtatgcgcggaccaaggatggttatggagcgcaacacagacgcccatcacgatttttgtgacgggcgtcgttcatgcatactgaatgctcctgaacattcaggagcgggaattggccgaaggccggttgactatgcctgcgtatcctccgagttgccgttgccgccatcttctccgtcttcgccgagaagcttggacagttcggcatcccaatcgatatcgccggtcttgccatctgcggcagggtgggaggcggaaccgttggcatcggaagaggagcctgaaggggcgtcggatgacggagacgcgccatcctcgggcttgtcgctaggcagcgaaggcagcagatcgggatgcgaccacttggcgtcacggccttcagggccttcggcggcggtgatcatctcccacaatccggcggcctcgcgcatgcgcttggggcgcagctgcaaaccgagcagactttcgaacgtacgctcggcggggccacccatcgcgcgctcgcggcgcatcatctcacgcaactgttcgatatgaggcagatgggccataccggcgcgccacaccacgcaatccacccagccctcgaccatcgccagcagcgattccagcgaagccagcgcctcgcgctgttcgggagtgtcggggatgccgaccttggtgagattcaccgcgccggaaatcgactccggatccatcgacgtggcgtcacgcagctgttcctccatcgcatccagatcgatggagatgccgcgtgcgtacttgccgatgagcgcctcgaaacgcggcatcagccacggtaccgaggcatacaggcgggcgtgagccatttcctgcagggccaggaaggaaagcacttcagattcgggaattttctcggtggtctcgaatccggagagcgcagcctcgaacgcggcggcgtcggcggaagcatcggagccggagacttgggcggtaccgtcagttgccggagtatcgctgttgccggccgaagtgaagccaatgggattggcggaagcgtcggtggatgtggagaacggattgaccgagtcggttgaagtgccggccgtatcggcctcgggcgcaggagtctcaccgttcagcatcctcgcgtattcggtggcgttctgggcaatcagtccaccagccggattcttcagcaatgcgatgccctgatcgaaactgccatgcacttcatggctcagattgccggccgcatgccccaactgcatggcaaaggacgtgttgcccagcagcttcatcagctgggctggatctttcatgccgtcgggaatcggaatcggcaccggtccggcgaacatgccggcaatctcgccatcgccgaacgcgccgccaagacgctccgaaatcaccgaagccaaagcgtcgttcatcgactcggccacaggagctgcgaacttcgcccactggtcgatggtgccttccacccagccggcgcgggtcagcacatccggatcgccgggcgcgggattgaactcgcaggcggtatccagccacaggttcgcctcactcatcgcgcggcgagccgcctcgccatccacggcggacacgctggacgcggaaccggaggcgttggcctgctgcaaggcaatcgacttggcgagcttgacgttgatcggcccttcctcgacagtgcgctgcatatcgcccatcgtgttgagtccgccggcgctgaacgcggccatcatctgctggacttcggatggattgggcagtcggctggggtcctgactcatcagctgttcacggatctcctcaggcaactggctgatctgctgccaggccatctcgccctgaatggggccgaagcatttgatcagccactcgtgaatcgcgttgtcgtccatgcgtatccttctttgccgcggtgtgttaccccaagtgtagggtctgcccgggcctgttcgctcgtggccgagcaatattttcggtttatgttcgttttcggctgatttcggccctccgcttacactgtagggtatgtttgcacgccacaggaatcaggaaccagacttcgtccaggagcagaagagcccgactgcggattcggaagcgggggatgggcgcatgccatcgttcgaagtgaagcatgattcgcgcctatctcgtggaatcagccgtgctcgggcctatgcggccgctcgtccgaaacgccatttcgtcggtgcattcgccgtgttgcttggtgtggtgattctgctgctgcccagcccgtacgtcatcgagatgcccggacccacccaagacgtgctgggcaaggtcgaggatggtgcggttatcgacatcaccggtaccggcgtgacgacgtataaggattccggcaagctgctgctgaccacggtgaacgcgtccggcgtgcccgggtacccgatcatcaacgcgcaggccgtctggggttgggccaatccgcaggtggaggtcatgccgcgtgaggccacggtaccggtgggccagagtgcggaccagtatcagaagaaagtcgaacaggacatggccggttcccaggattcggccagtgccgtcggtctggcgtatgccaaagcccatgcggacgaactgggcattgacgccagtacattgcaacacgccaaggtgacgatgcacgtggacagcatcggcggaccgtccgcaggcatgatgtacacgctcggtctcatcgacaaactcacccccgccaacgagagcggcggcaagaccatcgccggcaccggcaccatagacaaggacggcaaagtcggcagaatcggcggcatagagctgaagatgcttggcgccaagcgcgatggcgccacatggttcctggctcccgcatcgaattgttcggatttggccggccgcgtgccgaatggtctgcgcgacgtcaaggtcgccacgctggacgaggcgtatcaggcgttggtggccattggcaaggggcaggccgacgatttgcctcattgcgaggcatgacacgcgcggccagtcgttgtttctggtgagacgactcgcatgggtctgcccacaatgcggcgattttcggccgcgttaacgcatttgttcgcgaagacttgctaatgtgtcccctgtgaatcaaacggcatcacagaacgctgaagaatttggtttcgagcccggcgatatcgttcaggagtggctctgggacgacgatgtggacgattccattcgtgcccagattgaagagctcacgggcgaggatctcgtggacgaggactacgactccgctgtggacggcgtcatcgtatggtggcgcgacggcgatgatgaggacgaattgtccgatacgatcgttgacgcctacgcggtactgggcaatgacggcccgctgtggatactgactcccaagcccggccgcccgggtgccgccagctcctccaccgtgcagtccgccgcacagaccgccggtatgaacgccgccaccccgctgaccgtcagctcggactggaacggcatccgcctgcgcgcattcggcaggggccgctgataagcctcaatcaatacgcttgactttaagcgtgttgactggcgtcgcgtgctgcgtagtgctgctgggcgtgactgaatgtcatcgcgattgagcgctacggcacgcgtatgcgacaccacgtgtcgcgcagtgccggccatacgctattgttgtcatttgcgggcaattagctcagttggttagagcgccacctttacacggtggatgtcgggggttcgagtccctcattgcccactttcatttttcatcacttcgtgcaatcccctcattccacagacatgggctgtgacgatattccctgacagtcttcggcaaggggttctgaaatctcagtgagatgcgcgcagaaggaaaccggcagtactgctacaaaatcgtgaatttcggtcttcttggtcagatgcgtctcaatagtcacgtaaagttgtggcagagtgtttatatccagcaggaggtcgaatagccgatggcgcaggaacttcgtgaaggggacggcaagtcgggcatcgcacgtgcgggcaagcgcaagtgggggtatgaccccgctcaggtggacgctttcttggagcgcgcccatgctctgtatgacagcgagggcatgaatctcacccagcatgacattcagaacgtgtcctttgatttgcgcaagaacggctatgtgatcgcacaggttgacgccgcgcttggacgtctggaacgtgccgtggtcgataagcagaccacatgggagatcgcacagcatgggcgtgtgacgtggaaggcgaagaccgagaagctgtatcacgaagtccagaaccatgcggagcgtgacgagcgcgaacgcttcaagtccggagcgcccaagcagccttcgtacgataagaagcaggtggatcgtctggtcgaccagattgtggacaaggcggcggccgcattgggcgttgacggcgtgaccgaagacgatgtacggtctttggccgatctcaatgcgaatacggtcaacaatgtgatcttcacccagcgcaagggcaagaaaggctatgacgagcgacaggtcgattacttcctgaacgcctgcgtgcagttgctgagtcgcttggaatcctatgcacgtgtggccgatttcgtgtccggcgagcccacggctcctgcccagaccgccacgaacgtgaccgttcaagcgaacggcgtctcgccgttgttcgcttccggaacgcagcgcccggcaactgacgaacgttttgcgccgtctgccgttgctcatgacgaatcattcgatgccctgcatcaggccgagcagagcttgttcactgctccggctccggttgctcccgcggcgccggccgcggcggcaccgatcgcctatgcgccggctcctgcatcgttcgatacttccacaagcaccaataacaccaatgcggaacagccggtttcctttgctcccgcagcatacccggtgcatacgtccaacgagtctgcggcgaagcccgtctccgagacgccttccgtggctcctaccgcagctgttgcggctgagcctcccgccagtgccccgtccgcgccggtttccggtgtgaccgctggcagcgccccctcgtttgctccggcacagtcgtcatacgaatccgcagctccgtcatcgaccccgtcggtgttcgcggaacagcccgtggatatggtgcaggacggttcctctctggccgctctcgcccacatggctgcggtttctcaggaacttccggcggtggatgcgccgtccttcgctcccaagatgcccagccttgatacaccgaatgcgctgaaattgaatgaggtaccgggttcggtttcatccccggcaccctccgccccggcagcgcaacctgtgaatagcactgccgacgaggctgcgtccgctgccatgccggtctcctttgctcccaccagcaagccggatcgtaacacgaactccattccggttcgcgtatccgatagtcagcctgcagacagcacggtctcccgtccggctgtggaatcatctgaatacgttgccgcctcccacgacacggaagcagctcagccgtcacaggataaggacgattccaacgattcgttcccgctgctgttcccgcttggcggtaacttcgattcggatatccccgacctgtcgttccccacactgaacaatgacgatacgaagaaggaaaagtgagcatagcctccaactccaccgtcatcattctcggatccaccggatccatcggcacccaaggacttgacgtcatctcgcgtcaccctgaacgatttaccgtcaccggtctggcggcgggcggagcacatatcgagctgctggcgcaacaggccgcacagttccatgtgcccgaagtcgcggtgtttgatgagaccaaggttccagcactgcaagcggctctcgcacaggccggcgcacaaggtgtccgcgtgaccggcggtccggattcggtcatcgccatggccggatccggtgcgaatgtcgtattgaacggcatcaccggctcgatcggcctcgaaccatcgatcgcggcgctcaaggccggttcccagctggcattggctaacaaggagtccgtagtcgcgggcggtcatctgctgttcagcgcgcaagtgcgcgagaaccagatcaacccggtcgattccgagcattccgccatctggcaatccctgcgctccggaacccacgccgaagtcgccaagcttgtggtcaccgcctccggcggcccattccgcggctggaaacgtgtcgacatggagaacatcactcccgagcaggcgctgcatcatccgacgtggaacatggggccggttgtcaccatcaactcctccacactgatgaacaagggcctcgaagtcatcgaggcgtcccgcttgttcaatgtgtcgcctgaacgcatcgacgtgaccgtgcacccgcagtccatcgtccattccatggtcgaatttgtggacggcgccacaatttgccaggcttcgccgccagacatgcgtctgcctatcgcgctgggcctgtccgcgccggaccgcatgaccaatgtggccgccgcgtgcgactggacgcaagccgcaacttggacctttgagccgttggacgatgaggcgttccccgccgtgcaactggcccgccactgcctggccgcctccgagaagcatacggcggtgctcaatgcagccaatgaacaggccgtgcatgcgtttcttgatcatcggctgccgtacctcggcatcgtggacacggtcaaagccgtgctggaccagatggacgccgagcttcgtggtaacccgctgttcacggacgtggaggaaatgaaccagcttgagcttgaagcccgccgacgcgccgacaacctgataaacaagcaatgatgaataccttgaatacggaaaatcccatcgaaaagccgttccgcaaaaccggtgatccggtcgacctgaccagcgaatcgcccttgcacccgcgccgcaagtcccgccgcatcatggtgggcccggtgccggtgggagggggagcgcccatctccgtgcagtcgatgaccaacacgctcacggccaacgtacctgccacgttgcagcagatcgccgaactgaccgccgccggctgcgacatcgtgcgcgtggccgtgccgagtcaggacgatgccgacgcactgccggaaatctgccgcaaatcgccgattccggtcatcgccgatatccacttccagtccaaatacgtgttccaagccatcgacgccggctgcgcggccgtgcgtgtgaaccccggcaacatccgtaagttcgacgaagtcggcccggacatctgcaaggccgccaccgacgcgggcatctcgctgcgtatcggcgtgaacgccggctcgctggacaaggaactctacgccaaatacggtggcccgactccggaagcgctggtggcctccgccttgaaggaagcgcacatgttcgaggacgtcggcttccacgatttcaagatctccgtcaaacaccatgacgtcatcaccatggtcgaaacgtaccgactgctcgcatccaagggcgattggccgttgcacctcggcgttaccgaggccggccccgcctggcaaggcaccatcaaatcctgcctggcgttcggtgcgctcttggccgagggcattggcgacacgattcgcgtgtccctttccgcgccgccggtcgaagaggtcaaggtggggtgcaaactcctggaatacatgggattgcgcccccgcaagttcgacatcatctcctgcccgagctgcggccgcgcccaagtggatgtgatccagctcgcatccgccgtcaccgaaggcctgaaggacgtgaccgcgccgatccgtgtagccgtcatgggctgcatcgtcaacggtccgggcgaggcacgcgaagccgacctcggcgtggcctccggcaatggcaagggccagatcttcatcaagggcaaggtcatcaagaccgtgcccgaagaccagatcgtcgacacgctgctcaccatagcgaacgatatcgccgcccaaatggaggccgacggccaagtgcccgtcaattccaccggcccggtcgtggtcccaatccagcatcccggtcactgattcggccgaataggccctcggcgtaaatatcgcggtcagattacaatagcgcacgtgtcgcaagaagaagagcatcgcctgactgttcgatccaagccgtggaccagcacccaccggctgatggtcagcctgcccatcttcattatcctgatcggcgtgctggtctccatttccaacctgaccacggtgccttggaacatcgaacccaccggccagtcgatggccacgctcaccgacgataccgaagtcaccttcgataacccgtccggagaaacgctgccggcgaaaggcacgtatgaggtcaccgagcgatacatcacgctgaacatgaccagcgacggcaatctgaccaaggagcctggtgatcggggcaaggccaatgcggacggcgtccaagccatcaaggtattgattcgggaacctcagaacgcatcaggcaagcgccccggcgtggtgttcatgcacggtgccggatacggcacctgtgacaactcctttggcgacgtggcttccgatatggcttcggccggctttgtgaccgcagtgctcgacaaacccgtctggagcaccaccgacatcaaccgcgattatccggcctcagccaaggcatatgatcaggtcatcgaatacctacgagcccaaagcgatgtagacgccgccaaggtcggcatctatgccacctccgaatcgacatggatctcctcatatctgctcgaggacgatccggacgtcgccttccagattcttctgagcccgatggtgttcagcccacgccaatcactgggatttttcgtcacccaggacttcactcttgtcggcgcgaacgaaggctatcgatccatcgtccaacgcgtgttcagcgcggacaccggcctgttcggactgaacaattccgacctcgccacgctcaaacccgccgcttacgccgtacccacctatgtggcttacggttcaaaagacgtgatgacggcgcaggtcgacggcgtgcgtgcgattctctacaacgcccacaaagccgataactggaacgtgaccgtgcgcagctatccggtcgccaaccatgtgctgcgtttgggggatgagtccgaagcgggcaccccgtttgcggacgcctatgtggacgatctcatcgattgggccgtcggcacttccgccggactcacgcagaccagcgaaaaggtggccggcaccaatctgtaccaatcaatcggtctgccgggcgctttgaaggcaagacgcgtcggcaccatatatggtgtgatcctgcacgtcacggtggtactgctgctgctcgcatccatcgtgctggcactggtggcgctgggccgcaaaatcgcggcggatgcccgatggcggcgcgagaaacgcgaggccaaacgtgcgggcatgctgataccggaacggcctgtgatactcggtttcgcacatggtttcggcaacgcgctgctgactttgaccctcaccactcttgccacactgctcatcttctttgccggacttggacaggtgattatgggtgtggtcaaacttgcatggggcagcgctcctaccgagacgccgggcgtcatgtattggagctggccggtcatccaagtggtgtccgtgctggtgctatgggcttggtcccgcgtctttatgcatctgatagaggtcgcttccgcccgcggactgattcagataccccctcgtcgtgaatccgttcgagacatcgtcaccggtgccgacccggtactcgcctccacccgtctgggccgagtcctgttctggctggtggccttcaccatgctgtacatactgttggtgttcgccttctggggcctgtttatttactgactacttcattgagtagagtctgccgggcgtcgcggggaaaggagatgagatgtcgctgtaccgagacgaaggtgtggtgttgcgcacctccaaactgggcgaagccgatcgtatcatcaccatcctgacgcgtgggcatggcaagattcgggcggtcgccaaaggcgtgcgtcgcaccaaatcacgctttggtgccaggctcgagccgttcatgcgagtcgatgtgcttatcgctgaaggccgctcgcttgacgtggtctcccaggctgaagcggtcgccgcttacggtgctccgatcgcggcggattatgcggcgtatgaggccgccaacgtcatcgtcgagaccatcgataaactcgccagcaccgaacacgagcagctgacgaaccaatatcggctgctcatcggcgcgttgaacgcgctcgccaaacaatcccacgccccgcaagccataggcgactcctatgtgatgcgcgccttggccttggccggttggacgccacgattgggtacttgcgtggtatgcggcaaggcggagccggcgtacctgtccatcgcgtccggcggcgtgatgtgcgaagccgaccacactaccgatgcgcgccgtatcgcgccgttcgtgttaaaccagttcgatgcactgattcgtggcgattggtcggtgcttgatgccgcgcctgtggagcgggttgtgcaggagttggttgaagattggggggagtattacctcgaacgcccgattcgttcgctgcgcttgatagattcatgagtatggcttttgagaacgttgattacacgtcgttggacattcccgcagctccgttcagcgaccctgcccgtattcccgacttccccaagaacaaggtaccccgccatatcggtgtgattatggacggtaatggtcgttgggccaagcagcgcggcatggtccgcaccaatggtcatcaggccgccgaaccggtggtgttcgacactatcgccggtgccatcgaagccggtgtgcggtatttgagcctgtacacgttctccactgaaaactggaagcgttcgccccaggaagtgcgcttcctcatgggcttctcgcgtgaaatcatccaccgccgcgtggaacagatggacgagtggggtgtgcgcgtgcgttggtccggccgtcgccccaagctgtggaagtcggtgatcgacgagcttgaggccgccgaggagcgtaccaagaacaacaaggtcatcgatgtggtgttctgcatcaactatggtggccgtgctgaaatcgccgacgcctgcgccgccatcgctcgcgaagtgcgtgatggcaagatttccggcgaccgtgtgactgaaaagatgattgccgaccatctgtacaatccggacgttcccgattgcgacttggtgatccgtacttccggcgaacagcgcacctccaacttcctgccgtgggaggccgcctacgccgagctcgacttcgtgcccgaactcttcccggactgcggccgtgacgtgctatggcgctccatcgaccattacatccaccgcgatcgccgatttggcggcgtgaaataaagaacagtccggtggactgttcgttcacgccgcctggccgaggccgataggacatgaccaggtaatgatgagtccggcgaagccggtccttgattgctgggggtgtgaaatagtccttgttaagcccctcaaaattgagggggctgagccgtaaaacaaacagcccgatgggctgtttgtaggcgaaggcgagacgagagtcgagccagaagaatgcgagcggcagcttgtccgtaattgcggtcgagctgtccgtgtagcggactgaggggagttaccggcacacctcagccatcctctctgcaaactcatccaaaaaacgtcccgaatccgcaccaagtgccacatgcacatgcggcatggaatgattcaccagcccaaccgggtctccggtggtccgacctcgtactccattgaaatcaccggtattggtctccgcgcgcaacgcaagatcaaaacaatcgaccagtgaagaatcaagtgcaaccgccgccgccaacggatcatgcaacggcatgccgccagagaacagtgcggggtcggcttccaaatttgccttgatggaaaagtccgcgagatcagccaagaaccgcccgcgcttggtccccgtcgcacgccactggtcggccgccgatcgcggtagcaaacactggtgagtcacatcaagtcccaccattgtgatgtctgcgccggaatgaaatacacgattcgcggcctcagggtcttggatgatattcgtctcggccaccgcatcccaacaattgccgggttgggtaagcgtaccgcccatcatcaccagcctgagtttcggtgcaatatccggtgcccgagtaatagccgcatccacatccgtcaacggcccggtagccagcacggtaacgtctcggccaaactcacgaacctgctcaatcagatactcaatcccatccgcagcatcaacggagcgcctccttttgccccagctggcgagagctgtcgatgtagccgactggggacggtccacaggccgagagtgacccacacgagaacaagaccccgacgccggatgagcatgagcgtcccctaccaaatacccgccaacagaaacaaccccatcgggcacatcctcagacatgtcatccccagacatatcatccccagacatatcatcaccaggcacaccagctccatcagccagagccccggcccctgccagccaagtattccccagtccatccttcccatgaaactgggcacaccctgcatcgggaataaacgcatcagcccaagaaggatgctcggagcccaaaaacaccggaatatccgcccggccaaacaaatcaagcaccgcgcaagtattggcataagccgtgttcgcatccacattgccataactggcgatcacaccgctcagctcgcactcatccgccgaccccaacaaatacgccaacgccaacgcatcatcaacaccggtatccatgctggcaataatgcggtcaggacgttgggccatggaatcgcctccttgttagcatgattcgctatgaataactttatcggccgatacgcaaaaatgcgtcctttcctcatgggaaggacgcatttttgcgtagattcaaactcggaatatcggaaattacttgccgaggaattcgtcggtgccaaggtccttggcctgcggggcctcatgaatcaccttgtcatgactgtcagtgtaggcgtcttcttcagccaggaagtcgaagtattcctgagtgcccttgaagtcgttggtgccgagcacgaaagagccgtccttgatcttggccggatcgccccagtactggccgtcgacgataacctgcatgctcttcttgacgaattcgggcttgaggttggcgtcaggggcttcgtccacgagaatctgcgcggcgtcatccgggttggcgtacgcgtactcgtaacccttctgagtggcctgagtgaacttcttgaccaggtcgggattgttcttgatggtcttgtcattggtgatgatgccgatggcgtcggcgttgccgggcacgccgtagtcaggctcggtgaagcagttgagcttcgggccgtacatgtcggcctgcacgccttcccacgtggcgtagaagccgccgaaatcggccttgccggattccatggtctggaaggtggaggtgccgacggtcaccttgtcgaactcgcccttgccgccgtcggtctggatcatgcggcgcaccacggcgtcggactcgttggagccgaaggtggcgaaggtcttgccatccaaatccttaggggacttgatggcggtgttggacgccagtgcgcaccaaatggcgctcggcttctgctgcacctgcagcacctgcttgatgtgagcgcccttcagcgtgtagatgcccacattggtcaagttggacagggcgaagtcggccacaccgttgttcacggcctgttcggcaccggcctgggccacggccacgatatccacgtcaagaccggcatccttgaagtagcccttgttcttggccacgtacacgccgatgtggttggtatcgggcgcccaggaaagcatgaaagtgaccttcttgaggtcggaggtgttggagttggaggagtcggcggtgttggtctgaccacatgcggcgaaaccgaaagtcatagcaagggcgcccacgagggcagcggccttggatacaaggcttttcttcataatgatggttccctaattcgttgtctctctatcgttctctgggattgcttcgaacggaagtcggcagaaaacgatatggagggccttgatttccgttcgaccagcgccctcggcattccctatgaaagctcaagaaagccggtttgccacacgctggtaaagctgttccatta

SEQ ID NO: 3738 - DNA, 3816 bp, Unknown
  R150_10m  MAG No. k141_14687
atggtcgaacaacggcgccggacccagaatccggccggtacggttgtcgcgcaggaacccgtggttgttggcgtgacggtcctgattgacgatgagcgcgtcgaacactagcatcgtgcgcatcgcctcgaacgattcctcggacacggcgcgtgcggcggcgaggctctccgggaacgacgccagctgcgtcgccacatagaacggcacgaacgacacgtccttcgagttcatcgaaccgcacaccgacgcgagcttgcccttccaacgggcgatgcggtagtcgaccgcattcacaccgagcctgcgcgccagctgcgaggcgagatactcggaatacggttccaaaccggcgttcgcatacccttcggaacccgccttccacagttccagcccacgttccgtatgccgccacgccttcgggaactggccgtccgtcgtccactcgctcgacaggccgatcgcatgcttctcgctcgacgtataccccgtgtaggccacgatggcgagcgtctcgtccaacggattgtcatacaggttgatgtccgaaaacttgatgttctcaccgtcgcgttccgcccagaacgaatcgttgaccgacagtcccttgcacaggtcgatgatgcccagcgtatccgcaatgttcaaccccgcctgcgcgagaacctgcgtggcgaactcacgattcttcggaatcgtgcgccgctccagccacgtcgtcagcttcgcattatccggctccggagccaacggaaacggcagcaacgcgcgcttcgactcatcgaaccagcggacatgcgcctcgatcttgcccgccagcaggccctcgccatacgacgcatcgaaccggagcagcggatcatcatagagccgcagcacgtaactcgtcatatccggcccctccaatcaagcccgctccaaagtcatatcgggcgattcacatatgaagaacaactgtctacagtatagacaagggccttggaacgcgggggcttcactctgaagtcaagtatttgatacaatttggtgcaaaaagatagtaaatagcaataaggagtggctatgagcatgcagattgccacgcgagttgatgacgagcaggctgcgttgtttaaggagacgacccgacagctgggtaccaccccggccgatgccctgcgtatgttcatcagcgcgttcaatgattaccgtgggttcccctatgaggtgcgtttgccacgaaatgacgtggagccgtttgcgtccgagcgggacgctactgagtatgccagtcgtctcgccttgaggatgtccgatgaaacgaggtgagatttggacgttgcaggccgatggctacgccagcaagccacggccggttgtcatcgtgcagagcgatgccgtcgatcggttcgattccgtcatcacttgtctgctgacctcatacgattcctccgacatcgacacgcgggtccgattggaaccaagtccggagaacggcctgaacaaagtgagttacgtgatgacggacaagatcgtcaccgtcgaccgcaaactgctgggataccaagtcggcgtggttgatgatgcagccatggcgaatatcggccgtcagctcatgcgggttctaggtttgctgtgacgtttgggatggctggcgggcgtgcgtctacttgtgacatcgtttatgcacccttgaggccgtatgatgatggcgtcgaattcaagctctccccaacgtctaagaaatggcttccttcatattacggtcatacgaccaacaccatatgaaggaagccattatgaatggtctaacggcaatcagcttctcatacgtgattgccagtcattcaccgaatcagccgcggttgtcgaacatctgcagcagcatcttgctgggttcgacggcatagacggtgtgcggcagacgggcgctcaggtagacgatgccgccggccgtaagctcgacttcacggccttcgccgccgacgcgcagcttgccttccagcacctggatgatcacgggcatggccgcggtgtgctcgctcagtgcctggtccttgtcgaagccgaacagcacggcgcgcaggccgtcctcgcgcagcaccgtacgggagacagtggcctcctcctgaatatcgatcaacgaggccaagtcttcgatgaatccaagatgcggctcggtcgaaatggcgtggccttcggcgtcgtgggcgtcgtgcttgcaggcgcagtgcttggcctcacccgcttcagcggccgcggcttcgccatgcttgcagtggcactccttcttcgcgcccggctccgcggccgcgccctcggcgtgctcgtgcttgcaggcgcagtggtgttcgccgttggcggcagccgcctcggctgccgcggcggcttccctacgctgcttgcacttgcaatgctgctcgtcgcgccctgccttgcatgcggtctgctgctcgttctcatcggccatgatgttctcctattcgtcgcgcgtacctcacatacgcgtcatcgcttttacttgtttcccattatccggccatcgttgggccggcacaccgctgttacgcttcgggcttgcgtacctcatccttgacggattcgtccaggttgtccggctacaggccgagttcgtgaatcgagtaggtgccgccggcgcgcagcagtcggaaggcctcgccgataatcgcctgcttgccacgctcggtctgcatggtaagcatggcttcgccgatcaccacgtcggcgctgttggattccagaccggtgtcggcggcgtcgcgctgcacgcagcttgccggaatcgtggccttctcactggtgagtttggagatgatgtccacgacctgcggatcgcggtccacgccacggtagctcttggggtcgcggtcggactgcggcaggggcagctcgcggttggcggcgggtttggtggcggtggactgaaatgcctgagaaggctgcgatgtagtggtcatgtgtcgtgatgctatagtccacagcccgcccgcacaagggttttcgctagaaatcagccgaatgtgagaatgctcacccgagtaggcgcctgagcatgcggctcagggacgattcaggggatgctcaggggtcccgtcaccgattccccacatatcgcccgcgttcgcctaatagaatggaatccagcattcgattcggtatccggcgcaatgccggcaaacgtgaggaacttacgatgagggtcatcggcaatattctgtggatcattctgggcggactggcaatcgccatcagctgggcactgatcggactgtttctatgcatcaccattatcggtattccactaggagttcaggcgttcaaaatggcgggccttaccttgacgccgttcggcaaaaccgtgcaatacggtggcggcgttggctccacgctggtcaatatcctctgggtggtgctggtcggctggtggatggcactcggctatctgggtgcaggcgtgctcaactgcatcactatcatcggcatcccgttcggcctccagtcgttcaaaatggccaagctcgcgctctggccgttcggcgcacagatctacagtctgtaacaattgtttctgcagtaagtccggtgcaacgcattatcatcgtgcgttgcaccggacttttttatatacaacgggcatttcacacaccgcgtgatttgacggattcggacgaaagaccttatggtgcgcgaatcatgatcaacacatcgcattcagcagcaacggcgtgaacgaacacgccatctgatcagtacacctctcattgacgcatagctgaatcattgccggtgatatcgagccgactcgttcacaccatg

SEQ ID NO: 3739 - DNA, 21529 bp, Unknown
  R150_10m  MAG No. k141_14845
gctgccaccatctctttcatcatctcgctgattttcaactatctggcgagcatgaaattcgtattcaagcatcgtgatgacatggcgcgctggatggagattcttatcttcgtggtgggcgctgtagtcggtctgttcatgaatgacgcgattatctggatttccacctatggtatgaaccatgatgcctatgtatcgcagcatgccgaatatctgttgcgcaccaatatcggcaagttggtggccactgccgtggtaatgatctggaacttcttgattcgcaagtggctgctcgacgatacgcacaccaatgcgatgaaccgtctgaagtccgctgaaaatcgactgaatgccgaggagcttgaagccaagtggcagaacagcttctcccataagctcggcatctggtccttggagcacacgcccaaaggctggccgaagtagcgttttgacgtatgctaagccccctcgtcagagggggcttagcatacgtctcacacactcacttcagtcagggtcggctgctcggtggagcccttgatctgcttgaagccgatcagtgcaatcaccagcgaggccagtgccaaggtggtcaccaccatgaagcctccgtgcgagcccatgcggtcgatgaactggccggcaatcgccgaaccggcggaggagccgatagaattcatcgcacccatccacgccatgccctcggtcaagcgagagggcggcaccagatgcaacatgagctggttgccgttgatccacgtcggggcctggcatacgccaataatcaagtagatgatcatgatcacccacagatgcttggcgaacaggaacgtactgatgccgatgttcaccacggccaggcagaagtagaagcgcttccacagggcaatcgaccagttcttcgcgccatacaccaatgcgcccatcagcgagctgaaggagaagcaggcaaacacaaagcccgtgtactgcttcatattcgcttcggtggcaaacgcgatgatggagatgcccgtagccgactggaacgcgcccaaaccgaaccaggtgacgcacaccgcaatcagacccggaccccaaatggacgccttcttgcccgaacgcgcatcggcgaccgcctgcttaatggctgcgttaatcgtggcctcatcggtcacgccttcacgctcaagacggcggcgggtctcctcggcggcggtttccaccttcagcgcctcagccttggcggcctcgcgctcacggtattccttgcgggagatgccctcggcacgcgccagcgcggtctgcgacggtggctcagtggtcagctcggtcaggaacatcagcgcaccgaccaccacgcacatgccggtgaacgagaacgccagcaaaccggagatcacggccagcgtggaggccagcggattaccgatcacccacatgcattcgtcgagcacgccgcacagcgacagcgcgcggttcgtgcgctcccggtcacccttaagaatcttggtccagcgcgcgcggctcatcgcgccccacggcggaatggcggccaggaacggcgtcagacagtacagcacccattccggcgcgcggttggtaatcgccgtcaccagcgcgatggcggccacaatccaaacgataatcgtcggaatcgagacctgcctctggccgaacttgtcggtcagcttgcccagcagcggcgtggccacggccagcgcaatcgcctgaatggcggtgagcatgccggccagcgaatagttgccgtaataatgctgtacggaaatggtgatggtcatgccgaccatcgggaatggcatgcaggcgatgaccgagccgatggaataacgggcggtatgcggaatgcgcagtagttccgcatacccaccaaagactttgtggcctacttccttgatgccggtcagaatggtgctcgaattcgagttggacgagttattggacataacagcactacgctcctttccgctcccgattggatgtcccccgctggcgtggcgttgccggcgaagccctcatcgaatgatgtgttgtccatggtcgcgcaaagtttgcgtcggattttcccatccgcatatttgcgtcacggatactctacgggtgtccactccgcgacacgcggtagattggagatattaagacaacgttctcatgcccttcagggcgggaagcagaaaggcggctcatgagcgctaccaccatccatttcgtccggcatggcaaggtatataaccccgaccatctgctctatgagcgactgcccgacttccatctttccgaccttggccgtcgcatggctcaagccaccgccacgtacttggccaagaatccccaaaccaatacgattgcagccgtctactcctcgccgctcgaccgtacgcgcgagaccgccggcgcgattctcgatgcgctgaaccccgtgcgcgaggctcgtggcgaggcttcgctcacgctcaccactgatgaacgggtgattgaggccggcaacgagttccgtggcaagcgcatcggccatggcgagggcgcgctgtggaagaacggcaactggaagctcgtcaccaacctgtacaagccgagctggggtgagtcctatcagcacatcgcggcgcgtatggacgacttcgcccgcgagaaggtggcccagcaccccggcgagcagattgtggtggtcagccacgaatcgccgattttcagttatcgccattatctggagaccggccaccccgagcactggatgttcctgcggcacacggcgctcgcctccgtgacctcggtgacgtacgacaacgaaaccggccgtgtgatgtcaatcacgtatgtcgacccagcagccaacgtcaagtaacggcacactggtgttaggacattggctcccctcggagaggggagccaagacgcactgcaatcgagtggtggacgcaaaggagcatagatgaccattgaactcaatcgtgaggcaatcgcacaggtcgcggcattgccggcggtaactgaggccgccgaagccggctcggcgctgatcggcctgtggccgctgaccgaagccatgcagatggacaatgacgcaaagtacgcggagaacctgcaggtgcgcgtcacccgtgcattcgcccgcatcctgaccggcgaggacgtcaccgtgccggacgccgagttcgtctacgaaggtgccgatgagattcccggtcgcccgcagagcatcgtggacgccctgctcgccgccaatgacgcctacgacacgatggccgactacgccgagtccggtgatgccaggctgatcgttgaggcggccgacgtgttgggaatcgactgggattccgcgacggcggaatcggtgagggaggcggtcgcggccatggaagcccaggtcgaggccgacgctgaagccgatggtcgtctggccacgtctgccaagcccgccgatgtggctgttcggttcgccaccgcgctcgccgtgtgcgatgcgttattgggtgaggtgtccggtgatgctgtggccgatggttcagcggacagtgtcgccaatgctgccgccaagattctgccgattctgctctacgtcaacgaactgcgcgagcagtgctcggtgccgcgcatctgcctgaccgacgagcagatcctcgggttgcttaatgcccgtgccaaagccgccgacgcagacaccctgaccgccaccgccgaatacatcgctcctctggccgttgccgaatggaacaagcaccgtgaggatgtgctctggaacccggacgaggctaagcgtcaggccaaggaagaagacgaaaagcgcaataaggaggctctggccgccaagttcgcgcatgtcaaggatgatcccggcaaagagaccgtggagttgtaaagagtaagggcgttgctctggccgatgcttcgctcgtaacggttagaggcctggtgcctctccctccgtcatcgctttgcgatgccacctccctcgtcagagggaggtggggttactgcttatcgattaccgagccgcgatcggtcagcgtcgggtccacgtagatgtggcgggttgtagaatccgggttttggatgcggttgatcagcaggttgatggccgcctcggccagatccttatcggacgagcacagtacggtcagcgggcgggagctgggcgtggcaaagccgttgacggagatcatcgagatatcgtccggtacgcgcttgccgcggcgctccagggtctgcgcgatggcgatcgccagataatcggagtgcaccagcatggccgtcacgcccgaatccagaatggtgtccacgatttggttgacgtccctggtgttgtacggctgaatgccggtgatggtgaacgggcattcgatggcgtcgctttccgtcacgatttgcttccagccatcctgaatcagctccgaagtcggtgtatcggtgaacgccgcgcccacacgggtgtgaccgtgttgcaggaagcgcaccgccgccttacgcacgccatagggatggttggtgcgcactgaatcgacgtagcgggaacccagcagcggcagatcacgttcgatgatcactgtcggcgtcttcgtctgctcaatccaattccacgtgtatttgccgcattccggatgggcattgggggccacgacgagtgatctcaccgattactcaatacacaaacttgaggggagggctcccggaccggtgaaggaggcactgatgaacaccgaacgattcgaccttgaggatgagtctcaggactggtcggcgctcttcgccggtttgacggcctgaggcacttccctacgcctgagtgtttgcgcaaagggcgattcctatacggggatcgccctttttctgcaattggctaattttggcatattttgccccgccggcgacggcgtattgtgtggcgaaaagagtttcgtagttcgtagtaaaacggaacatcctcatggatattctggttggtggattcggcaaactgcatcatgtggcttgccccggcatcgaacaattggtattggatgccggcggcgataacagtggcgacgccaaggtgctacgccgcgaacggctgctgtcggacgcgccgtcgcccactgggtgcagccagtgccggacggccgcgtgctgaccagcgatttgggtgcggatcgcgtttatgtgcaccattgggagcacggcgaactggtgcgcgagggggaagtcgtgcttgagccgggcactggcccgcgtgaccagcatctattgccagtcgcatccgatgatcttgcgcacgattggcgcgtggcggtcgtcggcgaatggggtggcacggcctttgtgcatcctgcggccatactttgcgattcttttttgttaaggaagtatcctatttagtgaaaagtatcgttcgcacaatgggaatgggaaacttatgggcaatggtgtcgatttgcgtatgctcgccaacaatggcggcagcgtggtaatcagcgattacggagcgcatctgttgcgctgggccccggccgggcaggcggatgtggtgtggacgccgagtacgtggcatatcgaagccggtaagtcgctcggcgggggagtgccgatctgcttcccgtggttcggcccgggttttgcgcatggcaagcagctggcactcaatccatcccacggttttgcacgtctgcgtcggtgggcgttggacgagggttcattcgacgacagccacatacggtatgtgttggattcgcagcagctgaacgacaatgaagtgccttggttcgatgacgagccgggtgctcagtttcatgccgtgtatgacgtgcaaacgggcaatgcgctgaccatgagcctgaccgtgaccaacaccggcacggcgcctatgtcgtacgaggccgcgttgcattcctatctgcatgtcggcgatgtgtcaggtgctcagctggtcggattgcagggagcgacgtatctggatgccaccgaagaagggtttccgccgaaaacacaggacgcgcaagtggtgacgtttggcgagcagccggtgaatcgtgtgtattactcggatgcgcgtctggaactgcgcgatgacatgttggggcgtgcgattcatatcagccgtaccgggtcgccgcaaaccgtggtgtggaatccgggagcggacggcgacaatatgagctacaccaagccgggcgaatggcgcggtttcgtggcggttgaagcggcggtatgccgcgaccgcatcgtgacgctgggcccgggagaatcccatgtgatctcccaaacgctctccgtaggcagcttgtaggagtagctcggcgcagcgtccatcctccaccgtaacgcattccggggaatgttgcgcgaagagaggggccgcaataacgcacaatgccctgtgtgctggaatgatccagtacacagggcattggcttactgaacggcggggaatactaccgccgcttgatgagtggggcctcattgttgggcttcatgagtgatgaggcgaacttcttaagcgaacttcgccggcgtcagtcactggccttgccagggtttctgtgcgttgtcatcggtgggagccgtgtgcggagacagcacggtggacccatcatcaacgttttcgggaatcggcggaacctggccgtactgtggggcctgagcgtcgggctggccgtactgcagggccggggtctccggctggccgtactgcggaaccggtacctgaccgtaatcgggcgtaggcacagcgggctggccgtagtcaggagccggtgcggtcggctgaccataggccggggctggctggttgaagtcaggagcgggtgcgttcggagcggtgcccggagcggcctggttgaagtccggggttgcgggagcgccgtacggtgcgccgtaagcgccctgaggcatcggggcagctactgcgtcatcgtcgaaacgtgcgccttccggcttgctgggcatagccatgaacacgatgtagacgattgaaccagcgagcgtaatcagtccgccaatggccatggcaccgaggccgccggttgccatggctccatagctggagttgctaaggctgccgaaggcgccatacagtgctgcgccaccgccggcaaccatgatgatcatgccgagggccatcgcgccatagaagatggcgacccaccagccgggcttgtccgtgtcatgcagacggcgaacggcgagcgccagactgggaatcaggatggccagactccaaatgctggaaaggaacccgagcttgtcgtccgtggcactgctgaggaggctcagcaggacactgatgccgacagaggccaacgtccaccaccagaactcgctgcgggaggcacgtcccttgaagaccacatacttcttccagaaacggaggaatgcctcagggaaggggcagtcgtaatacggcttgttcaacggcacggctgctgtggcagtgggagcggcgtactggttgtatgcgggtggcacctgaccgtaagcgttggcgtccggtccgggctggccgtaggtaggagccgcgccgggagcggggaattgcggagccgcattcgccgcgtacgggtcggcggcgggctgaccataggcgggagttgcaccgggcgctgcgccgggtgcggaagaatcgggagcgggctgcccgtatgcgggctggccgtaggccggctgtgcgggggccggagcgttgaattgcccataatctggctgtgcgggggctggagcaggtgcgccgtattgcggcgtgctaggattctgctgggccggggtaccgttgggcgcgggcatctgcggcaacggcacgttgttgggatcggtcattgattcccctttcataagacgattgcgtcgactcctattcttccatcgtttgggtaaaaaactcaacaattgcgccaaatggtgtcgaagccttgcgtgcgggcgtgtggatggcgccaaagtaggtgtcaaaacaggtgtgaagacaggcatcaagatatcgggcactaccaaagacaggcaaaagagatttcgttggaaaatggccgttttgggatggtgttggcccgaaatgtcaataacgaagcaaaagagcgaggagcgctgctctccgcgtccggcgcgcgcggcacaataggggattatgactgatgctgaaaacaccaaacccgaactgcccaagaacgttcgtgttcgcttctgcccgtcgccgaccggaaccccgcatgtcggcatgattcgtaccgctctgttcaactgggcggaagctcgcgccaccggcggcacgctgatcttccgtatcgaagacaccgacgccgtgcgcgactccgaagaaagctacaaccagattctcgaatccctgcgttggctgggtatcgactgggacgagggcatcgatgtgggtggccctcacggcccgtaccgccagtccgagcgtaccgccatctacaaggatgttgccgccaagctgctcgaagccggctacgcctacgagtccttctccactcccgaggaaatcaaggagcgcaaccttgccgccggccgtccggccgagttcggctacgatggctacgaccgcaacctgaccgatgagcagaaggccgccttccgcgccgagggccgcaagcctgcgctacgtatcaagatgcctgatgaagacatcgccttcgacgatctgattcgcggcaccatcgagttcaaggccggctccgtgccggactatgtgatcgtgcgtccgaacggcgaccccctgtacacgctgaccaatccggtcgatgacgcgatgatggaagtcaatgtcgtgctgcgtggcgaggacctcctgagctccaccccgcgccagatcgtgctctaccgttaccttatggaactcggcatcgccaaggagatgccgctgttcggccacatgccgtacgtgatgggccagggcaacaagaagctctccaagcgcgacccggagtccaacctgttcaaccaccgcgacaacggcttcatccgcgagggcctgctcaactacctggccctgctcggctggtccattgcaccggaccgcgacgtgttctccatggacgagatgatcgagaagttcgacgtgcgcgacgtcaaggccaacccggcccgcttcgacatcgacaaggccatctccatcaacgccgagcacatccgtatgctcgagcccgaggacttcctgcgccgctcggtgccgtacctgcaccgcgatggtgtggtttccgccgacaactgggatgccctgaccgaccgtgagcgtgaggtgctgaccgccgccgctccgctggtccagccgcgtgtgcgcctgcttggcgaggtcgccggcatggtcggcgcgctgctgtccaccgaggagtatctggagcccgcggacgacgcccgcaagcagctcaaggattccgccggcgaggtgctggacgccgccatcgccgccctcgagggcgtggatgaggtcgattggaagaccgacaacctgcatgagaccctgaacaaggctctggttgaggagggcggctacaagccgcgcctcgctttcggcccggtccgtgtggccatgtccggccgccgcgtctccccgccgctgttcgagtccatggagatcgttggcaagccgatcaccgtcgcccgtctcaagggcctgcgggcgcatctgtgatgcgtcgtccaccgcacgccggcggatgatgggagcgtgacgcatggcgggcatccgtacatacggatgcccgctttcgcgttgcatggggtgttcccgcagaacggcggaaaatggcgcgacacgccgggatttgcgtgagagcagggtagcgcgtaatatatctacctgttgcgcggttcgccacgcagccggttgaaaaactgaatatgcccccatcgtctagcggtctaggactacgccctctcacggcgccaacaccggttcaaatccggttgggggtacgacgaacaactcttcggagttgctacgccaagccaaattggggtgtggtgtaattggcaacacagctgattctggttcagccattcttggttcgagtccaggcaccccagccaataaccctcgcggattagcgagggtttttgtttttacacgtcctgctcatgagatacggccgagagggtaatcctgaatagacaactctggggcaaagactgggctatagtcccaatccgtgactcaaaaacggcagaaatcccgcgtccgaacgtaaggggcgcgggatttctgccgtttcgggccgtgcaggaccggccgacatcgcgcgttgccgcgacttgagcgctgtccgatcctgaaaacgtgagggagaccgccctcgtcttacttcttgaccgcgttgacggcgtcaacagccttctgcagcgacgtggtgtgctcgtggtaccacgtgacctgctgttcgagtttcttggtcgcggcctggtagcccttggtgtcgtcggccacgcagccttcgtacgtcggcagttccacggtcagttccttggacagcgcgtcgagagcggaggcgtccgagacgtctgccttggtcagagcggcggcttctgcagcatcgccattgaccaagttgttgtagtcgttggtggcgttacgtacgtcttccgaggcggcggcgcaggcggccactgcgctatcgtactgagacgcgctgtatgcgcgggcgccgaacaccgcgaccgcggcgataatcgccaccgccacgatggcaatcactatagcgacccacttcgtcactcgcttgttgtgcggctgtgccgtcgcttctgcttggttctgggattcgggctggttgccgttcgcctgctgtgcgtcagtcatatttacctctccttctcactgcccctgtttgtatcttgcggagggcctgtttcaaacaacgggtatccaacatatcgaggagagccgagattgccgggcgtttcctactggttgcgctgtggcgtggccgtttttgtctcatatggcgaaagtatgcgccagaggctattgccggccggtgacccacggcgcatccgaatggacgtgcggaatcatcatcgcgatgaccgccagcagacacccgagcatcaccatcaagatgatgttctcgtgtccgtgcgcctgcagaagtgcgccggtcagcgcgccagacgccagcgccagcattacgaccgcacgccgcccgagcttcgactgctggtggccgtgtgccgaagcgtctgcgacgacgccggtcagcgtcatcgtgagcacggtggtgggcaggtccggcaccgacagcttgcgggcggtggagttctggatgcccattgccggggcgagcagcacgatcagcaggatgatgtgcaggtcgatgtgccgtgcggtggggaagttcaggctcggctgtgaggcctgggtggtctgtgcaagccgtgcaatcgaggagacgccggacgcatcgtctgcggggccggtgatgagctggttcaaaagatagacgccgattagcgcggcgagtacgaacgacgcctgcacgcaggtagaaaccaacagatgcttgacccggttctcctcgaatcgccggatgatgcgcccgccgataagcgcgccgaccatgaaggagacgagcgtcagcgccgacgtccaccagacgaagccttgggcatgggcgatcgaaaacccaagaaacacgatgttgccggtcacgttggccacgaacacatgccccagcgacaggtagctcagcgcgtccaccagcccggcgacgaacgtcagcaccaccaaggcgggggagagcagaccgtatctgtcttccttgcggggaaccaacgtgcgtcctgcttcggcaagatgtgatgtcatggttgcgacaaggctccttttcgggattgaaattatggcgagaacatgcgtcggtcgacgccgccactctactccctactcccgtacggttcctccggtttccgctcgtgcgcagatcgtcgggacggagaagacgccggtgatgcagatcgatgtgccgaaatcccgcagcgtggtctcgaccaagtcgggcaaggtgttgcgacgccgtatgaaggtggatggtacgccggagagcgtgccgatgtacccgtacgagatcgccacgcgcctgtccgatttgggacgtttggacttttccgcgcagccggtgccggatgcgacccgtgatgatttcgatccccttgaacgcgaccgtctgcgccggattatcggcacctaccaatccagtgaccgtaatttgttggaactgactgatgaggagctggagaaatccctgcaattgacggtgaccgtcgatggcaagaccatgccgacgctgaccggtttgctgctgctgggcaagggggagtctctgaaacgcttcgttccgactcatcgggcgtctttccaagtcatgtctggtacggatatcaaagtcaaccaagactatgccggaccgttgctgaagaccatcgagcaaatcaacgacatgttctctccttggaatccaagcgtcgagctatccatcggtctgttctcaatgatggtgccggaattcgaccatcgggcgttccgagaggcgctggtgaacgccttcggccatcgtgactacaccctgctgggacgtgtgcgcgtgcagttggatgatgcggggcttaccatcgccaatcccggcgggttcgtggagggcatcaacatccataatctgcttaccgccgaaccgcatggccgcaatccatgcctgatggatgcgttgaagcgaaccggtctcgccgaacgtacggggcgcggcatcgaccgtatattcgagggtgctttgaactatggtcgtcctctgcctgattattcgaggtccaacaggcgtggagtgtcggtgctgttgcctcgtagtgtgcccgacaaggcgtttgtggaactgctggccgaggaacgtgagcgcagcggcaagtccatgtctctcgatggtctgcttattttggacaagctcaagagtgaacgtcgttgtggctttgatgtgttgtcgggctccctggacatgagtgaccagcgtctgcgcaccgtattggggcagctgacggaggcggggcttgttgaaagcgctggcgttggagctcgccgcacgtatatgttgggtgcgaaagtgtatcggtgcagcggtagggcgatggattacgttcgccaatcagacatcgatagggtgcggtatcccgaactgatcatcaagttaatgcatgaacagaaatcagtgagcaaaaacgatgtgatggaattgctgcatcttgaggggaatcaggcgtactaccagttgcgaaaactagtccttgaaggacgcgctaagaaggtcggcagtggacgcaacgtgtggtatgcggcagtacgttgaatgagatacgcagatcattcttgaacggttttctctgaatcccgagatttatctctgaattcagagaaagaatctcggaattcagagaaaaccagtgtgcgatgtggctattccgcttcaggaattatgtacgacttgaacgcggcctgcacctgcgatgccgtcagccgctttatcggtacgcttcctatgtggggcttgatgtggttcccgtagctgttcccatagcgcgtccttgtgctgtcggcgatgttccagatagttcacgtcatgctcctttgcgtgatgattcacatgattcgcgtcttcatggtagcgtctcccgccggcgcatgagtgactggtcacgctgtcagtggaatctccccgacggatatcccgcctatgcgggatatccacgccggcgtacggagattcgcatgttcgggcgtacgatggacccggttttttgcaggatgcggccaacgccttggatgggcatgggcctgcaaccatcgtgagccgccacgggcgttcggcgatcgccgggcggtggatcgagaaggatcgggcgatcgggaccgcccaccatccgaaaccatcgtcggcgtcgcttcagcggggcgtgccgacggttcgcgttttccggcaaagggtcggccggcgctttcctcattgaagttcgacgggtcatggtcccgccgtgagggttggaccggtaatcgggtgatgccgaacgtcccgacgggacggcggccgtgtcatcaaagctgtttttagtcaagtcggtgtttcgtgtttcgtcactaatttttttcggttttcggcatgaggagtgccggccggtggtttgttttactggttgtccgtcttgccgaacatgagggcttggctgacgcgtcggctggggccggtgaattcgatgaggcgtccgtggtggacgatgcggtcgatgatcgcggcggcgagtttgtcgtcggcgaagatcgtcccccatttgctgaactcgatgttcgtggtgaagatgatgctgcgacgttcgtagctgccggcgatgatctggtagaggagacgggccccgtcgatgtcgaagggcacgtagccgaactcgtcgaggatgatcaggtcggcacgggcgaggtccctgagcaggctgtcgagggcgccgtcgcgtttggccttgccgagctggagcacgagctccgcggtctgccggaacctcacgctcctgccttgctcgatggcgagcatgcccagggcggtggccaggtgggtctttccgcgtcccgtcttgccgtagaacacgaggtcctgcgccttggccgcgaaatcgaggccggtcagctgctccttggtgtatccgtcgggcaggcgcacgttcgcgaagtcgtagccgtcgaggcttttgggcaccgggaaccgggcctggcgcatgagccttgcccgtttggaggtctccctgttggccagttccgtggcgagcatgcggtcgatggcgtccagttggcggggcgtggcccattcgagcgtttcgtcgatggtggcctgcgagatgaacaggctcctcgcccgctcgcgcagcgggccggggtcggtccgtccgttcttctggttcactcgtcctccttggtgtaggcgatgtcgtattcgctcaggtccacggggtcgtcgtaggccacgggtcccaggcccgaggcgtggcgtgccgcggccagacataccccggcccggtccgtgcctccggtggattcgaggatctcgagcatgccggccacggccgcccgccagccgctctcgccgtcggcgtgcagcagggcacgcaggctgtcgcgccgcgtggcctcgtcctgcgcgtcgatccattcgcgaagcgggtcgggcatcgcgtcgcgcacccggctgttgcgccaggccgccggccggtcgcacaacagcccgagctggctcgacgggtcgccgctgtcggtcggcttgtccccgtaggacctcggatgcgtgatcacgcgtttgccttcggcatcgaggatctccacctccagggccctcaggccgacgatcatctcatggccggcgtgttcgggtccggccgcgtaccggtggcggccctggacggtgatgttgccgtatttgtcggccttcatcctcgtccacgtgaccacgtcgaacggcttggcgggcaggggcagcagcgcctttcggtcctcgtcgaacaggccggtctggctctcgcccttcctgtagtggtccttgtcccccagttcgaggcagcggccgggcaggcgcaggttgaagctgtcgaggttccatacgccgggcaccggcacgaacagcctgcggcgcacggccccgacccgggcctcgacgccgcccttctcgtgtcccgagtacgggttgcagaacgtgtactcgaacccgtagtgcgcctggaacgcctggaacaggcgggtcaggcggatcccgtcgaaccatttgcgtccgacgccggcggcgttgtcatacacgatgcgttcgggcaccccgcccagccattcgaataggttcctgagggcctggcacgtgcactccgcgttctccccgggcatcagctggctcggcccgatgttcgagtacgggaaatccaacacgaaatgccgcattcgcgtcacgacgccccggtagcgcacgtcgacctggccgaagtccgcctggcattcgcccggatgccacgacaggtccaggaaaccggcctcccgctccgccgcggcctcgcgcctgagccgcgccacggtccgggtcaccgtcgacaacgacaccccggccccgtactcgtcgcgcaaccgctcatggatgcgggtcgcggtatgccgctgcttgcgccaggtctcccggtcctcggcgagcatgccctcgatcatgggcagccactcgtcgatcaccgaaccacgacgtcgcctcacgggcggcctggccgataggtcgtcgaccctcagatacttgcgcacggtcggctcgctgaccctctcgctgcgcgctatcgaggcgatggactcaccgttcctgcgacgcgaacggatagactgtatttggggcatgctgatcattgcctttccggacctttcccgaatggaactagaagcaccatcaggctaaggcccacgggtggtcggcatgcctttccgcctaaacccgaaaaaccttcgtgactaaaacctcaacttcctattgaacaaaaacaatcaaagcgaccgcacgaactctccgcccggaagcggacggcgctgattttggaggacccatcggccgtggcattcccgggcccggaacatgccatggggtttgcggaccccgggcgacgccgcatggccttcccgttcccgcgccacgggcggcggcgtggttcatggcgccgacggtgggtccgtccgcacgcggagcgcttccatgcctcgttgacggatggtggcgatccccccacagagaggagtattgtttcatttgtagataacattgttacacagtaggagagcattgatatgcaatctgaacgttcgttgattcccacccccatgccggtccggagacacgcacggtccgggaacagggggctggccctcaccgccctgtgtctggcggtgctgctggtcgtgatggacaacaccatcgtcaacgtcgcgattcccacgatgagcgacgcgttgaacgcctcgtccacggacctgcaatgggtggtggacgcctacacgctgtccttcgcggcgctgctcctgcccgccggcaaactcagcgaccgatggggaagaagacggatgctgctcgtcggattggcgggattcgccgtggtctccgcagccacggccttctcctgggccctgtggcagctggtgacgctgcgcgtggtgttgggggtctgcgccgcgctgatctatccggcgacgctgtcgtcaatcatcgtcatcttcgaaggctccaggtaccgtagcctggccgttggcctgtgggcggcgacatcaggggtcggcatcgccctgggcccgatcatcggcggcgtcctgctggagcactatgcgtggaattccattttctgggtgtgctccgtcatcggcgtggtggcgctggcctgcatcgcggtggcggtgcccgaggtacgggcgtaccgttccgagaggttcgatttccccggcaccgtgttatcggtggccggcgtgggcctgctggtgtgggcgatcatcgaacgcccgacttacggctggctctcctggccggtcgtaggcggcatctgcgcggccctgatcatacttgcggtgttcgcggcggtcgaggggcatacgcacgccccgctcatcgatgtcggcctgttccgaagggccacgttcacgagcagcacctgcgcgatctgcgtcgcgttcttctgcctgttcggcttcatcttcatcaccacccaatggttccaggcattgcgtggatacaccgcattgcagacggcggtcgcgacgctgcccttcgcggtggtcatggcggcggtcgccccgctcgccacgcaattggcgaaacgtttcggataccggtcggtcgtctcgacgggactgctgttcctgtcggcgagcatgttcgtggtcacgcgtgtcgacgcccattgcagctactggttcgtggtcgtacccaccatggccctgatggcggccggcatcgccctgatccaagggcccgccacggacgccctgatgagcaccgttccggaaagctcgaccggcgccgcatcggccgtcaacgacacgatccgtgagatcggcggcacgctgggcgtcgccgtcatggggtccgcgatctcctccgtctaccccgacgagctctcggactcgttgtccggactgcagatcccgtcttccatcgcgaaagccgcggaggattcggtgatggccgcgaaatcgatccttccgcacctgccggcaggcatccgacagaccgtggagcagtccgtctcgaccagtttcatgagcgccacgcatgcggcatgctggatcgcctgcgccctcgcattggcgttcgcgctgctctgctggatcacacttcccaaacacgattcaggcaatctcccccaatagaaaggaacatccaccatgaaagacgacggacggatcccacggatcaaggacacggatatgacggaccgtctcctgacggccggcgcgatagcggaggacacacgcaaccccatcggtgacatcgcggcatgctcccccggtcacggcagccagagcgtcggcatgttccacggccgcgccggccagcgttccccgacatgtcttggctcggtggcaatctcaatgcggtgggaccagccatcacacccatcgaggcgcggtccaagagcgtggctggaccttcgaccccacccatcatgggacggtgcagagacctacgggccggatggcgtttttcatccgtaacggcgggatgatgcggagaagcatatgaggactattcggaaaacgacaaaaagccagcggacgcccaccaccgagatcaggggcctcatactcgacgcctcgaaacgaatcatcgaagaggacggctatgacgccttcaccatccggcttctctcggaaaaggcggatgtgtcccccgcgagcatctaccggcatatcggcgacaagcaggccgtcatcaacgctctcatcgacgacagtttccagacgttacgggagaagctcctgcgcgtcaccaccgaggatcccctgcaaagactctacgatgcgggagtcgtataccgcgggcacgccaaggcgtcgcccggcatctacgccctgttgtggcgatggcatgcgggcgaggcttcggaggcatgcctcgccgccatgaccgagctggtgcgctacgggcaggccgcgggaaagatccggagggatgacccgcacctcatcgcatggtccatatggtccgccgtgcacggattcgtccaattcgagacacgacccgaacatgatacgcccgtcgacgatgacgatgcggcctattcctttctgctccggctgctcattcgaggggtccgcacccctcagacggtctccgagggaacggcgaccatcgcggataccagccgatcgtagaatcgccattggccgcgcaacgccacatcccgtctcacagcggtgaacgttccatccgccttcaggctcacggataccttacggaagtcccccgtcccgtccaacgcggacaatgccttcgaggcggcctccttcgcgcagaaggccgccctacgttccaccgaggaggccatacgcaatgatgcgagctcttcggaagagaacacgaaccgcatgatcccgtcggacaatccgtccgaatcgtccacgtccactcccacggcacgaattctttccgccgacgccacggcggcgacgcacagcgacggacaatgcgacagcgatcccacgatgccggatggccagagcggttcaccatccgaacctttgagtatgggcccgtcatggccgatacgtcgtaaggcctcgtgggccaaaagacgcgtctccgtgaattcccttcttcgtttggccgtggcgttcccgaccaaggcccgctcaccgtcgaacaatcgcacgcggcgcgtcccctcccccgagatcagcacctcgcagccggaggcgagcagcggcccgaacaggcgagcccgtcgcatcatgaggtctgcgcacatcatggagactctatctaccgaaacccacaaacccagcaacagcaaggctttctaccaattcccagaatgagtgtaccactctgttcgccgctcaaagcccgccagaaggaaatttgcgcttttccgtaccttcacgccgacaagaggtgtcacgattacctatatctcccatactttctatgttttcttaaaaacaatctatacatctagcagaaccggggagaccgtagtcccatggtccgctgcttgcatctatgaggaagtcatacggcaggaaggctaccgtctccgacggcatatgcaccttcataagcggctgccacgcaaaaaagtggcgccgatcccagcgtcatcgaagactgagtgtttcaatatccggtgcggacttgtgtgcatcagacgtctgtgcgattgaagcaaaccgacatcgaatccataggccatacggcccggatcatttgaatcacgattcagagtcaacagatcgtcgacatgaaatgtgcgtgcggcaacgaaacgagtgaatgaccgaccgcaaaagccggattgcgggtggacaccttacaaggaaagctcgcgatagaccaggtcgtctcggattgcaaagccctgctgctcccagaagtcgttgccggccttgttgtccgcatatacgccgacggcaaacttcggcaacccgagtgcgcgaagcgcctcgaccgcatgcccggccaaaagtgagccaacacccatgccgcgcgcttcaggatggaccgcagtgtgatagatgcgtgaccgtctgccgtcatggccggcgaggatagccccgatgatgttcccgccgtcgccctcgtcttgctcaccacgattctgggcggttcccagtcgccgagtcttatatgccgttcaacgtcagcgagccaggcctccgccattgcggtgtagtcggcgtcgaatcgtctcgaataatgcttcggcaaatcgggccatttggcataggcccataccggcggctggtagcgtgcctccacatacctgcgttttccgtccctagaggttctgggcacgaccgaaccgaatcctacggcgcccgctcatcgcattcctccggatccctgaatcccaaagattccaaggattccaacgcattttgaggatcccttgtgcaatagacccgcgaaaagagcaaaagtgtaaaggaaaatggtcttcaatcccaataattccaacacttccaacacttttcgacctgaaggaaaagtgtaagaaggtgtaggaagatgtaaaagtgtaaacaccgtcggaatcgacggagacgttctcatatggcacgccgatcgatcatcgaatgtcatgagtggctcccttcagacatagagtggtgcaccgatttggcctaccggatgcaccacgtaacgtgccaccgatatcgtcgggccgaacacccgggttataggccaaaatgtgtgtccgttttggcttgtgttcctttgtggcggtgggcgttcctcctgttcgagttgtatgggcggggaactcgaggtcggccagaatgtgtgtccggaatggccggtcaggccttgcggca

SEQ ID NO: 3740 - DNA, 22408 bp, Unknown
  R150_10m  MAG No. k141_14925
actgccacaactactccttaaaacggttgtgtatcttgaatgacattcttaagagtagtgcgatttgtggacgttgtgaacaacacgcccaaaatttagtgttagcgctcacaatgccgatgcgccgcctgattgcaaggcagtacggacgaaatcgctcagtcgacgtccttgccattgaggtagtcgatttcactgtcggacaatttcagttcgccggctttgaacgagtcctgaatctcctgcgggtttctggccgagggaatcgtgaacagatattggtattgcgcaagttcccacgcgagcgtgacgcgctggtaggagcagtcgtgggacttcgcgacttcgcggaaccggtcgaacagatgctcgttgaacgggtcaaggaatccaccgagcggcgaccagcagacgaaagccaaaccgagtttttcgcaggtctccaacgtgtgttcggggtcgcggtgaaccggggagaactggttctggacggccacgagacgatcgcccaaaatgttgtgggcggcttcgatgtccgcgttgtcgattctggagataccgaccgctttggccacaccttcgtccacgagctgcttgagtgcgcccatctggtcttcgtacggcacctgcggatcattgcagtgcgagtagagcagatcgagcgtatcgacaccgaggcggcgggctgattccttggcattggcgatcatggtttcgggtcgggcgtcggcctgccagccgtagttgccgttgccgtcaagcgtgcgcagccagccggttttggtggctacgagcacctgatctttggggccatgccacgagtgcagagcatcgcggaccagatattcgccatagcccatatcctccggttcgccggtgccgggtgcgctgggcagataataggaccaagccgtgtccaaataacggactccggcatcgagcgcggcatggatggtctcgatcgcctgatcacggttggaggggcgcccctcgatggcgagcgccattgtgcccatgccgaggcggggaatctcatagccggcaagtgttgccgcgtgttggtttttcatcgttgtggcctccatgccaagtcatcgaggagttggttagtccagaggaccacctggtcggagctcatggggccttggcccagggaaccggtgaacggggtgggtacgatgagctggtgggtgaccgggcggtattgggcgcctttgtaaatacggcccatacgcatctggatggattcgggcgggtcgatacggccgatccgcacgcggttggattgcgcgagaatctccgaaatgccgagcttgcgggccttgaacttcagacgggccacgtcgaacagggtctcgaattcgaccggcggcttgccgtaacggtcggtaagctcctcttccagatccttcaaatcggcctcgttgcgagcggaggcgagcttgcggtacgcttccagacgcagcttgtccgaatcgatgtactcgatcggaatcgacgcttcgatgggcaggtcgatggacacggccaccggctcgacgttctcttcgggctccttgtacttctccacggcttcggacaccatgcgtacgtacaggtcgaagcccacgccctcgatatggccggactgctcgtcgcccagaaggttaccggtgccgcgcaattccaagtccttcatggccacatcgaaaccggagccgagcgccgtgttctgcgcgatggtggcgagccggtcatgggactgctcggtcatcggcttggacgggtcgtacaggaagtaagcgtacgcgcgctcgcggccgcgaccgacgcggccacgcagctgatggagctggctcaagccgaaacggtcggcatggtcgacgatcagcgtgttcgcattggagatatcgagaccggtctcgatgatcgtggtgcacacgagcacgtcgatgtcgcgatgccagaagtcgcggatgatctggtcgagctgcttctcccccatcttgccgtgggcgatgccgacgtgcgcctcgggcaccagcgtgtggatcttgtcggcgatggacgagatatcctgcacacgattgtggacatagaacacctggccgcctcgcagcagttcgcggcgtacggctgcggtggcctgcgcatcctcgtaggcgcccacataggtcagcaccggcaaccggtcttcgggcggggtggcaagcgtggacatctcgcgaatgccggtcacggccatctccagcgtacgcgggataggcgtggcagacagggacagcacgtccacgttggtgcgcagggctttcagcgtctccttgtgttccacgccgaaacgctgctcctcatcgatgatgacgagtcccagatccttgaacttgattttcgggttcagcagcttgtgcgtgccgatgaccacgtccaccgtgccggtttccagaccctcgatggtctcgttgatctctttggtggtctggaatcggctcatggccgccacattgaccgggaaaccctcgaatcgttcgctgaacgtctcgtaatgctgctggacaagcagcgtggtgggcacgagcacggccacctgcttgccgtcctgcacggccttgaaggcggcacgcagtgcgatttcggttttgccgaagcccacgtcgccgcagatgaggcggtccatcggcacgggcttctccatgtcggatttgacctcgtcgatggtggtgagctggtcggcggtttcctgataggggaaggcatcttccagttccttctgccatggggtgtccgggctgaacgcgaagcccctggcgcgctggcgggcggagtacagcttgatcaggtcgtcggcgatctcgtggacgtgtttgcgggccttggccttggtggccgcccagtcggagccgccgagcttgttgagcttgggggcttcggcaccgatgtatttgctgacctggtcgagctggtcggtggggatgaacagtttgtccgccggggcgccgcgcttggaaggcgcatattcgatgaccaggtattcgcgagtggttttgttggcgccggtgccgatggtgcgctggcgcatttcgatgaaccggccgatgccgtgctgctcgtgcaccacgtaatcgccttttttgagttccaccaagtcgatggccttgcgccggcgtttcggcgttttggccacggccacggccgaagtgcggccggtcaggtcgcgttcggtgagcagggcgattttggcggctttgtccacgaagccgtcgatggcctgagagcggatgacgtcgaaattggcgatgccggtagtgttgatcgcgcgcctgagcctggccaaggtgccggccgcagcggcggtgatggtgacgtggaagccggcgtcgagcaggccttcgatgccttgggaggccttggcctcatcccctcggaattcggccgggttctgggcgtcgagctgcacatggccggtcagcgtggtgtccacgccgaaactggtgaggcgaatcaccggatgttcggagtattcgagggagctgatggtttccgcatagtcgaggaagctggctttgtcgaagctgatgggcgcgccggcgccgtggccggaagcggccacatgccagctggcggccaggaactcgttcgcggtttttgccaagtcttcggcggaacggcgcagtttctccgggtcgctcaggaggatcacggcatgcttgggcaacatggagcccaccggttccagatggtccacgagcgcgggcatcagggattccatgccttcgaccggaatggcgttggcgatggattcgagcatgtcctcagcattgggaatcgaaccgaccaaggctttggcgcgggcgcgcacggcgtcggtcagctgcagttcacggcatgcggtggcccagatggtcttgaggccgtcgccgtaggtacgctggtcggaggcgtggaattccttgatggtgtcaatttcgtcgccgaagaattcgatacgcaccgggtgcggtgcggtgggcgggaacacgtcgaggatgcctccgcgcaccgcgaactcgccacggtccatgaccaggtccacgcgcgtgtaggcgttttcgatcagacgtttggcggcttcgtcgaggggcaggtcctcccccacggtgaacacgagcggctcgacgtcgcccagtccttggacgaccggctggatgagcgagcggatcggcatgacgagaatgcgaatcgggccgaacatcggatcggtatcgctcggatgcttgagtctgcggaacacggccatgcggctggccacggtgtccgcgcgcgggctcagacgctcgtgcggcagggtttcccaggcttcgagctgggcgatgtcgtccgggtcgccgtcataccaggagcgcagcgagcccacggtctcttcggcttcgcggccggaggccacgaccagcacgaccggcttgccgggtttgccggtcacaccctgcccgatggcggcggccaaagccgggcgcaagccttcggaaacaccggccagaacggaattgtcgatgtcgtccgaaacctcgatgtcaccagtggcgagtctaaggaaggtcttgtcctgttccagctcagacaggatgcctaccagtgagccgttgatcaggtccgggtgcgtcgcctcaccggccattgaacttctcctgggtcttggcaagaccgcggaagatgatgtcctcggcggcgtcggcaccgtcagccaggaattcgggcagctgcttgcgctggtccggaccgaatccgcccagcacccagttcaccgtgttgtcatgcgcgttcgcaccgcgcttggagtgaccgacgcccatgcgcacacgcgcgtatttcggcgtgccgagggaacggtcaatcgacttgatgccgttgtggccccctgcggagccgcctgccttgaccttgatacgaccgaattccaagtccatgtcatcgtgaatcaccacgatatggtcgggctcgatctggtaataggcgctaatggaagccaccgcattgccggaatcattcatataagtcagcggcttggccagaaagaacttgacggtgcggccgtccaggttcatcacgcttttaccgagcatggccagacctttgtggtcggcgaagttcaccgtccaacgttcggcgagcacgtcggcggtcatgaagcccatgttgtgccgcgtgtcctcatattttttgccggggttgcccagtcccgcaatcagccagaaatccgatgccataatccactcctcgtccgtcttcctatattcccgtatgcacgttctgtacgttccgtacgtcatgcgcgcgttcgcctcgcgcactggcccatgcccggccggattcaaccgtcaagattgtactcaacgccgccgtcaagccttggaatcggcaagcagcagggcacggcattgctcggcatccatcgatcggaccgatgaatggtgaaacgcttcgacgtcacgagtcacgatgacgtcggcgtcattgtcctcggcaacggcacggatgagcccgtcctcgaagtcgggctcatcggatcggtacgacatacacgcatggcgttccataagtggacggatgtcgaacaattccatcagtccaccgatatcgtctcgcgccgcccgctcctcgccataatgcttgcgcaacacgcaatacacgtcattcaatgacgataccggcgccatgatctcaatgtttggctgtgcaacggcttccatgagcaaatcaacacattgtttatggaaaggcgctcgtttgtcattgcacaaatcgagcagaatactcgtgtcaaacagcagtttcatcccgtcccccaaatcgttccatacgtgcctgcgcgagaatctcctcatccgaaagatcgccttccgcctccggcaaattccggtcggcgaaacgttgaatcaactcctgctttttcctacgctcccgctcctgaatcagggagagcgtcagacgctcgaattccggcagttcccccgtatccgcaaggtagtcggtcagatcacgaatcaggtccgaataggtgcgcccattacgcttaagcactttctccgcgtcgcgcttccgttcggcattgacgcgcgccgtcaccatggccatagtcatatcgcacctccttgtaataccagtattacaagagatggggacgagtgaatcgcgtctattaggcggtgccgccagcgaccttttcgcgctgtttgccgttgaggtaccagtaggccagcgccacgaacagggccgccgaggatattgccgagcgtggctgcggacaggttatagaggatgcccgacacgtcgagcgccgcgacgcccgccgcgtcggcgccgaaaccaaacgttttggcgaccaggcccatcggcaggaagaacatgttggccacgcagtgttcgaagcccatcgccacgaatccggcgatcggcagcaggatgcccagcaccttgtcggatacggagcgcgcggcgaatccgatgcgcacggccaggcagacgagcacgttgcacaggatgccgcacacgaacagcgtgtcccagcttggcgtcactttaacatcaactccggttggaaaaaatctcagtatgtagcattcggttctcaaataggagaaacatgcagcggcaatcaacaacttgtcgtttacgacgccaggcaagggaaacagctcagacagatgacgcttccctgcaatcggatgacatattgcgggacggcagcggattttgggcgttcttggcgtggcatcccgcaagcgttatcgcacgttatctgcaccgaatcataagaatggcagaattccaatgatttcgcaggaagagttgcgggacgcgagctatgtgcatcgtttgacgcgtgtggcatcccacgtgattgcgggataccacgtctaaacggacgaaaatcgcgtgccgtcccgtagtttgccgttatctgggataagcgcgtccgatatatggcgttcgaggaaaagagctgatccgatacaactttttagtgttataggacaccggaatccatggagagcaagggtaaaccgcctcaggcctacaggtccaaataccagtaggacatgtcccgcatggtgccggtggagtcggtggcagcggcgggcatgaggccgaattgggtgaagccgaagcggcgcatgagggcaatggagccgacgttatcggcgaaaatgatgccacaggccttgcgcatgtggcgggcccgcgcctcggtgagcagcctgtcaagcatgaacgtgcccactcccctgccttgccatgccggatcgatgtaataggccaaatcggtgacgccgtcatacccggcacgatcgtagaacacggagagcgcaccgaagccgatgattgaaccgtcttccgattccacaacaaaaacgccgtagggcggcgtatgggattcgacccaggcgcggcgttggtcgagggtgcgcggggtgaggtcggcggtggccccacccgccaccaccgcagcgttgtagatgtcggtgatggcttggatgtcggattcgacggccggatggaaggtgtatggcatgaagttcctttgaatacgcaaatagcccgtccttatgataaggacgggctatgtcagttgaggtaaccgactcccttcagtcgccttcggcgatagctcccctcaccctgagggaagccaagttacttgtcgagctcgatggccttgttgagggcgtcttcaagctcctgctgcgccttgccgtaggcggtccagtcgccgttcttcatggcggactggctgtccttcatggcttgggcggcatcgttcaacgcctgctggagttcggggctgcggtcggaagacgagccggaatccgactttccgtccgtggtgccggactgaccaccattggtatcggaaccagattggtcaccggacacgttctcggcatcgcccgcggccgcaccggaattgccaccgaacacctgatccaaggcctcatccaacgtatccgcgaatccaacctgatcaccgaatgcgaccagcgtcttcttgagcaacgggaatgaggtcacgcccgaagacttgacgtacacgggctgcacgtacaccagtccgccaccgagcggcagggtgagcaggttgccgcgcaccacttgcgtgtcgccggattgcagcaggttcagttccttggatacatcggcgttggcgttgaagttgttctgcgcctggccggggcccggtacgttcgaatccttgggcagctcctgcaatcggatggtgccgtagttcgagcctatcttgcccttctcattgccggcatccgagtcgaccgacaggaagccggtcaggatctcacgggtggactggccagccggaatgtaggtggaggtcagcgagaacaccggttcctcggtgccaccggtctgcaaggtcaggtagtacggcggctgcaggatgtcctggtcctgctgggactgggattcggtcggatcgaccggcgtctgccagaagtcttcgcctgagtagtactggctggcagaggtcacgtggtacttggagagcagctcgcgctgtaccttgaacaggctttccgggtagcgcatgtggctcatcaggtcgccggagatatcggagagctggtggtactggccagggaagatcttctcccatgccttgatcaccggatcggattgatcccacacgtacaggtccacggaaccgtcgtaggcgtccacggtggccttgaccgagttgcggatgtagttggccttctgagagcccagggacgagaccgttgcggaagagacggtggtggaatccttggtggcggagccgaggtcggttatttgcgagtacgggtaggcgtcggaggtggtgtagccgtcgacgatccacttgacgcggccatcgaccacggccggatacacgcggccgtcaagcgtcaggtacggtgccaccttggccacgcgctccttgggggaacgatcgtagagaatctgcgattcgctggtcacacggtcggagaagagaatctgatcggagccgaagcggatcgcgtagagaatcctggagaacaggttgccgaccgaagggccgccgtcgcccttgaacgtggtcagagcaccttccgaaccggtcgggtagtcgaactcccaagcctgcgtgccttcaggggcaccgacaatcgagtattcggtggtgttcggcgagaagtagatgcgaggctcgtacttttcggattcggtgagcttgccctgggtggggatgccggattcgaagaattcgggctggccgtcggcggtcaccttgttgccgtaggcggccaccacgccgtaaccgtgggtgtacacggtgtggtcattgacccagttgcggttgtcattgccggccagatcgagctcgcgggcggcaatcacggtgtcctgggagacgccgtcaatctcgtacttgtcgaccgccagggtgtcggcgaaggtgtagtactgcttggactgctgcaactgtttgaacgtggggctgacgacctgcgggtcgagcagacggatctgcgcggtggtgtcggcctccttggccagagcgccctgctcacccttgtcggtcaccttgtattgctcggtcttgagcttgtcaagaccgtaggcggcgcgggtggcgtcgatgttgcgctggatgtaggtggattccatctcctgtgcgttcgggttgacgcggaagcgttgcaacagcaccggccatgccacggtgagtacaagacccaccacgaccacgacggcaatggaggtcaccggcacacgccaggccttgagcgcggcggaagcgcgcacgccgatggacgcctggccttcgagcgtgtgggagcgcatgagccagatgcccagcaccacgccgaggatggcggtcagcacggccatgatgaaggtgacggggatgttggcatgtacggcggtgtaggaggcaccggtgatgcgtgaaccctgcacggtgagctggtcgaagacgccaatcatctggcgcactgcccaagcgaacatgttgagcatcagccagatgccaagctggcgacggcaacgcttggtaatggagaacaggccgcgtccgttaaccggcatggtaatgcggataccgcccatcagcacatgcgtgaccacggaaaacacaaggcccacgcccagcagcatggccacggcggcgagcacgagcttcaggcccggcagcacgaacacgtagaagccgttgtccagaccgaactgcggatcggtggtgccgaacgactgcgcgttgaacatgagcagaatctcgctccagttcgcgttaaactgggaaccgaagatgacgccgacgatcagcgaaatcaccacggccacgcggcgagcggttttcgagctgacggatttgccgacctcgaccacatcgccgttaatgcgaatggtggaaccgtcggccgaatcagggcgtgctcgaatggccagccaggcggaaacgaagccggtcagggccatgagcagcgcgtaggccacccacagaccgattttcaccccgagctgggtccagaccacggactggaagccgagctggccgtaccacatcagatcggtgatgaatcgggacaggccgaagaacagaccgacgatgatggccaaggccagcaccacgccgatcagaatcttgctgccacggctggctcctgagccaccggacgctggcttacgggtgatacgcggattggccggaccacgtggagggcgggatgacccggaggggccagcgttggtgttgtgggccggaccgtccccatcggcctcgacatcgaggatgatcggatcgtcattgttcgcattgttgcgtcgtgaatcgccgccattgccgaacagtactgagaaaggatcgttaaaagacataactcaagcctatcgaaagggcgggaggtcggttatgccctgagcacagaatgaggcaacatcctgttctacgctctgttctacgcttgccggtatggacagacaacggccacaacatatgcgtccctcagcacacgccacacgccaacttcggcacaggagcattccaatcgtggcggcaatatgtgctttggcggtggtgttggccggtgtggcagtctacggatggcatgtcggatggttcgccaaatccacatcaaacggcaacaccaccactccccagacctcccagacgagtgcgttaccgcgcaccgacgttccttccccgaagaagaacgacgatccggcggcacaagcccaacgtgcggtatccgccatgacgcttgaggaacgtgtgggacagttagtgatggtgccgttgttcgccggttccgaaccctcctcgttggcttcaacaatcgccgacgagcacattggctcggccattctcattggcaattggaataccggcgtcgatacggtcaagaccgcgaccgcgcaactccaaggatatgcgccggccggcaatcgtctcatcatcgccaccgatcaggagggtggtcaggtacagcatctgactggtaccggtttcgacacaatgcccagtgccgttgagcagggcacaatgtccgctgacgcattgcgtcaatcggcaggcacgtggggttcgcaattagctgctgctggcataaatgtcgatttggcaccggtgctcggcacggtggtgggcgatcgtgcctcaaatgctccgattggcgcgctggatcgtgatttcggattggatgcggccggtaacgccgagcatggcatcgccgttattgagggtttgcgaggcgctcaggtcggtgcggcggtcaaacattatcctgggttgggcgcggtaagcggcaataccgacttcaccaccgaaggcattctggatatgaccaccacgttggacggggccgaggcaggtgcctttgaccaggcgatcaccaaggccgatcctgcaatggtgatgatgtcgttggccacgtatcaatccatcgatccgaataatccggcggtgttttcttctacgattatcgacggtcatattcgcaacgtcctgaagtacacgggcgtggtgatttcggattcgatgtctgccgaagcgttgagcagctacgatgtaagccaattgggagtaaatcttgtcgaggcgggcggcgacatgtcctgcatcggtcagacggattatgtaaagccaattgtggacggcctcaacgaacgggcgaagtccgatccggctttcgcttcgaaggtgacggcggcgacgactcgcgtaatgacattgaaaatcaagatgggactggcctgaccgttcatccttgcactggcgaggattgatgcgcgctgattcgcgctaatcctcaccagccctcgtacaaatgcacaatagtcctcgtacgaatcatcagttctcgtacgaatacagaccatgcttgccgatgtattgcaccacgccgtcgggcaccagataccagaccggctcgtcgtgttcggcgcggcggcgtacatcggtcgaggagatggccaaggccgggatctcaagcgtatcgaccttgccttcgggcaaggtcacgccgtccgggctggagtagccggggcgcgtgacggccacgaagtgagcgaggtcccacatgaggtcggcgtccttccactgcatgatttcggccacggcgtctgcgccggtgatgaagaacagctcggcgtcgggatgttgggcgcggatatcgcgcagagtgtcgatggtgtaggtgacgcccggacggtcgatgtcgacacgcgagacggtgaatttggggttggatgcggtggcgatcacagtcatcagataccgatcctcggcgttggtgacgtgcttgtccagcttgaacacaggtcggccggtgggcacgaaaatcacctcatcgaggtcatacacccaggcgacttcagaggcggcgaccaagtggccgttgtggatcgggtcgaacgtgccgcccatgatgccgacgcgcaggcgtgtatgccagttgccgcgtgcggaaagcctgcctttgccgtggctgctggccccggccggtacggacaggtcggacatgcgccgttcggtttcgccttgggtgacggcaatgatttcggcgggctcggcggattccactgttttttcggactgaactgacgcagccgttttgtggctgccggtaacaccactcatgcctggccgccctcgccggcggcgtcatcggctgattcggtttcctcttcgatttcgccggcggagggattgtcttccttgggatcgatcttgcccatgtcttcatcccattcgtcttggaccacgcgacgaatctcggcgaaggtgggcagcgggaagtccggctggtagaggcggcggacctcggccacgcgctcggtgatgcggatgagcgtgtcggtcatgccgtcgaggtcgccgtcgtgctccatctggctgtatttgccgatgtagccttccatgagttccatgtgttcgcgcacgatcttgagctgggcatcgttgaggtccacgacttcgggtgaatcggtctcgggccagccgatgagcacggcgtccgcgtattcgagcgacgcacgctgggcggcggaggcgatgccgtcctcaatctgcacgaggaacacatagcggacgatgctgagccgttcggccgcgatcttcaggccgagcttgggatcgttgaggtcgatgtcgggccgcagttcacttgccttgtttgccgtgtcagccgtagtgttcatgttgccgtcctcgttcatgcgcgcacctggcctgttccgtaaccgatccacttggtggtggtcatctcccgcaatcccatgggaccgcgtgcgtgcatcttctgcgtagaaatgccaagctcagcaccaaagccaaacacgccgccatcggtgaagcgagtggaggcgttgaccatgaccacggccgagtcgatgcgcttggcgaattcctcgatggccgcataatcctcggcgatgatggattcggtgtggcccgtggaatgcgtgttgatgtggtcgatggccgcgcccagatccggcaccaccttgatgcccatcttgagggccagatattcagtgtcccaatcctcctcggtggcgcggttgaggtcaaggccctcgatcgccgcgccggagatgatgtcatacgacgtggtgtcggcctgcagtacaacgttcgcctcggccagagcggcggcgatctgcggcaggaattcggcggcgacatccttatggaccaatagcttctcggcggcattgcacacacccacgcgctgggttttggcgttgatgatgatcaggatggccttggcgagatcaccggacttgtcgatgtagatatgcacgttgccggcaccggtttcgatgaccggcactttggagttgcgcacgacggcttggatcagacccgctcctcctcgcggcacgagcacgtcgatatggcctcgcgcctccatcatggcggtggctccggcgcgtccgtactggtcgacggattgcaccagtgcggattcgaaaccgtgtgcttcaagcaccggggcgatggcgcccagcgtggcagcattggtgcgttcggcggcgtgaccgcctcgcagcaacgcggcattgccagatttaaggcacaggctggccacgtccacagtgacgttcggccgggcctcataaatcatgccgatgacgcccatcggtacgcgcgtctgggtaaggcgcagaccgttgggcagattgtatccgcgcacgatttcgccgaccggatcaggcaaggtggccacatgacgcacgccttgggcggcggcggccacgcgcggcacgtcgaacagcaggcggtcaagcttgcccgcatccatgccgttttccttggattcgagcatgtccagcgcgttggcggcttcgatgtccgcggcgtgcccgtccaacgcgtccgcaatggcgagcagcagttcgtttttggcttcggtatttgcctgtgcaagacgctcctgcgcgcgtgcggcctgatcggcctggcggcacaccgcgtcgaacacctcaggactcaattcatcgctcataacagtcaagcgtaactcacaacgcggctgattgcttactccgacccgcttgttatgggatgtctgacgttttgaatcgcaaacagaaccggctcccctccgtctcaggcgggaagccggtgatgcgatgcgctccggtcagcgaatcatcactaaccggtacaccacggtggattagcgaatcagcaaatcagtggatctggtccaggtcggggtagagcgggaagtcttcggcgagcttgtcgacgcgggccttcagcgcggtcacgtcggcggacgggccggcggcgagcgcggtgccgatgatgtcggccacctcctcatattccttcgggccgaaaccgcgcgtggccagggcggacgtgccgattctcaggcccgaggccaccgaggccgggcgcgggtcgaagggcacggtgttgcggttgatggtgatgccgcaggcggcgagcagatcctcgccctgctgcccgtccatctcgctgttgcgcaggtcgaccatcaccaggtgcacgtcagtgccgccggtcagcacgctgatgccgttggccttgacatcgtcggccaggagacgttcagcgagaatcttggcgccgtcgagcgtgcgctgcatacggtccttgaattcgggggtgccggccaccttgaagctcacggccttgcccgcgatcacgtgcatgagcggaccgccctgctggccggggaacacggaggagttgagcttcttggcgtattcctgcttggcgaggatgaaaccggagcgcgggccgccgaaggtcttgtgcgcggtggaagagaccacgtcggcgtatggcacggggctcgggtgcaggcctgcggccacaagtccggcgaagtgggccatgtcgacccagaatttggcgccgacctcgtcggcgatctccttcatggccttgaagtcctcgatgcgcgggtaggcggaccaaccgccgatgatcatggccgggtgggtttcgagcgcacgctggcggatgatttccgggtcgatgcggaaggtctcggggttcacgccataagcctcggcatggtagaaacggccggagaagttgattttcatgccgtgggtcaggtggccgccgtggtcgagggccaggccgagcacggtgtcgccgggcttgacgagcgcctggtagacggcggcgttggcctgggcgccggagtgcggctggacgttggcgtattcggcgccgaacagggccttggcgcgttcgcgggcgatggtttcgacttggtccacgtattcgcagccgccatagtagcggcggccggggtagccttcggcgtatttgttggtcagcacggagccctggcattgcagtaccgctcgcggcacgaagttctcagaggcgatcatctcaaggccattgcgctggcggcccagttcgaagtccagcagttcggcgatctcaggatcggtttcgcagatcggcgcgttgaaagcatcggtcgctttctgcgcaaggggtgaagcggtcatgggtgctcctttggtatgggcgacaattgattcgccgttgccgccttactgtatggccggtttgtagccggcctgtttcatgatatggccggtccccgttcgatggcaatggtgattttcgccggtttgaccggtcggctacgcgagacggacggcccttctgcccacggcccacgctaaactggtgtggattcatcatccctttcaggcagaaggattcatcgtgacaaccaccttccattccacccgcagcaccaccgattcgctgaccgccaagcaggcgattcgtaagggcatcgccgatgacggcggcctgttcgtttcggacgcgttgggcaagaccaaggtggacgtggcctccctgccgggcaagtcgtaccagcagatcgccgccgaggtgctgggcgcgctgctgccggacttcacggccgaggagctgggccagtgcatcgccgactcctacggcgaacagtggtccgatgagcgcatcaccccactcaagcccctgggtgacgattacgtgctcgaactgttcaacggtccgacttccgcgttcaaggacgtggcgctgcagatcctgccgcgcttcatggcgcacaccacgccggccgatggcgacgcggacgagaagatcatgatcctcaccgccacctccggcgacaccggcaaggccgcgctggccggcttcgcggacgccccgggcaccgcgatcaccgtcttctacccggaaggcaaggtctcccaggtccaggaactgcagatgaccacgcaggccggctccaacgtgcaggtggccgccgtggaaggcaacttcgacgacgcccagtccgcggtcaagcgcatcttcggcgaccgtgccctggccgagcgtctcgccggcaattcgcacgtggtgctttcctccgccaactccatcaacgtgggccgtctggtgccgcaggtcgtctactacttctccgcttacgcccagctgctcgccgaccaggtgatcaacgtcggcgatgaggtcgagttcgtggtcccgaccggcaacttcggcgatatcctcgccggctactatgccaagctgctcggtctgccggtcaagcacctcgtggtggcttccgacaagaacaacgtgctgttcgacttcctgaccaccggtacctacaaccgccagcgcccgttcttccagaccatctccccctcgatggacatcctcatctcctccaacctggagcgcatgctgtactacttgtccgagggcgacacccgtctgatctccatgctgatgaacgacctcaacaagtggggcacgtacgagatcccggaagaactgctggccaagattcgtcagatcttcggcaccggttgggccgatgaggatcaggtacgcgagtccatcaagcactgctgggacgagaaccactacgtgatcgacccgcacaccgcctgcggctactacctgcttgagcagatgccgcgagacccgctgaccccgcgcgtgctgctctccaccgccagcccctacaagttcccgcgcgtggtgaacgaggcattgggcttcgacgccaccggcaccgacttcgagtgcatggatgtgctggcccacgagaccggcaccaccgccccggccgccctgcgtggtcttgagaccgccgacgtgcggttcaaggacgtcgtggccatcgacggcatggaggactacgtggagaaggccgcccaggcgctgtaaaacataccagcacattggctcccctcagagcggggagccattttttacatcagaattgcgtttacatcagtatcgcggcgactggcagtcctatggcgattgccaacagcacgatagtgccgatgatcacgctggggcgtgcgaggttgacggtccagccgacgccgaaacgtttggggatcatgatggcaggatcgtcacggttgatgtagatgatgccgccaatccagtgcaggtcatcgtcatacggcatggcattatcgtccgaatcgtcaccgccgtcactgtgccgaacaccggcatagacgcgcgccccgttctgcccgtaatacacgccgatcatcagcgcgccgaccagagccgccacggcgatgaacatgccgatgatgccgattagattgatatccagcacgccaatggtgacaagctgaacgcctaggcccaatccaccggctgccagcagtccgatgaccagcacgtagatgctccagacccgcgagaacacaccataggcatacccggtggcggcggggtggtcgggatcaatcgggtgcttggcgtagatgatcgcggcatggctggccaccatcaccgctgccagcaccacctgcgcgagcacggcgtaccaaatcaccatcggactcttctcggcccaaccgttcacattgccggcgatatccgcatgaatcggcacccgctccggcatccggtcatagcccagcaacccgacagcaatggtgacagcgagacaaacgacttgcagcaattcccacttcaagctcatcgggtcgggattgtcccgctcacctatcaatgctgcacggcgggcactggacgcctcccatccctgatcgactttgatggatagtactttgcggcgaaacatctgctgcagcacgaaaccacatatcgcaatcgccaccgctgcgatggacacagtccagaacgccgcgtcgactccgcagagttgccaaacggccagcgagaccagtatggcgcatacgccaagcgccaccgtaattcccgaaaacgcgactttaaatccgcgaatgcgcgtattgacatgggcggcggccggcactgtgacaccgaacacctcatgccggtcggtaacccatggaacccctgccaggccggcggtcactatcaccggcaacagtaaaaacgcacacaacgcgatgttcatcgacacgactgtattattcatcgttatctcccctgatttccttttgttgcaccgtcagtaacgctctgcgaggagcgcacgccgtatgcccgttcgcattgccgtttggtggcatcgaggaatgcggccgaatcaccgccgcgcgccctgtaggccaaggcaaggcgatagagttcctcgcccatccgctcatcctgtgcttcggcagttcggttcggtgcttctcccccgccgtcatgctcggcgacggttgcaccggcaccacgacgcataacgatgtatccctcgtcacgcaacagcgcataggccttgttcaccgtgtgcaggttgatgccaaggtccacggccagcgagcgcacggacggtaacgaatcgcctggcgacagctcatcgcccgcgatggctgcgatgaactgccggtgcagctgctcgtaaatcggcacgtcactgcgctgatcgatttccacaatcatggtcgcctcctcccaaaccgttctatttgttctacatcaactataacacttaccgaatacaccgcaaggcacaccaaacataacaacatatttaatatgtctgctatgatggtgcccaagttgcggcacaatggcaaggagacaatcatgtggtcggaagaggaaatcgatgctttgctgaacccgctgcgttccgcgcaatcggacagtcaggacattgaggccaaggaagccgcagacggattgccggtttcgctgcccgagacgatttccgcttttgccaatggccatggcggcaccattgtgctgggtattgccgaaaaggatggattcgagcccgcccaaggattcaaggcgcaacccatcgccgaagcattggcgcagatgtgccgggacaaaatcaccccacccatcaggccagtcattgacgtcacctcataccatggttccgccgtggtcatcgctatcattgatgaggccgatccactggataagccatgttacattcgcaacagaggccggtacagcggctcattcatccgcgtttgggacggcgaccgcaaactcagtcattacgaaatcgaccggcttctggaaaaccgcgtgcaacccacgtatgaccgagagctgatctacgaagccaccatcgacgatctgctaccgaatattgtgcaaggcattcttgcgttatgccgcgaacgccgtccacgtgtcttcggaaaactgaccgatgaagaggcgatgcgagcgcttgggatagtcggaacaggcgatgacggaaaaccacatccgacgcttgccggactgctcgtcgccggcaactacccccaacagtttctgccacgggtgaatatcacgttcacctgctaccccggctatgacaaggtgtttgccggcggggtgaaattcatcgacaattattcacttgacggccccatccccgagatactcggggaaactctgaacgccgcgcagaagaacatgcgcatcggaggcgcattggacggcccattccgcaaagacacctttgaatacccagaggatgccatacgcgaggccgtggtcaatgccatcatgcaccgcgactattcgccgatggcccggggcggccaaatacaagtcaacatgtacaaagaccgccttgaagtgctgagtccaggcggattatacggcgacgtcacgctggattccatcagcgagcccggctccacttcgacccgcaatcagacacttgccaaattgcttgaatgcaccccgttccgcaatgccacagtcgcggagaatcgagggaccggatacagcctcatcaacagactgctgctggataacggcaatggcgagcctgaaatatacagtacgctgaatacgttctcggtcaccttccgctcagcggatacctccaagttgccggacagccgcagggatccccgttacgcgggttggagcgataggcccgatatcgattacagcgcggcgcaagggctgatcaacggacagcttccgacaccggcgcacccgaaaatcgtgcctttccccaagagcaatatcaaagcggaagagctcagcgacgaagagatgtacgagcgatatctcaaagatattcccggattggggcctaccattgcgcggatagccggactggacgttccgcagtccgcggacatgccgctggttcgtgatgtctcatccatcgaaaggccatcagctcgcagcgcgtcggcatccgcattggaaggcagcgcccgctactccatgctggaagagcaactgttgcaactgatcaacaagcacggcaccatgtccacgcccaaattggtggaggccaccggagccccgcgctccaccgtcacctatcagctgcgcaaactcctggaatcaggcacgatcgaacgcacgcaaccagcccgctcccccaaacagtcctaccggataaagtccgcctgaggcgtgcaaagcgaaaaaaaggcgccgccgttggcctgtgcctcggcatatgcccaacggcgtgttgcttgtttttccaggaaggcgggaatcgccatgctgcgcggtacgcgagtgatattacgcgggtttcagtgcgttgtgtcaaccaaacgcgagaggaacatatgaccacggccaacgggcagacgcccgctgacccgatgcttatcatgcttatgatcgctgcggccatcaccctgggcgtcaatcacccgctccatggccggcggccacaccgacattctcgaatgcgtgggcattttcttcgccatcgccctgtccgtgaccatcaccgtggtgatggaaggccgaagcgccaaggcattcgaagcgctgaacgatatcaatgacgacacgaccgtcaccgtggtgcgcgatggcgagttcggcaaaatcgtccgcgaactgcgcgccgccaacaccggtatgacaccgctgcaggagaagctcgcgaagctggacgaacttcatgggcggcaccgccgaacagcagtcgaccattctgttcacgctgttcgtggtgttccagccgttcaacgccttcaacagccgcgagctgggcaacgccagcct

SEQ ID NO: 3741 - DNA, 55783 bp, Unknown
  R150_10m  MAG No. k141_14935
cgcagctggctcaccgcctcggccactacggttccggtctgcctgagcctggtatgcgtcaccaccaccgcgttgcgcttggccatggcatcctcctgtcgattcggtcgcactgctcattattctagccgcagacaccgtcatcactcgtacaggtgttcgaaaaatgccgcttcgtggcgcgtcgccgacatcgttccgcagagtcgattaacgtaaggcttcggcatacaatggcatacagccgcgcgatcaccgtacgcgtgccgtgcgcagcgcgatggcatgccgtatgaccatacagcagtatcagttgaggagcttgaggacccatggccaatgacttcgacgaatcctccgccaatgaggaggcctcgaagggcctgtcatggtggtattcggccgatgtactgagccgagacaaaagcgataaaaccgccaagcgcattcacctcatcagcatcaccgaccgtctgctcaggcacccgggccgtctgtccatggtgtatttcggcgcactgatcatcatcgtcaccggcttgctgctgctgccgatctccacatcggacatcatcttcaccaacttcccggtcgcgttcttcaccgccgtctcggccctgtccacctgcggcattccggtggtgaacaccggcgaatactggtcgacgttcggccaagttgtcatcctattctccatccagttcggcggcctgggcgtcatgaccttcgcctcgatggtggctcttggcacttcccgcagactcaaggtctcccagcgcatgcttaccgcgaacgaactgggcaccacgaagctttccgaggtcaaaggcgtactcaccgtggtattgggcacctccatcatcgccgaggtgcttaccttcgtgctgctgctgcccgacctgttccgcgtgaaccacggcaatatgggacgtacattgtggcaggcgctgttctacgcggtatcggcctacaacaacaccggtttcacgcctgacgccaccggcctgcatgtgaaccgttggggcgtgggactgccgattctcatcagcgcattcataggaacgctcggcttccccgtggtgctgaatctggtgcagtgcgcacgccgacatctcagcccgaaacgttggacgttgcacaccaaactcactttggtgaccaccgctgtgctggtggccacctcactggcttggttcctgctggtcgagtggggcaataccggcctgttccccgcagacggtcccggcatgaagatgcgccgtgcgatgagcgccgccgtcatgccccgctccgccggtttcgatatttcctgggtgcccgaagtcacgaatgagaccaaggtgttcatgagcatactcatgttcatcggcgcaggctcctcatccaccgccggcggcatccgtgtcaccacgttcgcggtgattctcttgatttgccgcgccgcattcaccggccatcgcgatgtcaccgtgttccgccgccgtatcccccgccgcatccagatgaccgccgtgtccgtgaccacggcctgctttgcgctggttatggtcggtgcgatgatgctgatgttcaccaccggctgcgcgttcgtggacgccgtgttcgaggcctgctcggccttctcgttgggcggttattcggtgggcgtggcaagcgccggcaatccggccagcctgtttattctgtccgccgagatgattgtcggacgacttggcccgttgaccatcgcctactccatcagcagaccgatggctcccgaacctattcgttatccgcaggaaaacattatcgttggctgatcggccattcaatcggcacacagaaatccggcatagagaggaccatcatcatggcagcaaaaccgagcggcaacaaaagcgtgctggtcatcggcctgggccgtttcggcgggtccgtggccgccaccctcgaccagatgggtcaggatgtgctcgccgtggataagaacccggagcttgtggcccgttggtccgcgcatctgcccaccattcaggccgacatgaccgatgtgctggccatcgagcagatcgacgcctcccagttcgacacggccgtcgtggccatcggcgacagcatcgaggcttcggtgatcatcaccggcaacctgctggatgccggcgtttccgatctgtgggccaagtccgtgtcccaggagcatgcgcgcattctgcagcgcatcggcgcccgtcacatcatcaatgcggagaccgatgccggcaagcgcgtgggtcatctggtggccggcaattatctggattacatcgaaatcgacggcccgtacaccgtcgtcaagatccacacgcccctatacgcggtgggtcgcagcatcgaggacgtgcaggtgcacgacaaatacggcgtgaccgtggtgggcctcaaggccccaggcaaggagttccagtacggctccaaggaactggtcatgcatcgcaacgacgaactcatcctcatgggcaagcaggatcagatcgaccacttcatccaaggctaacccccctaactgcgctcgctataccccctatctgctcacatcgtgaccgatataacccccctcaacatggatgcgctcattattggggcaataagccataaagctgtacgtccatattgagggggctttatcatcatgggcaagcatacgcagaattgcacgttgataggcaaaggagtctacggcaccataggagtggaccaacgttcccgtcttgccgatggcgcgcattttcacaccatgattgtgaccagcaccctcgaggcctcagttatagaaggggacaaactggtcatcaagagtggcattgtgcggtgtgatggtgatattcgcgtatccagcatcagcggcagcggcgacatcgaagtcggcggcgacattatttgcgatgaaataacctttaccggcaaactgcgatgcaacagcgatatcgtttgttccggaaatctgtccgtcaatggctccctaggcacccgtcatattagcggtcagacagtccgcttgaacggcgtgttgaagggtcatgacgtcaacagcagggctctggaagttcatccactgcgcagtacgatgttttctcgttttgatatggatgggtatgaggatggcagcatggttcgccatatcacagccgtcacggttgaagccaaccatctgcaatgccggactttgacggcggactccgccatgctacgcaacggcagtgcggtggaaagcgccacgtgtgccaccgcaataggcatcgaccgtacctccagcgtgctgctggtgaacggagactgccaacgcattcatctcaagacagcgtaaagcaggtattcctcattaccgtgggtgccgatgatgggactatcggcagtggccaccacgtcaagtccgtgctgttcagcacaggcgaccacgtcgtgcaatgcccgctcccgcaatgccggatcttccacgatgccgtttttgccgagtcctgcccgcccgacctcgaactgcggtttgaccagtaacacaatctgcgcaccgggagccgcgatgcgcgcgattaccggaatcacataggtcagggaaataaaggagacgtcggagacgatcatcgccggccggtaaggcaggtcgtcggcctctacttcgcgaatgttgacgccgctcatttcgatgacgtgctcgtcattggcgatgcgcgggtcgagctggccgtggccgacgtcgagcgccacgactttggccgctcccccgcgcaacagtacatcggtgaagccaccggtggaggcaccgatatccagacattccaagctttccggcccggtaaggccattgccggcaaaggtctcgaacgcgcccaagagtttgtaagcgcctcgggagacgtagtcgtcgcccttatccacggcgagttcgctgtgcccggctttgaccatgaacgatggcttggtgatggtctcgccgtccacgcgcacatgcccggctttgatgagtcgctgcgctttggcccgcgattcgaccagtcccgaagccacgagcatcatgtcgaggcgatcaagtggggtcgcgggatcgatatgttgctcggtcatataccttcctttcgacccaccatccaccaacggggtggctcggcatggacccaccatccagcacttcacgtcatcttccgctggcgggagaatgaatctcctctgctagctgcggctgttatcaagctcgtgttgtaacgattccagcacgttgcgataggtctcaagcttgcggtcgttgtcttgttcatcaatatccgcaagttcggggtatcgctcggtgaccggcgcgtgttcgctatccgtaggcataggactatgcctcgatggcgaacaccggtaccgtggcctcgctgagctgtgcgccttggtcggcggcttcccatgcggcgcatacggcggcacgcaggccgtccatactggtggggtcgctgacgtgtacctggccgttttcaaaccaagcgctagccttgcggcattcccaagtaccgctctcgtcgcggaccggctccggttgggcttcgccgagttcacgcagatcaagggcgatgaatgtgggcctcaggtgtgccggagccagcatcagttcggtcgggttggtgacaccggtcagcaccgccagcgaatcatagtcaccgcggttaccggcctcgatatcagtgtcgagtcggtcgccaatggcgatggacgcctccttgggcaccagatcgtggccttcggcggcgttcagttcgcgggcctcatcgtacatgtacgcttccggcttgccagcggaggcgaccggttcgacgccagtggccgtgatcacggcgcgaatcatcgatccgcaaccgggggcgatgcccagttcacgaggaatcgtcaggtcgcggttggtcacgaaatacgtggctccggcctcgaccgcgaacgcggcatcggccatcatctgccaagtcatatccggataccaaccctgaataacggcctgcgggcggttctgaggaccgtccacgatggtcaggccgttgcgggtgacctcatcgcgcaaatgctcggcgcccaatacctgtacgcgcgcgccggcgggcaacgccttggccaccacacgggcggccaccaccgaagaggtgatgacctgccacggctccacgtccaagccgaagcccttgagctgatcggccaccacgtgctggaagcgcgaggagttgttcgtggtgtattcgatggtcatgccggcggcttcggccgcacgaatggaatcggctgcgtattcgaccggattcttgccgcgatacaccacgccgtcgaggtccagcagcgcaagctgataggcctcggcgagcgggcgatcggtgcctttgaggaaacgggtcattacgccgctcactcctcggtttcggtctcggtctcatcggactcagccggttcaacggcatcgtcagcggactcggaagactcctcggcttcagattcctcagattcttccgatgcatcctcggactcagcattttcgacatcggcctcatcggactcggcatcgccgtcttcagcctcgtcgtcctcatcgccgtattcctgctccagatccggggcgtactgcgcctcgtccggatcgatgccgagcttctcgagcacgtcggagtcgtcggtgatgtcttcgagatcgtggtcaatcaccacgtcgtcgctgttttcgtcaatctcctcgtcggcatactgatcctcaagacggtccagcaggtcattaagctgctcggcttccttgctgcggccggcctcttcaaggaagtactgctcggcctgcacggcacgcatacggtactcacccggaagaccctgagagcggccgacggtatgaaccacttcaatggccttgtcccacatctccaaatcgccaagggcaccggcatacaccaggaacatctcgaccttgggagcgccatgcagctgcttgccctcatcggacagcgccagttccacggccttcttcggttcaccgacaccacgctcgcagtcagcgatgaacggcaggtagtcgaggaagccgttcatacggtaggcggtacggaactcacgcagggacagcttgtagtcgccctgacggtaggccacgaacgcgagcgtctcgcgggcaaagtcgatgcgggaggcctgacgggccacccacttggcgtgctccaaggcaagttcgggatcgctctcctccagcgcgaaagcggcgaggatgtgcagaccaatgttctccgcatgctccttggacaggccgcgcagacgttcgcgctcatccttggacagcatcgaccattccatgcccttgggcatcttgggctcgtcgggacgacggtcggtgtacgggttctgcgaggggaagctcatcgtgccgtcggagttacggcgcggacgcctcatgtattcagagcgcttctcctcacggtactggcgcttctcttcctgcgaaaactcgcggaattcgccgtcacgacggttgttgtcgcggcggtcgtccctgtggaagttgcggcgatcgccatcacggcgatcgtcgtcgcggcggaagttgcgacgctcaccatcacgatggaaatcacggcgatcgttatcccttcggtcatcgcggcggaagtcacgacgatcattgtcacgacggaagtcacgacgctcaccatcgcggtggaagtcacggcgatcatcgcgacggaaatcacgacgatcgttgtcacggtgctggtagcgcgggttctcgccgttctcgccttcgtgggaacggtagccgccttcgcggcgcggcttgaaaccttcaccgtcacggcgcggaccactgccgcggtaaccacccttgtggaagccaccggacttgccgtacgacttgcggtagccgccgtggccctcgccatcaccatcacggcgcggcgcgtaaccctcaccatcctcacggcggcgcggcttgaagccctcgccatcgcggtcgcggcgcggacggaagccgtcgccatcgcggcgcggaccgttgccgcgatagccgcccttgccaccgaaaccagagcggccgcccttgtggaagtcgccacccttgccgtacgacttgcggtagccgccgtggccctcaccgtcaccatcacggcgcggcgcgtagccttcgccatcctcacgacggcgcggcttgaaaccttcaccgtcatgacgcggcttgaaaccgcccttgccgcgcggcttgaaacccttgccgccgcggttgcccggtcggcgatcgccataccccttatggccgccgccgtaggacttgccggaacgctcgttaccttctgcgattacttgttttccttaattcgttgttgattaacggttttccacggcgccgagcgccttcttgccacgacggatgagcgcgaagcggccggccaggaagtcggcttcggccagcacctgctcctcatcctcgatacggttgttgttgagatacacgccaccggacttgatggcgcggcgtgcctcggaagcggacttgaacagtccggcagcctgggcggcgtcgattacgcgatcgcccggcttggagacggggaaggcgtgctcgccgttctcgtcgaccaccttgaagccgtcgagcacggattccagcgtttcctcgtcgatgtcttcgaggttgccaccgcggccgaacagcgcaccggaagcatcgatggcagcctgtgtagcggcctcgccatgcacgaagctggtgacctcccaggcgagcgtcttctgggcctcgcgcttgccggggttggtcttggattcctcgaccaatcgttcgatttcggccttgggcaggaaggtgaacgccttcagcaggctttccatctccacgtccgggcggttgatccagaactggtagaacttgtacgggctgagcatcgtggcatcgagccagacggcgttgccctcggacttgccgaacttcttgccggaagcatcagtgatgatcgggctggtgaacacattgacgtccacaccgcgcaccttgtggatcaggtccaggccggaggtgaggttgccccactggtcggagccgccgagttccagcgtgcagtggtattcgtcaaacaggtggagaaagtcgttgccctgcagcacctggtagctgaactcggtgaaggagatgccttcctcagagttcaggcggcgggcgaccgtgtccttggcgagcatggtgcccagacggaaattcttgccgacgtcacgcagaaagtcgatgacggtcatcgaggcggtccaatcgtaattggatacgaaacgcacggcgttcgcgccttcggtgtccagaatgccaccgatctggttcttcaggcgatcggcccagccggccaccacgtccttcgggttgagcgtgcgttcgccggactggcgcgggtcgccgatgagtccggtggcgccgccgaccagagcaatcggatgatggcccgcaagctgcaggtgacgcatgttgatgagctgcacgaggttgccgatatgcaacgatgcagcggtggggtcgaagccgcaataataggtgatgggctcgccgttcagtgcttctgcgagtcgatcccggtccgtggactgggaaatcaacccgcgccattccagttcctcaagcagggtgttgaaacccgcttccttgaagtcggtgacgtgagccatagcttgtcgcttctccctatcgaattgtgaatgagactgcccaattgggcacagtcaagtttcgcagaacatggcgacagtgccgaacaccagccgagccgcgcgattcagtaaaacgccttattctagcggcgcgggcccataagttcgcgcaaagagtcgatgatgtcctgacgatccggcacctggaacttcgggaaggacttgagcatacgcttctgctgtgcgttgatgacgccattgacggcccagcgcagacgctcaaccgtatcctgcgaaaactcacgcatcctgtcggataccgcactggagccccgctgccacgtgccaccggcgcgtgccgccacatcctgcaccacctgagcgacggaatcgagcacctgctcgaatccgagcatgcccgcaaccgtgaccgccaagtcgatgatggtgatcagggccagtaccgtgaccagcgtatgcagcatcggcagcggaatcatatccgtgacccgctcgacatatggctgcgaaccaagtaccacgcccacaccgccgagaccgaaaatcaacgcgcccagcaggcagacgcggccttggaggttgaagcggaaattcgagtaatcccaccagcgggcgtggaacagctgctccatgacccacgaggttgtgtattcgagtatcgtggcgcccaccatcgaaatcaggaagatgatgatcgggttatgtacgttgccgagaatggcgacgccgagtatcgcgccggtgccgtagatcgggcacagcgggccgttgaggaaccctcggttgaccaagcggtgctgttggcaggagacgagaatggattcgtacatccagccgacgaaactgtagaacagaaaccagaggaaataatgttcgagtatgatgatcatcgacgggcttcgatctcggcgtagggcttcgcggcgggcaacgcgcgcttgttgaaccggtcgagcgagaaggtctcggcggtggcggagcatttgtccgccaaggtgaccagatagccttcgatatagcgcggcggcaccagggtcatcgggaacatgtggttctcgatgctgttgcgttcgatatcgttgagcttgaagtccttcagggcattgaccagggcggcgtggccatgggtgaagccatgccactggtgttcgccgttatcccagtcgtgccagtcgtacaggaagtaatcgtgcaggagggccgcgcgaatcagggatttgaggtcgacgcggtaccacaggtgcgcgcggtcggccatccacacagccaggcaggcgacacgcacggaatgttcgaacgtggtgacgttgccgtgctggtagtagcagcgttcgatctgcatgtggcgatgctcgatgacctcacggccgtgcttggcgaccaggcgttgaatctgcgttcgggtgagcagatgtcccacggtttcgaccctccgttcgggttggttcagtgcaatcccttgttgtgaattacgattgcccgacgatattcaagaatccatcgagtaataccgtgaccgattgtagggcacacgtatgtccgtgcacactcatccaaaagaacgacaacgggaaccgttaatcgtggtgggtttcaagatagtcgagataaccctgaaaaccgccatcgaggcttgctacatcgtaaccgcgatcggcaaggatttcagctacttcctcgctccaccatccttgagcacaatagactacgacagtttgatctgtgggcacggttttgagcacatgggccagagggtcgagtggtgcattgatggcaccttcgaccgggtgggcggcgaagtcggctggttccctcaagtcgagcagcgtgaccgtattcgggtcgagcttggcaaattccgccggcgtgatgcggcggtacgatgcttcactgctctcatcgtcatcgaccgcattacgcaaagcaataggcatgttcttcccctctcgttccgatcttggctcccctcaaggaggggtgccacatagctctaaatcgcgcaggccggctgaatatagttggccggatcaatagcagtaatggtcggctgctcaccgcacaccgggcagtcgggcacatggttcggcaacggcacacggcggatgttcatggtcagggcatccacagtgagcatacgagccacgagcggctcccccacgccggcaatcagcttgacggcctcagtcgcctccagactgccgatcacaccgaccaccgcgcccagcacgccggcctccttgcaggtcggaatttcacctgcggcgggcatatcgcggaagatgcagcggtagcaggggccttcgcctgggatgacggtcatcacctggccggagaacccgaccacgcccgcatggatatacggcttgccggccagtacacatgcgtcattgatgaggaattttgcggcgaagttgtcggtggcatcgatcaccagatcgtacggttcgatgaggccggcgatgttgctggcatcgacgagctcgtagtaggtgtcgaccgtcacatccgggttgagcgcgcggatggccgtggccgcggattccactttgggcgctccgacacgtgcagtggtatggatgatctgacgttgcagattgctcatatccaccacatcgccgtccaccagtccgatatggccgacgccggccgccgccagatacagggcggccggagagccaagcccgcccgctccaatgatgagcacgctggaggccaacaaccgcttctgccctttgacgcccagccccttcaaaatcagatggcgcgcgtaccgctccacctgttcatcagtcaatgccatgttttctccatgtttccagctcccctcagtccgctacgcggccagctcccctcagagaggggagctaataaaagtgtcagtgcaaatatcccgtagtcggactggacggcacggcctgtccctcggtcaccttgcccagaccggacagatacgccgcacgaccagcatcgatggcgtgcttgaacgcctcagccatcagcgggatattgccagcagaggcaacggccgtgtacgccatcaccgcatccgcacccatctccatggcgtcgcatgcctgactcgggcgtccgatgccggcatcgatgatgaccggcacatgcgcattggcgatgatgatctcgatgaagtcacgcatgcgcaggcccatgttggagccgatcagcgaaccgagcggcataacggcggcggcaccggcctcctccagctggcgtgcggcaatcgggtccgggaacatgtagggcatgaccacgaagccttccttggccagcatttcggtggctcggatggtttcggcgttgtccggcaggaggtacttggtctcgtgttcgatttcgaccttgacgaagtcggtgtggcacacttcgcgtgccagtcgggcgatacgcacggcttcttcggcgttgcgcgcaccggaggtgttgggcagcaacgtgatgccttcgggaatgtagtcgagcacgctgttctcggtggtctgcgcgcggcgcagtgccatggtgacgatttgcgtgcctgcatgttcgaccgtggccttgatgaggttcaggtcgtagcggccggagcccagaatgaatcgcgactggaactcgtgaccgcccagggtcagcggcttgtcttccactggcagaatcggcgcggcggtgccgaccggattggtgacggcgggctgcggcggcagcggagtcgcctcaacagatgcttcagtaaccggattaatattgctcatagcttttcctttcatccaccctgtacaaactgcacaatttccatgacgcactggtcgtcgagcatggcgtcggcacgcttatcgcgcgggataatctcaccattgagttcgatggccacacgctcggcgcggaatccgtgcgcttcgagataatcggcgacgctgaccggcgtctcgagcgtgacctgctctccgttgacctgcataatatcctttcagatagtaaaaaagggtgcacgaaacgaaccgtaccttaagtggtgcgcccattcatgaacccaatcatgcgaccgttcgaccgctgtgatgtattggctccatcacgaccgtctcacggctgaattatgcaaacggaatgaaagctgtatcggagaacccggcaaatctgcaacaacgattccttacggcggcatgacccgcgtcaagttccccggtcgaagtctggcgacttcctctcagcctcacggctcccgttcgttacgatttctcagtgtatgccgttgcagtgacaacagcaaaatagagctccctctgacgagggagctctattgggactagaacgtgccgggggctttgtaggcggagccatccgacgtggatgcggggaagagcttgagttcttcgacctcggccttggcgtcgacgatctgctcgcgcacgcgaccgtaagcggtgccgcccttgccgttgcgggagtcgaccgaaccgtggctggagagcacttcgcgtactcccggagccttgtcggccggcaggaacgcggcgaaggtctcgatgaagtcattgtcggtcagatcccacagttcctggccgcggccttcggcgagcttgacgcaggcaccagagagctcgtgcgcatggcggaacggcacaccgttcttgacaagccattcggcgatgtcggtggccagcgcgaagccggtcggggcttcctcttcaagccgctcgctgtcgaagtgcatggtcttgaccatgccggtgaaggcgggcagcagcacttcgagcgtatcgacctggtcgaacacggcctccttgtcctcctgcaggtcgcgagcgtaggcggtgggcaggcccttcagggtggccagcagaccggtcagatcgccgatgagtcggccggacttgccgcgggcgagctcggcgatatccgggttcttcttctgcggcatgatggaggagccggtggaatagccgtcgtcgagcttgacgaaggcgaactcctgggtgttccagatgatgatctcctcggacaggcgggagatgtccacgccggtcatggcggccacgaacgcgaattcggccacgagatcacgtgcggcggtgccgtcgatggagttgtcggtcacgcgggagaagccgagctcacgcgccacggcctccgggtcgaggccgagcgtgttgccggccagtgcgccggagccgtacggagaggcgttgatgcgcttgtcccagtcgatcagtcgctgcacgtcgcgaatcagcggccaagcgtgggccatgagctggtgcgcgagcagcacgggctgggcgtgctgcatgtgggtgcggcccggcatcacggtgcggccggccttttcgctctgctcgatcagggcgttgacgaggtcaagcaggagtccggcaatcgcacgggagtggcggcgcagccacatacgaatcaggcaggcgatctggtcgttgcgggagcgtccggcacgcagtttgccgccgagttcgtcgccggcaatgtcgatcagtccgcgttcgagggcggtggcctcgtcctcatcgtcttcgatgggggcgaaggagccgtcatccacatgacgctggagcgtgtcgagtgcatcctccatgcgctgcagctcgtcggcggtcaaaagtcccgcacggccgagagcacgggcgtgggcgcgggaaccggcgatatcgtcgtcggccaagcgccagtcgaactgcgtggacttggacagtcgggccagttccggcgacggaccggacgtaaagcgaccaccccacagggccagatgttcgttgttctcagtcatgaaggctccttgaaaagtgaaaatagctgtgtttaagcgtagcaatgtgttcaaacatacagttgcccccgctggcgagggctgtcacatggagtgtgactgaggacagtcctttcaaagaccactcccagtcagctatgccgacagcctcgcagcgggggcgactgagtaagaattactcgacggtgttcttcgggacctcgatgccgttgccgaacttgacatcgcgggcggcagccacgcgggacggcagaccgtagatgtcgatgaagccgttggaggacttctgatcgaaggtatcgccggaatcgtaggtggcgagcttgtagtcgtacagcgaggagtcggaacgacggccggtcaccacggcgcggccaccgtgcaggaccatgcgaatctcaccggacacgtacttctgggtgtcttcgatgaaggcgttgagcgactgggttgccggggagaaccactgcgcatcgtaaaccagctcgccccagcgcttgtcgatgtcgcgcttgatgcggtgctgttcgcgttcgaggcagcagttttcgagttcctggtgagcggtgatcagagccacggcacccggagcctcgtacagctcgcgggacttgatgccgaccaggcggtcctcgatgaggtcgatgcggccgatgccctgggctccggcgcggcggttcatctcttcgatggcctgcagcggggtgacgtcacgtccgtcgatcttgaccggcacaccttccttgaactcgatgacgacttcatcttcgaccggcgggaaggccgggtcgtcggtgtaggagtagcagtccttggtcgggccgttccacggatcctcgaggaagccggtctcaatggcgcggccccatacgttctggtcgatggagtacggggacttctcggtctgggtgatcggcagcttgtgctccttggcgaacgcgatctcgacgtcgcgggtcagggacaggtcgcgaatcgggctgatggccttcagcgtcgggtcgatggaggcgatggagacctcgaaacgaacctggtcgttgcccttgccggtgcaaccgtgggagatggtgtcggcgccgaactggtgggcggcgcgcacgaggtgcttggagatcagcggacgggagatggcggagaccagcgggtagacgccttcgtacatggcgttggccttgagggccttcatgcaatattcgttggcgaactcgtcacgggcgtcgaccacgtaggattcaacggcaccgcaggcaagggcgcgctgcttgatggtctcgaggctttcgccgccctggccgacgtcgagggacacggccacgacgtccttgccggtgcgctccttcagatacgagatggcgacggaggtgtcaagaccgccggagtaggccagaacaatgcgcttgttatctgccattggttccctttcattcaaggtctgaaaaacaaactgatgcaagtatatacagaggactgtatatttatgcacggcgtgttggttatttggaagcgaggcttagtagccagtcggagcgggagacggcggtgtcgtcattggtgcaaatcaccatgacggtgtcgtctccggcgatggtgcccagcacgccttcgatcggctgcctgtcaatcaccgaggccacgtattgtgcggcaccggaaggcgtgtgcaccacaaccagatttccggcggcggccaccgaggtgaccagtccgttcagcacgcgggacatctgtgcctcaccgcgctcccctacatcctcaccttccgaagcaacgacgctgcggcccaccgtgtaggccaccgtgccgtccttcagccgggtcttcaccgcatgcatctcatcaagatcgcggctcagggtcgcctgagtcaccgcaatgccctcgtcgataaggattttggacagctgtgattgcgaggtgatgatatgcgtggcgagcgcctgttctatggcactcagccgcgccgccctggtggcagggcgctgcagggacggaccggtttcactcatgcgagcaggctttcgtctccacgggccttgccggtcaaccaagtcagcaacgctttctgtgcgtgcagacggttctcggcctcatcccacaccacggactgcgggccgtcgatcacttcagcggtgacttccttgccgcggtaggcgggcaggcagtgctggaagagcgcatccggcttggccaatgccataagttcggtgttgacctggtaatcccagaacggtttggagcggatggcgtattcggcttcctcgcccatggagacccaggtgtcggtgaacacgcagtcggcgtccttcaccgcttccttggcatcggtggtgaccaggatggagccgccggtctcggccgcgacgcgcttggcgtcggccacgatgtccgggcggggcaggtagccgtgggggccggccacgcgcacgtccatgccggccacggcaccgccgagcaggtaggagttggccatgttgttggccgcgtcaccgaggtaggcgatggtctggttcttcaggttgtcgacgccgcctcggtgctcggcgatggtctggaagtcggcgagaatctggcagggatggaagtcatcggtcagggcgttgaccaccggatgggtggagtacttggccatttcttcgacgcggtcctggccgaaggtgcgccacaccacgccgtaagccatgcggtcgagcacacgagcggtatcggccacgggctcgccacggcccagctgggagccggacttgtcgatgaccagtgggtagccgccaagctcggcaacgccgatggagaagctggaacgggtgcgggtggatggcttgtcgaatagtacggcgacggcctgcggaccggcgaacggctgcttgtagaagcggtcatggtggaacttgatggcaagttcgagcacctgcttctgctcctcatggttgaggtcgtcgtcacgcagcatgtggcgaagttctggggtcatgatgatctccttggatcggtgggtcggcagtgacggcgagaaatcagtcgtcgggcaggtccgtaggcacatccttgaggatggcaagtgcctgatccacgtcttgagcggttacaatcagcggcggtgcgaaacgcagcgcattgggagccaccgcgttgacgatgagcccgtgttcgaggcagtagttcatcaccgcgtgggagcagggatgcttgagctcgacggcgtccagcaaaccacggccgcgtacggaaacgaacagcggattaccggtggccataatgccatcgcgcagctgtttgccgcgagcttcggcgttggtcaccagattctcgtcttcaatcacgtcaagagtggcgagtcccgcagccgcacccagcggattgccggcaaaggtggagccgtgggaaccaggagtgaacagagccgcaagtttctcgccgaaagcgatcatgccgcccatcgggaatccgcctgccacacccttggcgaaagtcaccatatccggcgtcacgccgccggacagatcgtcacgctggaatgcgaaccacttgccggtacgtccgataccggtctgtacttcatcgatgatgagcagcgcgtggttgatatcgcacagttcgcgcacgaacttgacgtaatcggcgcccaacggctgcacgccggcttcgccctggataagttccagaatcacagcagccaccggacccttgccatagcggccgagaccggtctgtgcaaaagcgtcgtgcagggcgaccttgtcgccggcgcgtacgaattcaatgttcggcaccagcggatcatacggcttgcggataccgggtttccatgtggcggacagcgcacccatcgtacggccatggaagccgtgagtcattgcgagaatgcgtgcgggcttgccgccgatggaaggcagggcaccaggcaaggtgcggccatacagcttggcaagcttgagggcagcttcattgccttcagcaccggagttaccgaagtagactttggagccttcaggtgcaccagccagcttgaccagtttggatgccagctcaatttgcggctcggacgcgaaatagttgctgatatgagccaccttggcagcctgatcggcaaccgctttgacccacttggggtgggcgtatccgagggaattgacggcgatgcctgccaggaaatcgaggtattcgttaccgtcaacatcccagatgtgggcaccttggccgtgatccatgacgcgcaacggcgtaccgaacacattcatgtggacctgagagtactctcccagccacttgctgtcctccgtacctagtttttcctcatgctcagtagccataagagctcctcatttccagtccttcatcgggcataaccatggtaccgatgcctgcggaggtgaatatctcattcaaaatcgaatgcggcttgcgcccgtcgatgatatgggcttggggcacgccaccgtcgatggccctgacacaggcctccatcttgggtcgcataccggattccaggtccggcagcatatcgcgcaggttttccacaccgatccggccaatcagagaattcttgtccggccaatcggcgtacagaccatccacatcggtcaagataacaagcttgcgtgcgcccacagcggcagccaaagcggcggcggcggaatcggcgttcacgttgagcacttcagtggcatcttcttcgttcggagccacggaagagacgaccgggatacgaccggcggccaccagatcctcgactgccgaggcatcgacggaaaccacatcgccgaccaagccgatatcggtgggcttgccattgatgatgggcctgcgctgcatggccgagaacaggccgccgtcttcaccggacaggcctacggccagcgggccgtgcgcgttgatcaggccgaccagttcgcgtgacaccttgccggtcaggaccatgcgcaccacgtccatggcctcgggggtggtgaccctcaggccgcctttgaattcggatttgatgccgagggccttgagcatgtgggagatctgcgggccgccgccgtgcacgacgatcggatgcaggcccacctgacgcaggaagaccatgtcttcggcgaagcactgcttcagatggtcatcgaccatggcgttgccgccgtatttgacgacgatacgctggccggcgaactcctccagccaaggcagcgcttcaataagcacttctgccttctgatcggcgcgcaaatcggtgtgcacgtcgaaatggaacccaggtcccttcaattctgtagccaatttttctcttttctgcgacgccggcgacgctatcgctgccggctgctacaaacagcccactgggctgtttgcgttatatgcgacgccggcgacgctatcgctgccggctgctacaaacagcccactgggctgtttgtcagctttcgtagtcggcgttgatgtggacgtattcgtgggtgaggtcgtcggtccagacggtggcctcggcgtccgagccggtgttcaggtcgatgtcgatgtggacttcgcgcggggtcatgtcgacctcgctgcggtcgcggccggcgccgccgttctcgcagatgcgcacaccgttgacgtccacggtcaccttgttcgaatcgtaaggcgcgacttcaggcggcacagtgcccaaggagctgacgatgcggccccagttcggatcgttgccggagatggcgcacttgagcaggttcgaggcggcgacggcacgaccacaggcaagtgccgcgtcttcgctggtggcaccggtgacggtgatacggatgtcgtgggaggcaccttcgccgtcgccgatgatttggcgggacagggatgcgcaggcctcacgcaccagcttgttgaattcgtccttgtccggttcgacgccggaggcaccggaggcgagtagcaggaccgtgtcgttggtggacatgcagccgtccacgtcgatgcggttgaacgaatgttcggcggccacggcgagtgcggcctgcatctggccggcggagacgaccgcatcggtggtgatgacgcacagcatggtggccaactgcggggcaatcatgcccgagcccttgaccatgccgccgatcttccagccgttggagccggtcagttcgaccgtcttcggcttggtgtcggtggtcatgatggcgtgggaggcgtcggcgccggcttcggcggtggcggcaagagcctcatgggcgctcttggcaccagccagcacgttgtccaacggcagcagttcaccgatgagaccggtggagcagacagccacatcattcggttcggcgccgatgagaccggcgaccgtttccgcggtggtgacggactgggcgtaaccggcctcgccggtgcaggcgttggcaccgccggagttcagaatcacggccttgacgtgaccgtcggcgacgaccttacggctccactgcaccggggcggcacagaaacggttcgaggtgaacacgcctgcagccgcgtcgagcgggccgttgttgaccacgagggccaagtccttcttgccttcgacggatgaaataccagccgccacgccggcggcggagaaaccttgtgcaaatgtaacgctcacggtgctactccgatcttggtcaggcccgcgtcttccggcaggccgagtgcgatgttcagtgattggaccgcttgtccggcggtgccacggttgaggttgtctatggcggcaaaagcgtagatgcggccggccttgcggtcggcgacgacctgcaggtgggctgcgttggatccgatgatgttgccggtggcgggcagtgtgccctcgggcagcagcaccatgaagtcctggccttcataggccttggaccatacggcgcgaatctcctcatcgctcagtgccttggccttgtccgtcatgcgggcggacacggtggcgaggatgcctcgggacatgggggcgagaatcggcgtgaagccgagcgtgaattcgctggcttcggccgcgctcttgccggccgcgtgggcgaagttctgcaggatctcgggaatgtggcggtgcttgccgcccaccgaatacggcagggcggattgcagggcctcggcggcaagcaggttggtgcgcttgagattcttgccggcacccgagtatccgacgaccagatcggccacgatatcctgcgattcaaccagtccttcggcgatgccgggctggagggccagcgtggtggcggtgacgttgcagccagggcctgcgatgcgcttggtgccaggaagcgccgcgcgctggcgggtgtatgagccgtccgcggctttgccggtgatgagctcgggcatgccgtaggtccaatgctcatagaaatcgccgccgtagaactcatcccaagcggcctgttcttcgagacgatggtcggcgcccaaatccacaaccacggcattcggatcgagctgcgaggcgagcttgcccgaagcaccgtgcggcagtgcgaggatgataacgtcatgcccgttcagcacttcgggcgtggtatcttcgacgaccagattggccagttggggaatatgcggcatgtgcttggccatcgactcccccactgaggaatggcctgccacgcaggtgatgtcgaagtcggggtgcgcggccagaatgcgcagcgcttcaccgccggcatagcccgtggcaccggccacggccactgtatatttcgccatactcatctcttttcactgatgtgtcttgggatgagtatacgcgattatgcagactattgcatatttatgcagtgggtgtgttggtatgtgaacgctacttatgcggagatggagtcggaggaggagccggtgccgccggtgagttgctggagggcttcctggtagaggctcatggcgtcatagccattgaaggccatccagatgacggcgatggtgtacagcacgttgatcaccacggcggccacagccaaaccgaagcccttcatatggaaggtgcgcgtgcgccacattgccaccgcgcccatcagtgccgagagcactggcaccgggaagaacagggcgaggataaaggagatgatcgcatacgaatcccagtgcccgtagagtgggttctggtttggatcgttcaggtcgatgccgtggtaataatgcggctggtgaggctgaccgttcggctgttgaccatacgactgcccctgcatgcccgggtacccgcctggatatgcgcccggaccggactgttggccgccttgagcatacggccagccgcccgcctgctgattgccgggccacgccggctgctgaccgtacggctggccggcctgctgggattgcgccgcgccaccgttgatgccagcggctgcggcggaatccttcttggtatccggctcgggagcgccataaatatacgggttgtaattcggcccgtattggccagacatagcaccatattcaggctgctggtactgcccgtatttcggcttgtcctgctccggttggctcatggcgctcctcgattcggatgattggttgggtcaggcgcgcagctgggcgccgatttcggcggcctcagccacgatggccttgcggatggcgtcgctgtcttcggcggacagcgtcttgctcggtgaacggaacaccaccgcataggccagggacttcttgccctcgcccacctgttcgccggtgaacacgtcgaacagttcgatggattcgaggttcgcgccggcggccttgcgaatcacgttctcaagctggcctgcggtcacggtctcgtccacggtgaaggccaaatcctgcttgaccggcgggaacgtggagatcggcttggcctggacgggcttgccggtcagcgtggcgaacagcgcggtgaggttcagctcgaaggccgcggaatgggccgggaagccgagcgcctcgttgacgcgcgggtgcagttcaccaacccagccggtgaagacgtcgcccaccatgacgcgggcgacgcggccggggtgccattggacgggcacatcgtcggcggcgggctggtcgagttcgattgcggcaccgatacggccggcgatgcggcgcacggcctcgacggcgtcggaccagtcgaccgggcgcttgccgcccatccagccatcgtcctcggccagaccggtcaggatgccggccacatggtcgggctgttcgggcagaccggcgtcaagcgcggcgagctgttcgtcggtggggcgcacgccgccgggcagtgccgggatggcgggcgcgttcggatcccacaggtagacgtggccgagctcatacagggacacgttttcgatgccgcggcggatgttgcgctgcacggtggtggccagggtcggcagaatctcgcgacgcaggtacggacggtcgccgtagagcgggttggcgatctcgacgctgaccttcttggtggcttccgggtcgaagccgaaggccttgtaatcgtcgtcgcccacgaacgggtagctcagcgattcgaccatgccgaactcggcgagctcgtccgccactcgacggcgacgctgctggtccggggtcaggcccaccagaccctcgaccggtgccggcggcacggtgatcggaatctggtcgtagccgaccagtcgggcgatttcctcgaccaggtcgcacggctcgttcaagtccggacgccagctcggcgcggttacggcgaactcgccgttgccgccgccggccaccgtgcagccaatgtcggtcaggatgtcggagatgcggttgatgtccacgtcgaggccggccacgcgggccacttcggaggccttgaagtggatgaccttggcgcgcggcgtgttgttcacgtcgttcgggtgttcgctgggctcgccgttgccgtacttggccatgagctcggcggccatctgggtggcggcgggctgcagcgcggtgtcgacgccacgttcgaagcggcgggaggcctcggatggaatcttgtggcgacgggccgaacgggcgatggtcacctgatcgaagtgcgctgcctccagaagaatgttcttggtgtcggcggtcacttcgccatacaggccgcccatcacaccggcaaggccgaggatgcgcgagccgcgttcgccgttcggcgaatcggtgataagcagatcttcgacgctcaggtcatgttccttgccgtccagggtggtgagtttctcaccctcgttggcgcggcgcacgacaatcgggccttcgagcttgtcgaggtcgtaggcgtgcatcggctggccgaggtcaagcatcacgtagttggtcacgtccacggccaaggagatggagcgcatgccggcgcgaatcaggcggcggcgcatccagttgggcgtgtgagcgttgggattgaagtccttgacgatacgcgcgtagtagcggtcgcaaccgggcacgccgtgaatcggattgttatcgtcgatttcaacatcgatgtccaccggggtgccgggctggtagtcagcaggttccggggccttctcgttcagtgccacggccggatcggtgtaggcggcaccggtggagtggtggtattcgcgggccacgccacggtaggacagcgtgtagccacggtccggggtgatgttgatctcaagcagaggctggtcgaggtgcagcaggtgcatggcgtcctgaccaggcttcagagcctcatattcagcctcggagaagccgtactgacgcagcaggatgatgccattgtggttgtcgcccagacccagctcacgttcggaggcacacatgccgttggagatgtggccgtaggtcttgcgcggctcgatcttgaagtcgccgggcagcacggcaccgggcagggtgacgacgaccttttcgccggccttcatgttgggcgcgccgcagatgatgccgcgcggcaccttgttgccgtcttcgtcggtctcgttccattcgtcgccgcagtccacgtggcaccagttgatggtcttgccgttcttctgcggttcgggggtggcgtcgaccacgtagccgaccacaatcgggccggtcacctgggaggagtggatctcctcttcctcaagacccaccttgacaaggtccttggcgagctgttcgtaggtcaggccttcgggaacctcgacatggtccttgagccaatcgatatcgatcataggcatggctgaatcactcccccatcacaaactgttcggcgaaacgcacgtcaccttcgaccaggtcgtgcatgtcgttgatgtcgctgcgcagcaggagcgtgcgctccatgccgacgccgaaggcgaaaccggtgtagacgtccgggtcgatgccggcggacttcagcacgttcgggttcaccatgccgcagccgccccactcgagccagccggggccgcccttcttgtcggggaaccacaggtcgagctcggcgctcggctcggtgaacgggaagtagctcgggcgcaggcgcgtcttggcttcagggccgaacatggcgacggcgagcttgtccagcacgcccttcaggtcggccatggtcaggtgcttgtcgacggcgagggcttcgcactggtggaacaccggagtatgggtggcgtccagctcatcggtgcggaacacacggccgggggacgcgatgtacagcggcacgccacgggtcaggagggcacggacctgatcggaggaggtctgcgtacgcaccaccatgttggagccgacgaaaccggcggcgtccttggcttgattgcccttgacgtagaaggtgtcctgcatctggcgggccggatggtccgggccgaagttcagggagtcgaagttgtaccattcggcttcgatttccggaccggaggagatctgccagcccatggagatgaagaagtcctcgacgtcttccatcagcttgggcagcgggtgacgggcgcccagaggcttgcggttcaccggcagcgtcatgtccacggtttcagcggcgagtgcggccttctcggcggcttccttgagctcgacctccttggggccataggcacggccgaagtcggcgcgcagcttgcccatgagcttgccggcttccttcttctggtcgacgggcagggagccaatggccttgctggccttggtcatcgccgaatcggcacctgcgtacgttgtcttgatggccttgagctcctccaggttggaggcgttctggattttctcgatgcccttggcaacctcagcggtcacctggtcggcgtcgaacaccatttgttctgccacgagaaccctttcgtctgatgttttctcagcgtttcacagcgtttttaccggtttcacattctttcaacatgacccgacatagacagcgacatcaacatcaccgcggccgaggtgccaaggttcagcgattcggccttgccgtacagcgggatggagacgatgcggccgcagcgtgtgaggatgtccggttccaagccacgcgcctcattgccgaacagcacggctttcggagcctcgaccgccgccttgtccgccagtactgcgggcaggctttccggcttgcattcttcggtgccgtatacgtcggcggcccagacgcccatattatggtcgtcgcctgtccaggtgaagaattcgtcggtgctcatggcgagtaccggcagatggaacagggagcctgcggtggagcggatgaccttggggttcagcacgtccacgcagtcgtccacgaagattacggcgtcgcagccggccgcatcggccgcacggatcacggtgccggcgttgcccgggtcgcgcacctgccagaaggcggcgatctgcgggccccggccgttcttgccaagttcgacgtcatcggcaccggcgtgcatggactcggcattgccgacggccacgatgccctgggcgtccggactgatgcggtgcatcacgtcgccggtgcagtagtgcacataaatcgtggcatcctgcgaggtttcgacgatcttctccaacgtggaggagatgatacgcggatgttccaacgcctgcgaaacctccacatagaggtcctgcaccacgtccggccgccaagtgacggcctcgcgcacggattgcgggccttcgataagaaaacggcccgaacgttcgcggcctttggcgcgggtcagatcggcgatgcggcgaacgcggtcggatttcggattatcaagaatctgggcgttgatgggcatagccactaccctactgccgggtcattacgtcagtcgtggctcgctcccgctggcggaggcatcgtaagcctttcagacaccttgaaaggcactgtgccagtctgtcgcctttcagacaccttgaaaggcgaagtgccaattcccggtgccgatggctacgcctatggaggccagcgggacagccagacagatgacgtagaagatccagtcgataggcttcagacgcgagatacgggcttgggagcgtggggcgctggagccgaagccgcgcgcttccatggcggtggcaagtttggtggcgcgccggatggagagcaccagcagtccgaacgcttgggagagggcacgggcgatggcgttaccgtcgccaaggccgcgcgaacgctgggacaagccaagtgcgcgccaatcttcctgcagcagcgtaaacatgcgcaatccagccaacccgccgtatacgaatcgcggtgagaagtgcagaatctcaaccaaaccgtccgccaaatcagtgggatcgaggcccagggccaggatcacgccgggtacggcaatggccgccaccctgatagccgtggcgatggccagattaatggatccctcgctgatcacaatccagccaccctgccacaggatctcgcccgaggtacggccgtagagaaacacggagataaaactgccggcggcggcgatccataccggccaggtcttacggcatacggtccacggagccacgccaccaatccacagcagcacgaattcgatgccgagcgccgtggatgcggataccacatccagactgatgaacatcggaacgcacagcaacagcgcaccgatgatgcgactgaccgcgttgatgcgcgctatgaaccatgagggcgatgaggctttgaccggctccacgcgcgtttcctgcgggctgacggttaccacgtcactcatgcctcgcctcctcgaacatcacgcgtcgtgcgcccagcgcatccaccagcgcctcatcgtgcgtcaccatgaccacgcacgagccttggtcgcggatggcggcgatcagcttgaccatttcattccacgtactgaaatcctgtccgaatgtcggttcgtccatcaccaacactttgggtgcggcggccagcatggaggccacggacagtcgccgcttctccccgccagacaaggtatacgggttggctttggcgaagcgcgtgagattcatctgctcaagcatgcggtcggcggtccgataagcctcgtcttggctctgccccatcgacttggggccgatggcgacttcgtcacgcacgaaattggcagcgaactggtgttcgggctcctggaacaccatgccgatacggcccagcagttccttgcttttccagtcaatcggctcacgcccggcatgcgcgggcttgaggttgtcggcgatgagcaccttgccggcgataggcttgagcagcccggccaaggtcaaggccaaggtcgatttgcccgcgccgttcggacccatcagagccgttacttcgccgggatagaaattcagattgatgccaacgccaagagcggttccacggccaaagcttaagttctcggtgctgagcaccggcgcatcgtgcgcaggctcctgcttcggcgagtaatcgggaatcgcacggcccggcacccacgcgccaccggcggccaatacgtcgcccatctcggcgaacacctcgtccggcttgccgtcggcaatgaccgcgcccgtgggcgaacttgcatcgggtcggccgagcacgatcacgcgatcgaccagatcgagccatacatcgatatgatgttcgaccacaaccatggtctgcccggtggcctcgatgacctttttgaccgcgtcatgcacttcgaccacgccttcggggtcgaggttggcggtcggttcgtccaacaacagcagaccgggcttcatagccagcacgccggccaacgcgagacgttggcgctgaccgccggacagatggcgggtggaccgatccagttcgagtccgccgagtcccaccatatccaatgattcgcgcactcgctgccgaatctcctcgcgcggcacgttgaggttttcgcagccgaaggccgcgtcatcgcccagtcgttcaagaatgatctgcgagtccgggtcctgaagcaccagtcccacgcggcctcgcgcctcgcgcgcatcgacgccatcgatggtgagcgagccctcctgctcgccttcctcatcgccgccaagtacgcctgcgagaccggccatcatcgtgcttttgcccgcccccgaagcaccgagcagcaacacacgttcacctggccggatggtgaaatcgacggcacgcaacgcgaagtccttacgcgtggcgtgccgccatccccagccgctggcctctaccgcagccggattaacctgcatcagacgcgcgccttgctgcggccggattcaaagcgttccagagcgccggtggcggcgagcgcacgagacaagtaccagaccaccacgccggcgatcacgacgccggagatgatggagccaaccagataccaagtgacgcgcaggccgttccagcccgggttggtggcccagtagtaggcccagcagcccacgccggcgagcgcaccggacaggatggtggtgccgatgttccacttcttccaagcgaagacggcgaaggcgatttcggcacccagaccctggatgatgccgacgatcagcgagccgccgacaccccactggttgcccagcgtaagctcgaggaaggcggcgagggtttcggcgaacagtgcggcaccgggcttgcgcacgatgattgcggcgagcgggccggcgaacagccagaatccgttgagcagaccctcgaaaccgggggtcacgccctcgaacagggccagcggggcggagcagacaatgtcccagccccagaaaatgacgccggatgcgacggcgatgattgcggcgacgacgatatcgacgacgcgccacttgtaattggctttggccacagcttcagtcatgaatgtgcctttcttctgctcgtacgcaggccgaacatacatggatatatgtacgcacatgatgcacatgttcgtggccacgcgcgggttggttcaggcacgggtgggtaagagcgacatttccgtgcgccggcattatccggtcacgttccatcggtcgagactatgaatctcctctcagccgcctaacggcagctcccgtgtcaactccccgactataaagcaagccgccgtcaaaggcaatagccacatccgtgacctacctgacggcagctcgccaccattaccgatgcggttcggttacttgccgagcttgtccagcagcaaagcctcggtgatcacgttgttcttgaggccgggcagggagatggactcattggggctgtgggcgttggccttcgggtcttcggggccggtgaccagcacctgagcgttggggaaaatgcgctgcagttcggggatgaacggaatggagccgccctcgcccttgttgatgggctcaacgccgaaggcctcggtcatggcttccagcgcgtctttggtggccacggcggtcgggtccatggcccagcccatgccgttttcgccgcgttcgacagtgaccttggcaccgaacggcgcgtgggattcgaggaatgcagccagtgcttcctgcgcttcttcagggcgctgggtgggcgcggtgcgcagcgacagacggaagcgggtctccggggcgatcacgttgaaggatccctcgaccgggtgggcgtcgaagccgatcacggtcacggacggcttggtccacaggcgtgaggccagcgaaccggtgccggcgaactcgtaaccggccaccacgccggaatcctcgcgcacggtggtttcgtcaaggtcgcgttgcaaaccgccgattggctcttccgcggccacgccgggcacggccagatcgccgttctcgtcgtacatggaagcgatgagcatggcggccaacgtgttggagtcgagaatcgggccgccgtactgaccggagtgcaccgggtgctcaaggccctgcacggtcacgtccacgcaggtgttgccgcgcagcgaggtggtcaaagaaggaatgtccgccgaccagttgccggaatcggccacgataatcacgtcggcggcgaattcgtcgcggtgagcctcgatgaagggaatgaagcttggcgagcccatctcctcttcgccttcgatgaacactttgatattgacgttgaggtcgtcgcccaaagccttcagcgcaccggagtggatggcgatgccgccgccgtcatcggcggagccacggccgtaaagacggccgtcgatttcggtggccacgaacgggtcggtgttccactcggccgggtccggaacaggctgcacgtcgtgatgggcgtagagcagcacggtgggggcgtccggagaaacgatatgcgagccgatgacctcccatgcgcccggagtgccgtcggcattggaagcctggaccaccttggcatccacacccacgaggcgcagttcgtctgccacgaattcagcggagcgcttcatatgttcggcggtgatgcccttggcggaaatcgactgcagcgcaaccttttcggccagcaccttgacgatgcggttccaatcggtttcgacgcgcgaacgaatctcgtcagcggtgagcgttgccatgatggtcctcctttatatgtgtgtgagcggcgtcattgcaatggctgcgccagtatataagtgtctgaacgtcaccgtaacctcaaagcatgacatggaatccgtttaggaaaaaagaagaggcccaagttcccgttgagcaggccccgaagaagaccgccgatccttctgagaaaaaaggccgtcctaccccgaagatgaagcaggctcaggccgccggtatccgtccgctggttccggtggaccgcaaggccagcgccaaggccgccaaagcccgtctgcgtgagaaggagaacgccgagtacgaggcgatgcaaaaaggcgatatcaaccacatgcccaaggcggaacgcctgccttggcgtatctacatccgtgattatgtggatgcccgtttcaaccttggcgaatggttcatcccggtggccttcgcgattctgatcgtctccatgttcgtcacttctttgatgcagaaccagtgggcttccatcatcatgatggcgcttatgtacggttacctgattgccgtgatcatcgacgtatggctgatgtggcgcaagctcaaggccaagctcatcgccaagtacggcgaacagtccgtgtccaagggctcccgctccttctcctacgcttggagccgttcgattcagatgcgtcgttggaggcttcccaagccgcgttacccgaagcgcggtcactggccggcagactgatgtccatatatactttggctcccctcgttgaggggctgagccgtaaagaaaacagtccagtggactgtttttaggcgaagtggcggcgatagccgcatatggctccctagcatgggagccatacttatatgcaccaaggaggcaatcatgagcgaacagtttgatctggtcatcatcggggccggccccggcggctattccacagccctgcgcgccgccgaactcggcatgaaagtggcactcgtcgagcgtgacgccaccgtgggcggcacctgtctcaaccgtggctgcatcccctccaaggcgctcatcaccgccacccacaccatcgacaccgtgcaccgtgcggccgaactcggcgtcaacgcctcggtgaatggcatcgacttcggcacgctgcgcgactatcgcctgcgcgtggtcaagacgatggtgggaggactggccggactgctggcccatcgcggcatcaccgtgttccgagccaatgccgcgttccatgcggatgagatcgctccagcaacttccaaccacatcgtccacctcgttccctcccccgaccaaagcgacatcctcacctatcacaaggccgatgtccccgaacccagcggccccacgatggatctcacggccacgaacatcgtcatcgccaccggtgccaagccacacccattgcccggtaacccgttcgccggcgccctcatcgactccacacaggcgctggaagtcaacgaatttccctcttcggcggtgattatcggcgccggggccatcgcccttgaattcgcctcgatgtggaacgccgccggttcgaaggtgaccctgctgattcgcaaggaccgcgtgctctcagcctgggaccggagagccggcaccacgctgacccgtgagctcaaacgtcatggcgtgaacatcatcacccgcgccagcgtcacccatgtggacaccggcgcgaaccttggtgccaccgtgcactacacgcgcgaaggccaggacggcgaacagagcgtttggggcgaaatcgcccttgtcgccatcgggcgtgacccgatcaccgacccagcatggggcgtgacgattgatgaccacggacatgtcgccacggatgcgtacggtcgcaccgacaaaccgggcgtatgggcggtgggcgacgtgacggccggtcacgcactggcgcatcgtgcttttgagcaaggcatcgtcatcgcggagaccatcgccggactcaatcccaagccggtggacgaagccgctgtgccgcagatcgtgttctccttccccgaagcggcgtcggtcgggctcaccgtcgaacaggcgcaggcgagagaggacctcgtcgaaatcaaggagaccaactatccgatgctggcgaacgcgcgcatgctgatgagcggcacggccggctcattgaccatcgtctccggctgcgacgcggccaacccggacaccccgcgcgtgctcggcgtgcacatggtctccccgatggcctccgacatcatcgccgaagccgaacagctggtcggcaaccatgtgccgctcgccgacgcagcccgcctcgttcacccgcatcccacattcagtgaaacgctcggcgaggcgctgctcaaggccgacggacgaccgttgcacacacgctgagaccaaccagcacaagcaagttcggaccagcgcacctgataagatattgcccagtgtgtttcgtcccaacaaaggaagaagtgatggcggaaaaggacgcgaagccgaagaagcagagcacaatcaagcagatcatccagatctacaagtacacggctaaggaagacaaggccctgccgtggcttgaggccggtgctttcctgctgcctgtagtcgtgatgatcatcatcggtctgattgtcaagtggacctggctgacctggatcttcaccatgattaccgccatcatgctcggcattctgctggccaccatgatgctcacccgccgcgcggatgcagtcggctacaagcagattgatggcaagcctggtgccgccatcggcgtgctgagcaacatgcagaaagccggctttgacttcccgcaggaaccggtgtggatcgacccgaagaccaaggatgccatctggcgcggcacttcgatgaacggcatctacctgatcggcgaaggcgaatacggtcgcgtcatgaaggcgatggatcgtcaggaacgcgatatcaagggcgtcaccgccggctcctccattccgatataccgcatcgccgtgggccacggccccaagcaggtgccgctgaccaagctgcgtagcacggtgatcaagtccaagagctatgagcccacggaccacaagaacgcactgatcgccaagattcatccgcgccgtcgcttcctgctgaccaaggccgagatggaaacgctgaacgatcgtcttcgcacgctgcaggccaagaagggctatgccatccccaagggcatggatccgaaccgcccgcagaagatctcccgccgcgcgatgcgcggtcgctgatcggcagcacacaaccaaatcgcacagaagccccggaatccgttcaatcggttccggggcttcgtcatatgtctcataatcgcgtccacttacatccacctacgtcacctgtcaatacctactgtccacgttgcggacatctctacctactcccccgatagtctccgtttccattctgtaatgatgtttcgttgaaataacgcgcctgcgcgattgtcggccacagtcacgaaacattctcgtaacccaagtttcgagccggcgaaacgcgctattttacgatatataccgttatatctcatacgaaaggagcggtcccgtgaccgaactcaagtccaaggaagacgtcgaggcccttatcaacaaggaaggcatcgagtatgtctccgtccgtttcaccgatcttatcggcgttcagcagcacttcaccgtgccggctagcgaattcctgaaggacgctttcaccgacggcatgccgttcgatggttcctctgttcagggcttccaggccatcaacgagtccgacatgaagctggtcccggacgttgagacctctttcgttgacccgttccgcaagcacaagacccttgacgtggccttctccatcgtcgacccgctgaccgacgagccgtactcccgcgacccgcgtcaggtcgccggcaaggccgaggcctacctgaagtccaccggcatcgccgacaccgcatccttcgctcctgaggccgagttcttcatcttcgacaaggtgcgtttcgagaactccatgcagcgctccttctacgaggtcgactccatcgaagctccgtggaactccggcgttgactccgaagaggacggcaccccgaacatcggtttcaagaatcgcgtcaagaagggctacttcccggttccgccgattgaccacacccaggatctgcgcgacgatatggtcgccaacctgcagaaggtcggtctgatcctcgagcgttcccaccacgaggtcgccggcgctggccagcaggagatcaactaccgcttcaacaccctgcagcacgcaggcgatgacctgatgaagtacaagtacgtcgtccacgagaccgccgctctggccggcaaggctgcgaccttcatgccgaagccgatcgccgacgacaacggcactggtatgcactgccaccagtccctgtggaaggacggcaagccgctgttctacgacgagaagggctacgctggtctgtccgatctggctcgctggtacatcggcggtctgatcaagcactcctcctccgtgctggccttcaccaacccgtccctgaactcctaccaccgtctggtcccgggcttcgaggctccggtcaacctggtgtactccgctcgtaaccgttctgccgccatccgtattccgctggccggcacctccccggctgccaagcgcatcgagttccgcgctccggatccgtcctgcaacccgttcctggccttctccgcccagctgatggctggcctggacggcatcctgaaccacatcgagcctccggagccggtcgacaaggacctctacgaactgccgccggaagagcacgctggcatcaagcaggtgccaagctccctggccgaggctatggacgccctggaagaggaccacgacttcctcaccgccggcgacgtgttcaccgacgacctgatcgagacctggattggcctcaagcgcgacgagatcgaccaggctcgcctggccccgaccccgctcgagtacgagctctacttccacatctgagtttgagagcttagccacgttggaattcccattgctcttccctcgtgggagtctaatgggagtcattcagcgtaactagaaagaacctcgtgaaattcgtttcacgaggttcttttttgtatgttgcgttgtgtgttatgcgatgtgtgttgctcctggaatattccaggggcgggccgctacttagtctcccaacgctccttgagtacataggcggcggctttgggctgacggtcgcgagtgaagatgcccttcttgttgccgtcgacgcgcatgatgccttcaccggtttggaagtcgcagaggttccatacctgctcgcccaccactgcctcgaacatgtcgaacacttcgtgctgcatggtgaggtactcacactggtattcctcactccactgcacgcttggcagcttgtgcgcaccggcatcggtgtccgcaccgtattcggtgaacaggaatggcttgttgggttcggtgttcatccattggttcatctcgttgatgaaggccttcttggctccgatgagctgatacccatcttgcacataccagccgtaataccggttcaggcagatgacatccgcgaactgatggcacttgtctttgcctccggcggccatcagcagattggtgtaggtcagcgggcgatgctgcggatcgagcgtgcgcgcgtaatcgaatatctccttgaaatacggcacggccgcctcggatgccgagtcgttggcggcgtcgatgagattccaagcgccggaggcccccggcattcttttcgtcgaaggggacaattcagaacacaactgccgacacaatcgtcagggaggccagcgagaacagcgtgcttacaagcacgaagccgaccgcatactcgggcatgttgttcttgcgaccggtgaacatggcaatggtggtcatggtcggcagtccggcgatgaccgtgatcatcagcaccatgtcatgggtgatcggcagttgcggcaatgcgccggtcagcgcggtcagtagcgcgtagaaggcgagcgggaatgcgatcatcttggcgactaggccagcatagagttcgtagcgtttgaggacgccccaccacttggtcagcgcgaacaggccgcccaagtagattagcgacatcggcgtggccatattgccgatggtgtgcagcggcttcaggatgatgtccggcaccttgacgccgagcagaatcagaatcagggcgagcatcacgccgacgaaggcgggattgacgaatcgtttaagcaggccgaggacgcgggtgcctggcgaggggcggacgacggccggagaaccaccgtttgcggcattgctcgccgaaccagcattgcccaccgaaccggcgccgttcaccgaaccgttcacgaccgcacctcgcgcgccaatcgcgttgccgccagtcgtttcgtcgaccggctcgcacagccatacgccgtacgtccagagcagcgtctggtcgatgatcgacatcagcgccacgtaaatcgcgccgttctgcggccaaagtgccataatcaacggaatgccgatgaatccggcgttgccgaaaataagcgacgcctgaaatacatggctacgcgaacctttgagccgcaacagttcggcgaccagccagaacaccaggatgagcagcgcgtacatcacggcggtcagcagcatcacgccccaattggcagcgagctgcgcgcggtccgcgccgtcgacggcgttcgagaacacaagcacggggatgagcacgttgagcagcagcgagcacatgccgtccaacgccgtctgaccatagaaccggagcctcacacatccgtatccgaccatcagcatgatcagaaatccgactaactggccaatcatgacgccgaactgccccatgcacactcctctcgtttgctctcccgcgatttcctgtcactggttcatataggcagccatctggacaggctcggcggcacacgcatcagtatgttcgataccaccacatgccaatccacttctcgttcaaccgttccccgtgctaatgcgccgcctgccaccccgtgttgccggtgctgcgcgagcaccgctacgtgtattgcattccggtggccctcgggcgcaacgtgtgggtcggcgcgaacgtgtcgattctgtcgggagtgaccatcggcgacaattgcgtgattggcgccggtccggtcgtgacacattccatccccgccaactccgtcacctacggcgcgccctgcgaggtcgtgcgtgaaatcggcgacaaggaccgcgagtatttctacaaaaatcgcaagctcgacgtgtgggagtgagctttcgcgctactgctctttgagcttaaaacgctcactgaattggcggtcgcgccagtagtagacgtcgtcgcgttcgttgatttcgcgaattaccttgcacgggctgccataggcgaccgtgttggcggggatgtccttggtgaccagcgagttggcgccaatgaccgcgttgtccccgatggtgaccccgggcagcacggtgacattcgcgccgatccagacgttctcgccgatgtggactggcaacgaatactgggcaccctgatagcgcaggtccggacgcacgggatggccggtggctacaagcgtgacgttggggccgatcatggtgtgggatccgatgaagatctcaccatcgtccaccagcgtcaggttgaagttggcgtaacagcgctcgccccaataagtattgcagccccagttcgcatacaccgggcattcgaggtacagaccctcccccgccgcgccgaagaacgcctgcatgagttcggtacggcgcttcgggttggtcagcggcgtggcgttgagttcgagctggagatcacgctgggcggcctgcagatcaaaaaagccgtccacatcatccggcaggtagacctcgccagagaacataagcgccattttctcgcgcgtcgcatcatcgataatcggcttggcgatcggcttgtcttcggtcatcattggctcctgttcggcgttttggcgattgtgtcggtcgaactattctgtcacagactcgttttcgacacccagcatcgagcgcagccagtcaaggattcagatgtgcgattggcaccgtgcgggcctcacacttttcttattgagaacgattcgccgtgcagtcaagccctccatccacccaaaaaggactcgcttttggccacatcatcgcggtaggccttgccgaactcgtcaatgagcccatggaattcctgcaaatccttgacgctgaagctcgcatccagcaccacgggcgaataggccctgtggaatgccggatagccggccggcacatcaaatccaaggaaggcgaatagtcggcgagcataagtatcggccacgaatgtgcggcgcgagaacacgtacagcatcagatcgtcggccgtctcgccgccaataccaaataatccaagcaactcggcccgtaattcggcatcggaaatagccgcggcaccctcgggcgcggccccgcaacgctccacataccaccaactcagcgactgtacggtcttggatttgttgacataaaagcctgacggtcgaatcagttcctgcaaacgctccggctccatggccaccagcgcatggggttcgagcacatcctccgctttcaacgccgcaagcgaacgattcacattgccccacgccgtattctgcgtcagcaccgcgcccaccataatctcgaacgtggtctccgccggccaccatccggtcgggccgagtgcgtcagccatggtgcggtacagcaattcgatgcgctccggcacaggccacttgtgtgcctggttggctttcatacgtttcatattctgcattcaggctccgtattagccatccgccattcatttattaggtcgattatgcgttcattaggtcacttgtgatgaacactgccttcaagaatggcttcattccaatgctcattatctcatgctaagcagggcaccgacctaatgaacgcataatcgacctaatgaacgcaacggtaaggaaaaactacagagattcagcgagatatgctcggtccacctggtctggaagtcgaaaatcttgatgacatctaccgcaattcgtgcaggattcgccgcatgaacgggatggtgaccacgaatgtcagcacgtcggacaccgattgggccatttccacgccgagcacgccgaacatcatcggcagaatcagtacgatcggtgccaaaaacagaccttgtcggcacagggccaggaaggaggcgatgccggtgcggcccatggtctgggtcatcatattgcccatcatgttgaagccgttgagaatcaccgtgcagcattggatgtgcagcgcggccacacccaccgcgaccacggccgggtcggagcggaagatctcgaccagttgcggtgcgaacacccacagcaacaccgccaacaccacgagcacgcaggtggcgagccgcacgcagaaccagtacccttctttgacgcgcgcgaacaggccggcaccgtagttgtagccgcacaccggttggaaaccttggccgaggccgacgatcaccgagttggcgcccagcataatgcgcatcacaatggccatgccggcgatggccgcatcgccgaacggattggcggcaatgttcacgcaggtcacggaaatcgaaccggcgccttggcggatcagcgagggcaggccaccgccggccacttcgcgcatgagcagcacatccggcctgcaattgcgcagggacagtttcatcacgccgaatttgcggctcattgtggtcagaatcgtgaagctcaccgtctggcagatggcggtggccaggccggcaccaaaaattccgaggtgcagcacgaagataaacaacggcgcgagcaggaaattcagcaatgcgcccgaaaccagcccgatcatgccgaacgccgattgcccttggtatcgcagcagtccgttgagcgcgaacgacccgcatacacagggtgcggcgaccaacaacggcgtcaggtattgcacggcgtatggggcgatcgtcgaggtcgatcccagcatgacgaccagcggccgcagggtcagcaatccgattgtggcaatcaccaaaccagagagcaccgcgcccgcgaagcccacggccagtagtcgggaggcgcgctcattgttctgtttgccgagttcgcggctcatcgagttgcccgcgccgttgccgaagaagaagccgagcgcctgcatcacggtcatgatggagaacgcgatgccgatggcaccggactgcgcggtgccgagctgaccaataaagaacgtatccgtgaggttgtaggcggtggtcaccaagttggagatgacggccggcaaacacagtttgagaatcagcggcttgaccggctgcccggtcatctgccgatatttcgcgtccgcgctcgcgcgtctaatgccatgaatctgcaccatggacggctatcctactcgcgcagggtcctatgcaaaggcgcgttaccgccatacgagtcagcgcagataccgcccggtgatgctgttcggattggccgcgatttgttccggcgttccggtggcgacgatgtgtccgccgctttcgccgccgcccggacccatgtcgatgatccagtccgcattggcgatcacgtcaaggtcatgttcgatgaccacgactgttgcgccgctcgccacaagccggtcgaacacgcccagcagcacacgcacgtcgagcgggtggagaccgatggtcggctcatcgaacacgaataccgcgtccgactgcgccttgcccatttcgctggcgagtttcagccgctgggcttcaccgcccgaaagcgccggcgtcggctcgccaagcgtcaagtagccgaggcccaaatcacgcaaggtggtcaggcgcgcgtggaccttcttgaggtcgccggtcacggacagcgcctggtccacgctcattgccatgagttgaggcaggctcagggaaatgttgccgccaccctgatccgtcgcctcactcaatttttccttggcagctttgcgtttatccgggaccttcatcttcgccgctttgcccttagccgctttaacggcacgccgaatcgcgccggcttcgggcgcataccgggatccgccgcaatccgggcattcgatggtaacgtccggcaggaactgcacgtcgagtgagatcgaaccggtgccgtcgcacgtggggcaacgcagtcggccggtgttgtatgagaaatcgccagccttccagccgcccgctttggctccgtccgtgcgggcgaaggcgcggcgcaattcgtcgtgaatatcggcataggtggccacggtggagcgcacgtttgcgccaatcggcgtggcgtcgatgagattcgcgcgactgatgcccgcggtctcaagctcgcgcacgtgttccggcaacagctcccccgccgcctgcgctttgagtgcgggaatcagcgattcgagcaccatcgtggttttaccggagccggagacgcctgtcaccgccacgagccggccgcgcggaatatcaacgtccagcggcttgaccgtatgcaactggctggttgtcatgcggatgtggccaaggtcgaacacctgcggttccgccacacgctcacgaatacgcgcgtttgcctgatctgacaggaacggtgcaatgcggctgcctggattcgccgccacctcgccgaccgtcccttgcgcgatcacatgccctccttcggcgccggcaaccggtcccatttcgataagatggtcggcggccttgagcacgcgcacgtcatggtccacgaccaccacggaattgccgtccgccaccaagtcatgcatcacgccgagcagcccatccacgttcgagggatgcaggccaatggacggctcgtcgagcacatacagcacgccggtggtgcggttgcgcacggcacgggcgagctgcacacgctggcgttcaccggttgaaagcgtggcaccggcgcggtcaagcgccagatagccgaggcccagatccaacagtcggcgggccacgtccaggaatgattcgcagatgttggtggccatcgtccgcatgtcggcaggcagggattccggcactccgcgcacccaatccaccgccgcatccaaggtcatcgcgctggcttcggcaaggttcagcccgcgcacgtgcggagcccgggcgacggcgctcagtcgggtacctccgcagtcggcgcatgggccttccttgaggaaccgggccacgcgctttaggcctttctcgtccttggctttggcgagcgcgttctccaccgtgtatacggcgttgaagtaggtgaaatcgagttcggcgaaatcgtcgcctttcttcggcttgtaaagaatatgctttttgacggccggcccgttgaatacgatgtcgcgttcttcgggcatgagctcgctgaacggcacgttggtgcgcacgcccatcgcgccgcacacctgcttcatgaggtcccacatgagcgaaccccatggcagcaccgcaccgtcgtcgatacttttcgactcatccggcaccagggccgcacggttcacttcgcgcacaatgccggttccggagcaggtcgggcaggcgccggccgagttgaaggcgagcgattcggcgccgggcgcgtggaattccttgccacagctgacgcaagtaatgggcagtccggccgccacgttcagcgtcggttcgttgcgcgccccgcaatgcgggcacacgtgcgaggcgacgcgggagaacaggagccgcagactgttgagcagttcggtcatcgtgccgaacgtcgagcggatgccaggcacggtgggccgctggtgcagggccagcgcggccggcacatgcagcacttcgtccacttgggcgcggctggcctgggtcaggcgacggcgcgtgtacgtggacagcgcttccaggtaacgccgcgaaccttccgcatacagcacgccgagcgccagcgagctctttcccgaaccggagacgccggccacgcccaccagttcgcccagcggaatgtcgatgtcgatgttcttcaggttatgcacgcgcgccccgcgcacttcgatcgcctgcggccgttgatcgttgcctatgctcggcactgctccgccaccaccttactgtctgacctattatcaagcgtcacgccgttgcctctttctcgacctcgccctagaccgccgccgcacgagcttcatggtctccagtatcatcacgaccaacgacggcagccgagaggctttcgctattgagcaccgcctctcgcatgctgttcaccgcgtcattaccgagactatccgcgtttggcataatgagttcacggacggcgggcataatggcaatagaagtccgtccacaccgaaggagccccgaggatggaactgcgcgtcctgcgatattttctggcggttgccgaggaaggcaatatcacgtgggccgcgcagttgctgcgtatttcccagccgacgctctcccgtcagctcaaacagttggaagaggaactgggcgtcacgctgttcgaacgcggcagtcacaccatcacgctcaccgaggaaggccggatgctgcgcgagtgtgcgcagaccaagtcaatacgagttcctgcgcaccggcattacaaagcactggtcagcgatggttcccggaaaccacccgctggcggaacgcgaatcgttgaccccgcagaatctcaaggatgtgccgctgctgttcccgctgcgcacgcccgtacacaatctgctgctgaactggttcgggcaatacgccgatcaaggcggagctcaacgccgggtatcacacgccggaacgcacccatgagcttttcgaggaactggtgagccatcctgttgaccccacgttccggttgaacgcgccattccgcaccgacttcggccgcgacgaacacggcacgcagggagctgtcaagcgagggcgtgaaggtggcgaccacaccgaatacggccatgccgatcgcgccgccgcgcagaccggcagcttcgccaagaccggccatcgcctgcatatttccacaccggcggtggccaaacagatcaatacgttcgaaaaagaatacggtctgacgctgttcgaccgatcgcgcagtggagtgcaactcaccaaagccggcaaggagttcgtcgaggacgcgcagatgatcgtgcgccaatgcgaggagattctacgtcgtgcacaacggcgcagcaccgacggcatcgccaccgtccgccttggcgtttccatcctgcaccccggccgccgcatcctcgacctatggcagcgcgacgccggcaaacacaccgacatccgcctggaactggtgtcgatgcccgatgactccgaagcgatcaacgacatcgtcacccatctcggcgaagacgtcgatctgatatccacggccttcgacaccggctattgggacgacacctgcaacaccctcgccctcgattccgagccgctgtgcgtggcggtgccgcgcaatcacgcactggcgagacgcgcacggctcacattgaaagacctcgaaggcacacgcatccgcattctcaaacgtcatcgcggcgccaacgacacagcccgggacctgtcagaacaatgccccgccatcgatttgatcgacatcgaccactacgacctcgacacgttcaacgactgcgccgaatccggcgacctgctcatccccaaaccggtgtgggccggcattcacccgcagctcgtcaacgtggccgtggactggcccgaaccggtcatcatgcactacggactgctctacccgctcgacgcaagcccggcgattcacacattatggaatttctcgccgcagacggagatctcgaaccgtgaccgtccaacgaaaccgcgccgatgctccggcgtgaagtgcggtaatctctaagaaaaggccattgtgtcgagatggcggggcaacgggcagcgttgcggatttgggctgaggccccgtcgcttgcggtgttacatattgtgacgatgaggagggcagcatggaggccgcagagagcaggcagccgacgattttcgatgtcgctgcggaggccggcgtctccaagtccatggtttcccgcgtgatgcgcggcgaagggggcgtgcgtcaggagaaggtggaccgtgtgctcgccgcggcgaagaagcttggatacgtgccgagcgccatggccagcgggctcgcctcgaagcgcacgaaaacgctgggagtggtggtcaggaacgcgaagctgcctttctatgggttccttcagggcgccatgcagaagcgggcgcgtgagcgcggctatcagatggtgtccatcagcggcgtggaggaactgtccgcggatgatgcgcgccaggcgctgcgcgatttgatcgccctgcgcgtcgaggggctgatcgtatgctccgccatgcttgcggtggaggatttcatgccgttcatcgaccggatcccgttcgtgatggccgggcacgaggacacgacgcgcaccgtgtcctcggtgttttgcgatgaggaggacggcggccgcaggctcgcgcaatacgtccacgacttcgggcaccgggaggtggcggtgtttctggtgcccagggaatactcggtcagccagtacggccgcggcatggccatgatcgagctgctcgggcagctcggcatccgcgtgaaggtgatggatatgaaaggggccgaagaggttggaacgctggtggacgaggtgctgtgccatcccaggatcaccgcgtatatgtgtccgtccgacgtggtcatgctcaatgtgatggacgagttgcgccggcgcgacgtttccgtgccgcaggatgtgtccgtcaccggctatgacgggtttggcccgctcgcgtcgccgtaccttggatttaccacatatcggcagcctttggaggagatcggttcccgcgctgtggatctggtgctcgagcgtctggatggcggggaccacgccgtggaggcgctgccagtaaagggggaattcatccacgggcgcaccgtggcgctgccacgttggaaagacgggcgatagacgggcaataggcggaacggaagccgcatcccgcgccgcaatcccatgcacccgcgcgtggtggcgacggagcgatagcacccgtcgcccgaggatgcatcacagtggcagcagatcgagcccgttggctgcggcatagcccaggatccaggccatgggcagggttgccgcccatgcgatgaggatcctgcgcgcctcgccccagcggaccttgcgccagtcgttcgtctggcaggtgccgatgagcgcgcccgatatggactgggtcatgctgaccgggcttcccagcgccgagctgacgagcacggcggcggaggccgcccacagggtgacccagatctgccgggaatccggcacgatggtgccgcgctgcaatgcggctgctcccttgggcatgccggtgagcacgccggccaggaacgtcgcggcgacgattgcggtgatggcggcgctgtgcgtggcagttcccaaatcgactcccatggcggtgccgaacaggacgatcatcttctgcccgtcattgctgccataggcgatgcaggtgagcaggaatccgaggaagaccatggtggtcgaggactgcggggttctggattggaacagcaggtagatggtgcgggagacggcgaacgccaccagaggcgaaagtatcgctatcccgaggacgcgcagcaccagatgccattggggatgtccgccggcgaagccggctccggaggatgctccgaccagggcgagcgtgatcgaggtgggcacgccgcctccgttgagcgccagcagggtggccgatgcggcgacgagcaccgtcgccagcaggagcggactttgtccgccggatccttcggaggagaccatggcgacgatggttcctccgactcggctgttggcggccggcagcaaggccaccgccgtcgccagcatcaggaagggggccgccgtgacgcggcgcgcggccttgaggttgatggccaccaggggagacccgtcgttccttcctccaagcaggcagaacaccaatgccaacatgggaataacccacatatctccccctccttgctgagaacgctcccaatactgtaattattgagtttataaatattagcactgaattcagcgaacgttcatctttagcctgaaatggctgtatatcgtcgattagactttcttatgtcgaaaggatatactatgaatcactgggagcgctccgaagatggagtgacccccccatacaacaacggatatagatagcagcaaatcagcaactcgatacgccgcgtccgtcatcggaacggctgcggctcacaaccaaaagacgtaaaagggtattacccatggctctcggcaaggcaatgccggagccggagaaagaaaggaagcgcgagatggcgtcatcaacccatttgtcgcaatccccgcacggcgccaagacgcacggcggacgcacggcgaacgttctcgttgcgaagaatcgcctgaccggtgcggtcatgctggttccggcattggcattgctggtcgtgttcgtgttcggcccgctggtgcgcgtggtgatgatgagcatgcagggcacggacatcttcggttcgccctcaggcttcatcgggctggagaactacaggacggtcttcacggacccggcgtttgtcaaggtgcttatccagacgttcctctacgccgtgctggtcgtggcggggcgcatcgccttgggcgtgctgctggcgattctgctgacgaggcacatcatgggcatcaagatactgcgtgtggccatgacctcgatcgtcagcgtctcggtggcggccgcatcgctgggcttcctggcgttgttcggttcgagcggcgtgatcaattcgatcatcgagaaactgggcatccggccggtcgggttcctcaccgacgcgaagtgggcgttcttcacggtcaccttggtgaccatctggaccggtctcggattcgcgctgatcctgttgtgcgccgcgatcgacggtgtggaccaggagatcctggaggccgcgcgcatcgacggcgcgaacgaagcccgcatccagtggtccatcgtgctgccgctgatcacaccgacgctgttctacatcgccgtgaccacatgcatcgaggccctgcaggcgttcgcccagatcaacatcctgaccaagggcggaccaggccaggcgaccacgaccatcacctacaacatctacaccaccgcgttcaacgcgggcagcgcgaatttcggcatcgcgtccgcactgggcatcgtgctgttcctgttcgtgttcgtcctgacattgctgcagttccgcttcctggaaggcaaggtgaactactgatgatccgcaagacctcccccgtgagccagggcctgtgggccgtgctggccctgatcgtgaccgtgctggtcatgctgccggttctgtacatctacgtcggcgcgttcttcttcgacgccaacggcctgttcaagggcttcaccctgggcaatttcatgcgcgccatgtcccagatgcccctgacccagcagctgggcaacagcatcgttgtgaccgtctgccagaccgcgggccagattgtcaccgcgttcctcgcggcctacgcgatcgtgttctgcaacctgaggcgcccgggcatgtggatgatggtgttcctcatgagcatgatggtccccggcgagaccacgctcctgtcgaactatctgaacatcgccaactggggcctcatggacacgattccggcgatcttcctgccgttcctcgtgcagggcttcaccgtgttcctgttccgccaggcgttccgctccttccccaaggagctgcgcgaggcctccctgatcgacggcgccggccacctgaggttcatggtcgacgtgctcctgcccatcgtcaagcccaccatcatcgccgcgaccatcaacgccatggtcgccgcctggaacggctacttctggcccctgctcgtgaccaacaagcccgagcaccgcaccatccaggtcggcatcacccagctgagcggcactgacggctccaacatcggcgtggtcctcgccggagcggccatcgcggtcatcccggccatgatcctcacgctcatgttcaacaagtccctgcgcggcatgagcgtcgcgggcagcatcaagtaaccccctggccgcggccgtccacgcgacggccgcggatcgtgggccgatccccatctgtacgacacaagaaaaaccaacaaaaccattttttccggccggcggccgtcgaaggccgtccggcgcaacgagaaaggaaacctatcatgaggaagtcaaccctgctgaaggcggtcgccgtcgcggtcctgcccatgctcgccctgtccgcatgcggatccacgtcggacaccaacgccgacgccaagggcggcgagcagaccgtcacgttctggtactcgaactccggtccggccgtggacgccatcaaccagctcgtctccgagttcaacgacgcccacaagggcaagatcaaggtcgaggcctcctaccagggctcctattctgacgtgcagcagaagttctccgccgccgtccaggccaagtccaccccgtcgatcctgcagatgaacgacacgtccaccggctacatgatcgacagcaagatgaccaccccggtctacaagctcgccaagggcgactccgatttcgacaccgccgacctgcagcccgtggccctcaagtactacagcgacgacaacggcctgctgtccctgccgttcgccatcagccagcccgtgacctacatcaacaacaagctcgcccaggaggccggcctggacgtgtccaacccgccgaccacgttcgacgaggtcgtggactgggccaacaccatccacgagaagaccggcgcgtacggcttctcgatgaacatggtcgactcgtggattctggagatgctctccgccagccacggcgaactcatcgccaccccggacaacggccgcggcggcaaggacgtcaccggtgtgaacatgacctccaagactcagctcgacatgttccagaagatcgttgacatgttcaaggacggcaccgccctgaaccccggcaccgactctagctccatgatgaccgcgttcacctccgacaagctcggcctggtcctgacctcctccgcctcctacacgtccctgctgcccggcgactccacctcgaacgtgaccgtcgcccagttcccgcatgacgcctcgaacaagaaggccggcaccccgatcggcggcaactccctgtggatcgtggccgccgagcactccgaggccgagcagaaggccacctgggaattcggcaagtacatgatggccccgcacgcccaggccgtgttcgccaaggcctccggcaacctgttcgccaacaccaaggccgccgacgagaccgaaggcaaggaggccctggccgacccgaacgtcaaggtcttctacgagcagctcgaggccaacccgtccaccagcgtgtccctgggtgcccgcaccggcgcctacccgtccatccgcaaggacgtgatggcctccttcaacgaggtcgtcagcggctccaaggacctcaagaccgccatgcaggaggcccagacccagtccgctaaggacatcgccacctacaacaaggccgcaggcaagtaaacacccgcgatacccgcaacccaatcggccttcccgccccggtcttctctcccggggcgggaaggcccgtatcacccatagcctcccggcagcagcaaaggagccgacatgaacaccgcagccacccccattcgattcggacgcgaacaatacgcgcagatcaacgccaatctcaaccaggcatgcgcccgctcgccgttcgtcatcgccgcccaccgcggcaccccgcgcggcgacattcgcgagaacacgctcaacagcgtcctcgccaccaagcaagtcaacgcagacatcgccgagatcgacgtaatccgctccaccgacggcgaatacttcgcgttccacgacggcactgaaatggcccgtctacgcatcaccgacgacatcctgtccaagactgccgccgaactcgacgaactgcgctacaccgaataccccggagcctactacggcaacgtcgaacgggtcgcgcacatcctgtccaacgcgcccgacatcctcatcaacatcgaccgctcctggcgctactggggcagcggattcctcgactggctcgaccagttccacctggaaagcaagctcatcctcaaatgccccgtcaccggaggcttccagcaggccctccacgaccacgacgtcaaatacatgttcatgggcatgatccagaacccagacgaactcgatctgttcgtcgacgacgagcagatcaacaccgtcggcgtggaactcgtcgccaccaccgaggacaccccgctcgccgaccccgcgatcttcaacaggatcaacgaactcggcctgtacacgttcgtcaacgccctcgacctgggcaacggatactgcggcctcaagggcatggacgacacccgttccatcctcgaaggcccccaggcaggctggggcgccctcctcgccctcggcgccgacgtcatccagaccgactggcccgagaaactcgacgagtatcgccgggtcatcgcctgattccggcggttctccgcgatttcccctcagcggctcctctgcgtttccggaccagcctgaaacggcgcccgttctgggctggtccggaaacgcagaggccgctgccttcgccgcgacaacgaacgaaagaaggtgccacaatgccgtggttcagcgtcaagaacgcgctcgcagaggatcccgtcatggggctgctccgggaacaggtgacgacaacccgcaaaggagtgtccatcgcgttggacgccgtcgaggggcatctgagcgtcgatgaatccagaaagagcgtcaacgatatcgagcacgagggggacgaggtccgttccaaggtcgttcacgcgttggccaaggcctggaccacgccgttggaccgtgaggatttgttccgtttctcccgatccatcgacgacgtgctcgacaacacccgcgatttcatacgcgagatccatctttggaaaggacatgccggcgaacacgccaatgtcgcgttgacccacgtgaacgtcgccctgcacgatctggaactcgccgtgaccgcggaaggcgccgacatgcgccgatactgcctcgaggccagcaaggaatccgcccgcgtgcggcgcgcctacgaatcggggcttgcagccgtctacaccggcgaaatgagcatggacaccctgaaaacccgagatctgctgcgccgcgtcgacgtcataggcctgaggcttggggagtcctccgacgccatcctcgacgggctcgtcaaacgcgggctgtgactcaccggaataccgcaaagggaaaggcgcgaatatgcgcaggaaactgattcttgatttggatacgggcatcgacgacgcgctggcgatcggatccatcttctcgcgtcacagacagtgggccatatacaacggcagcttgatgcgttctccatccacttcgagttggcggggatgcagaacgtattccttgcccaatcgttgggcataccttttgcggaatttgtcgagcgaagatacgccgtatcgtttcgtggatttcacttcaatcgggctgatgcgaggcttcatcgcggcattatcgtattcccgaacgatgaggaagtctatttccatggttttcgtggcatccgccctatccgagcgcgagaagaaatacagtttgcgcccattcgcccggaattgctgagccaccgcattctccaccagcattccttcgttgagcgagagtttatcgaacagaatatcccggtacacatcatccggcgttgtctctcgatcggcaaacgcctgcgacaccagcaaaccggtatccgccatatagcatttgaacgaattattatcttcgtacaatcccagtcccaccaaagggtcagtcgaattacggcacaaattcaccaagcgggcgtcttccaaccagaagaacgccgaatcgtattcacgagatcgagcccccttatcgaccgatgccagagtgaatcgtttctcatgcttggacagctgccctggaatctgagcgaaaatgccccgcacgcggccggcatcgccattggcgaacttgccgatatcatcactgtacagctgcaggatgccacgcttgatcaaatccacctcgccaaaatcgcgctgctcgacataatcggcaaccgcctgcggcataccgcccaccagcagatattcgcgccacagcctcatcgctcgtttgtgcagcgcatcgggcaacgggaccagacgctcgaacgatttgcgaatcgtttcagcaagcagctcctcccccatggcccagcagaactcctcaaaatcgagtggccccatgtccattttccgttcctcggaggggatgacgatattcgccacattcctcttgatggagatcagcgaaccagtttccacatagtcataccggccatccgcaaccagatatttgatgagctccctcgccgccggataccgctgcacctcgtcgaaaataatcaacgattcacgctc

SEQ ID NO: 3742 - DNA, 8569 bp, Unknown
  R150_10m  MAG No. k141_15331
gtaccgggacaggcggatcaagacggagttcggcatgagcatcatggatcgtcgacgcgagctcggtcttgtggcatgattggtggtgatggaatcaacgacgagtccaacaaaacggcaccagcccctgctcattatggagaaaagggttacttcgatatatatgattatgcttggcatactgagcaagtttgtaaagaaccagtgccgcctaatcttctgtaggattccagtactggtagggtatggataaattattagatgagtaattcgttaaagctcgtttctgctcctgtgcgcgaaagcaggttgtgggatatcccaggttacgtgccatggttcacggcggacagcgcgacggccatcggcgtggccctgcggtatctggcggtctctctgatcggatacaagctcaccggatcgaccacagcagcgggttggttgggctcgctggccgcgatcgcacagcaggcggccgccgtgttcggcgggacattcgccgaccgtcacgatcgcaagacactgatcatcgtgaacgcgacagcgggcgtcatctgttgggggtcagtcgctgcgctgctcatggccggcaagctggtcttccccgtgctgcttgccatcgcggtgttcgagtctgcggtcaacgggtttctcggccccgcctcggatgcgatgctcaaatccatcgtcgatattcgctcatatccgaaagcgcgcagtctcaacgaaggccgtgacgcgaccatcaacatggccggcagcccagtcggcggcctgctgtacggcatcgccccgtggttgccgttcctgtcggctgcggtcatgtacctgctggcaggcgtggctgcgacacgtatccgagtcggcggaaatccgcggaacggcagcgatagcggcaacggcgatagcgacgatgacggtgggaaagcgggcggcgcgtcatttttccgtgatttcgccgaaggatggtcgtggtcgctgcaccgcaggatgctggtgttgacgatggtgtcgtccgcgctggcgaatttcggggtcaatggcttccagtatgcgattcagctgcatctgatgcgcaccggcgtgaacgcgacgctcatcggattcgtgaatacgggcgtattcctcgcgatgctggcgggtgcgttcatcgccggacggatcagcgataccgcaccggtcgggccggtgacatgctgcggattcgtgttcatctgcatcgcttcgctgccgatgctgctgaccgacaactactgggtgctgcttatcgccaacgccgtgatgtgcctgccgttcccgatcatcaacgcgttgcagctcgggttcattttcggtaagacgcccaacacgatgcaggggcgtatcaccgtgacgcttaccgtaccggcccaggcactgtccgcgttctgctcagcgacggccggaagtctgctgcccgctttcggattcagcgggactatgctggtgttctgggcggtgatgctcgtcagtatgctgctaatcgtcagttcgcgcagcctgcgcaccattccacgcgccgaccagtgggatcgcacaccgctggagtagccgcggacggccaccaaccatggggactatgcaccgctgcgcgctgctctccgcacacgtcttccattccgcaaaccggctgcgctgacaggacgatgagtgcggtcagtttgcggcagtcagtttgggaagaactcaaaatctcgattcagcaggctcaaatcacgagttttcagattgtggtctggaaaactcggtggaagaggctgatcccgggagaaattgagaaatccggatgtccgtttgcgcgaccgattctatgaaaacttccggatgcgcgcgggagtttagcgcgaaacatgaatccggcgaagttctcccgggaacggcttcaaggtcgatttttgagaatcgcggaattccaacgtttttgttgagagattatgcatgagagtaccggattctcgtaaactcccgcgtccggcacgggagttcagcggcgaattcccgaagtcagcgtaaactcccgcagaatctgggagattatggcccgacgaggtctaccagaacgaactcccagattggccgccgttcagccagacgaaaacgacccagcaccggcggaatcgaacaaacaagcgccacaaccaccatcaagcagtcggcaacgtcattatgagctgataggaaccaaccttcttgtccgtcatcccagtaaacgttgcgttagttgacatgtcagggtattattctcgaatagtgtgtaaacacactattcacgtatacctctggcgtgtccggcgatgggatgcccgcggcggatatcggacacgatcttcccgatccggtcctgttcccggaccacgcagtccgcgaccatgcacgccaggggaaccggattgccgtacgcctgccactgctcgagccgtccggcgtaggtgctgccggcatcatgcctgatggcgatgggctcgtaccccgcctgcatgagcatcatgttgaggatctggcgtccggtacgcccgttgtcgtcggcgaacgggtggatgttctcgagtgcctccgcggaggcgcgctccgacgggggtaccatcatcggaaagtccgccggaagcggcggacttttccatatccgcctccgcatcgtccgaaacgcccattctcctcatcagagaatcatcaagaagttgttccgtgcttactttcaagaatcttgatgcattaaccaggtcgtatacagaccagcctgttttccccgacatctttagggacatggccgaacggccaattcccatcgcttcggccaagctggactgcgaataaccataagccgtcaatagcattttgacattgaaggtgattgtcgactccagctgcttttgataacgcccggtttgttgcgcactttggttgaggtctgaatgaagggacatggtccgtcgccggggtacgatttcagtcgccaaacataaaaccgctatggaaagaggcgacgaaccatgtcgaaccagattctacaggtcgacgagaacatgctcgagacgaagctggaccgtctcgtgtcccggaagggcgaggagctgttgaacgcgatgctggacgcggaggccgacgagatcaccggggccgcgagatacgagcgtgcgtccggtcggagggcctaccgtgcgggccactacgagcggaacctgaccgtgaaggccgggacgatgacgctcagggtgccgaagctgaagggcgcggtcttcgagtcggcggtcatcgaacgctaccggcgtcgcgagcagagcgtcgaggaggcgctgatcgacatgtacctggccggcgtcagcacgcgtcaggtcgacgacatcagccgcctgctgtggggcgagcggatgccctcccagacgctctccgacaagctcaagcgcgtgtacgaggacatcgatcaatggcggaaccatcccctggcggcccattcgtacccgtacctgttcgtggacggcgtgtggcacaagcgcacgtggggcgggtcggtcgagaacgtgagcgtgctggtcgccatcggcgtggacgacaccggccaccgtgaggtcgtcggcgtcgcggagggcatgaaggaggacaaggccagctgggagcagttcgtcaggagcatgatcgaacgcggtctcaggggcgtgcggctcgtggtcggcgaccggtgcgccgggctcgtctccaccgtgaactcgatgctgccggacgcgcgctaccagcggtgcatggtccacttcatgcgcaacgtcctgtccaaggtcagccacaagcacgcggcatgggccgcgtccgccctgaaggccgtgttcgccatggaaagccggcaggccgcgttggagaaggccgaacaggtcgccaccgaaatggagtccaaggggctgaaggccgccgcctcctgcctcagggaaggcatcagcgagaccacgacctacctgctcgacgactatcccgtcgagcatcggcggcggatccgcacgaacaacaggatcgaacggctcaaccgcgagatccgccggcgcaccagagtggtcggcagcttcccggacggcaggagcgcgctcatgctcgtctgcgccaggatccgctacgtcaccgccaaccaatggagcgcacgccgctacctggacatgtcccggctcgacggcatcatgcaatcaaccgactgaagttgtcctcccggcaacgggccgaaccgcttttgcgcaagaattcgggcgttatcttcggtatttcggtttttaggtaaaacggtttcccggttttcaccggttccggtatcccgctccagcaggatcttcctgagcctttccacctcgtcccggagcttgccgatctgatgctccttctgggcgatgacggtgcggtggcgtgcctgacgtgtcatgcgtggcatctggcgaaaggattgcgactggaatgaaggactttaggagcggaatcaggtgcggctccgtctaagggccgtcggttttgctagaatctaaagagaaaaggaggtgcaatgttcggaacgatatctgaatccgagatgcgccgccgcacggagaacgtcggactgtcggtgcagtccgtgcggctggaaggcggtgacgtgacgagggccttcatacgcgatgccggagaatatgcgcgggggagcatcggcagcgccgagcttctttcccgcacccgtcgccgttacggattggagtgacgatggagcgtgtcttcgatccctacctgattccaggaacgaacgtgctgcggaactttgtgggcgccacggacgaggatgcgttggcggctgcggagaacgatctctgctccgcccgtgccgccattctgagagaggatctccctcctgcggaggggacgctggaacagcttcgccgcatacaccggttcctctttcaggacgtgtacgactgggcgggggagatacgaaccatcgacatgggcaagggcgagggacttcccttccagccattggagctgttcagcatgggggttcgctactccgaggaggtgcttcgcgccgacgatcttctcaagggtctcggccatgacgaattcgtaaagcgtctgagcgtcagctacaacaacttcaacatccttcacccgttccgtgagggcaacggacggacgcaacgcattttctgggagatcatcgcgcgcgaggccggctggcatttcgactggggactcatcgacaaaaggacgaacgatcaagcctcgatcgcggggatgcagcgaaacgatctgcgtcctctcgaggatatgttcagaagaatcgtcaagccgttgtcagaaccgttaaccatgtcgaatgatctggcccatcttggtgaatatgcgcaaccggcgaacaaggcatacgacatgtctcccgcacagagacaacatgtgtgcgagcattactcctatcagcgtgccatcgttcctccagggcaggaaaagccgaaactcaggcacaggtcgagatgattttcggataacgcctcacgtatctaagtgttgcgacggcagatgccgcaacgcttagatgcgtgggcctgttccgtttgatgccggtctccaccggttttggtttttcattatttcggtttttcggtttttcggttttgggtatgcttatccggactggctccgcccgtctccgtcgtcttcgagctcttccagtcttcttcggagtccggcgacggtctgtcgcagctggtcgatttcctcttccttctgggctatctgcgccttgatgccggccggatccccggcggggagatattcgagcgccagtcgttcggcgacgtcgcgcctgtgtctcggcaccacgcgttggtagcatcggacggccacgtcgacgtccacatggccgagctcgtccatggtctcgcgcagtgtgccgccctggatcatgaacatcgtcgcgtgtgtcgcgcgcagggagtggaacgtcacgtcctcgcggttgattcttttcctcgcggtgcggaactgccgttggatcgtcgtcgggttcaggacccgttccgggtgcctgatcgcgtggaagagcatcgtgtcgggatccctgtcgggacagaacctgtcgatatgttccctgatgagacggcagaccggtgcggggatgggtacgactcggtggctttccggggtcttcgtctcgtcgagccggtattcgcccagatcgtccggaccttgcgtcacggaatgccgcacgtacagcagtctgtggtcgaggtcgatgtccctgagttgcagtccgcagacctctccgatgcgcagcccgcccaccagcagcgcgagatggatcgacaggcggtagtattccgggaagccctcgaccagcgtgtcgatctcctgcctggtcatcggcgcctgctcgcgtcttttggacggtctcttcctcgtgacgagattgcatggattcgaggacaatagcggcggacctccgtccggctgccgctcggtcgcggccctcatcaggcgcttgagcagccagaccgcgtgctcgagcgcggagggacgcacctcgtcgcatgccttcgcgtaccattcgttgacgaattcctcggtgatgtcgcacatgggcgtctcgccgaaccaggggagcagtttgtccaacgccgccttctggatccgcttgcttctgccgctcagctccgacccgtccttcttccgcaggttggcgacgaaacgcgtcgcgtatgaggagaacaggaccctgccgtgcatcgtccttgcagacgggtgcgtccacctgcggattccctttttatggtcgatgacgagcgcgtgctcctcgtcgagccagcggtacgcctcggtctggaattccaatccgaatcggcggtagattctttgcctgggattgacgggactctggtatcgggcctgccaggagacgatccttccgtccgcgtccttgcaggcgacgacgcatccccatttccgtcttttcctgtctccattggacatcggttgttttgtctttctctacttcttgaaaaaccattagaagaaagagtaattgcctacgccggtgattttgaataaggtgctatccttcgaccgtggggattctatctttcgggaaaatcgggattgttcagggctcttggagtggttttgactggaatttcaacaatcttcagtgatctgtttcctgatgtcacatcccaaagaagaagcatcatgcgcatgtcaccttcggaggtgcgcatgatgatggtagtcatggctccaagtgtctcatgtgcttgagaccgggcggtgggtgcatgagctatgctccttgtgggacctgcccggttgtgaggactactctcgggagagacatgatgttcggagcggttatttccagttgaatgtgtagctttggtccggctgttcctcgccatgggtggtgacggtcgggatgttgccgtgccaggtgacggtgaagttgcccgagcctaatgatttgccgtcgttgtgcagatccgttttgatttccgtgacgttctcggaaccgataacaccgggatcggtgtcccaagagactttgaccgtgatgctgcttggaccgaagaatatgggcgagccgagttcgctgatggtcacttcgcaggtgccgtcagcggatttcgtgttcacgatgcgatgcgacatatccgtttgcatccatatgagagtgcagcctccagcccagatcagcgcgattgcgagaatgatatgctcaacgatgtgtgccgctttatgtgagtatccttcggtcataaattcccacgctcgtgtcatcatgccatagccttcaaccggagccttttcatcggtcgttgaaaagatggttggcgatatcgccccgaccgccgaagccggacggcacgtcacccaaagagttcttagcgaagtcgaacaatcccatggtcatgcctctttacctttgggaaaccaatatgactaccgtatcagttgtcggcgtcatcgccgaggcttgcgatttgcggaagtggcccatatccatgcatcgcgtcatgaaacgggacgccgtctcgcgcgtaattcgtgcctgtagaatctttaaagaccaagtttggagggagcggaatcatgccacgcaagctgatcatgtgcggggaccatccggtccttgcgttcgaatacgatcccgagtccggtcgcgcgtgctcctctggcgaggtccttgaccatgattgtctgcccctggagttcaccacgcacggcaagagcgcgctgtatgccaggaggatcgacgaatggtggaggtcccgcgccatcccctccacccgcgacggcatccgccgcgtgctcgaatcgcttggcgcggcatcgaccgacgaactgctcgacaggacctacggactgagcctgtcggaccagtactgggtcagacgcgaggacgacccggccgaatggaaggacgtcaacttcttcgacaattccttcgacgaggcgctgggcgagatcctgctcacctcgtactcgtcgtcccatgacatcagcctcaacgtccccgacgtgtccactggcggcgatcttcccaaacgctggacgatcgaca

SEQ ID NO: 3743 - DNA, 7137 bp, Unknown
  R150_10m  MAG No. k141_15438
caatccaccctcagtgggtctttgcggggttgagtgcggcgtgcgtatacggactgcagcacaactattccctgcacgacggcacagtgcacatcgcctcgaagtccggcatcggcggcgaatcattgatgcgtggccagatcgccgaattgtctttcggcattcccctgctgcaggtgcagttcatgaatcccgacaatcccgcaatgccatatcgcgtcgatttctgttggaagctcgcagacggccgcatcatcgtggcagaatacgacggcatggccaaatacgccgacaccagcaacaagaatcgcgcaagcctccaggcgaaaatggagtacgaccgcagacgtgatcggcatctccgggaacagggcgtcaccgaaatcgtccatgtgttctatgaggatctgctacgccccatcaatcttgagaccaagctgctcaaggccggtgtgcccaaaatccggtgaagataggccccatttcgtgaaaaccgtacgcccagaacgactcagtgtacgttcttcacgagatgagaccccatttcgtgaagaccgtacgcttacgacgactcagcgtacgatttccgcgacatgaggccatttcgtgaaaaccatgcgcccagaacaagaccgtcagaaagtcgactagacagcctcttaactaccgaacggtatctatagaacggcgatattccgccagaaacgccgagagcggaatagtccccttgcgtttgtcatcggactgcgttattctgaaaccggtttcagaaagaaaccgataaacaaaactcaaagccacaaggttttgaccaacgaaaggaaacatgatgtctctcaaggattccatgattcgcggtctggctatgtacggtgccacttccctggcccagtccggtcacgccaactcccagatgattctcgacatcatcaacgacaccgataagaacgctcgctgagcctcttccctgactcgccgctcacacacggcccgtctcataacgtaaacaacaacacatcgcaaagcccacggctttgcaagtcaagacaaggaacacattatgtcattcatggattccatgattcgcggtttcaccctctccggtatggacgccatcgcccgcgccggctacgccgactccaagatgttcgccgacatcatcaacgccgccaacaaggacgctcgctgaatctagcgaacgatcccattcatgagattgcacgacacatacgaaggcaatcccccgcaggccgcaatcggccggcacaccacaataattgaataacgcaataattcaacacagtaataactgaacaataaccgggacaacggggtccatatattctttcttttcccatcgtgtgtacgccgtgccagcacaggttcacatacgatgcacacggccaccaatacacgatgcgtcatcatcaacgccctcaccgcatcatgagatactccccccgcccgttgtccacactgttgcctctacaatgcctgtgatgcacgccgaacggcatcccgcgcagtgactgaagaacgaaaacaccaagggacggaaatggataacgaactcttcgaaaaggcgtcgattccgaaggcgtatttctcgctgtcgatgcccgtggtgctcagcatgctggtcaccttggtgtacagcatggtgcgcatatcttcctttccgaattgtgtggctccctctgacgagggagctgtcagcgcagctgactgagggagagaagcagacgaatgactgtatcggctgaaagccgatgccattttttgcggctgcgccataagtctccccctcagtcacggctttgccgcggcagctcgtcccgcaattatggagccttcggctgggttgactgtcgtcaagccctcgcctggaaacgcctccggcgtttccttcacggctcggcccatcagagggagcttgtgaagccgcttcagttgtagggttcgtacgatttgttcggtggtgcgggtcacgttggcggccgcgtcggccagcagttcgctgaggctggcggcaccgggggcgatgccgaataccgcgtcgatgccgacctcatgcagttcgtcgatgcccgtgccgatgtgtccggcgacggcgatcacgggcttgccgtggcgcttggcggtttcggccacgccggccggggttttgccgaacttggtctggaagtcgatggagccttcgccggtgaacaccacgtcagcccattgcgcggccgcatcaagtccggattgttcgatgacgatggcgatgcccggacggaattcggcgtcaaggaagcctttcagcgcggcgccgataccgccggcggcgcccgcgcccggcacgtcgttcacagcgacgccgagccggctttcgatgacctgcgcgaagtgtgccaacgcggcgtccagtgtggcgacgtcagcctgggaggcacctttctgcggtccgaacacggcgctggcgccggtgggaccggtcagcgggttggtcacgtcgcaggcggcggtgatggagacgttcttgagagccgggtccatcgtgctgatgtcgatggtggccagatcagcgagggccgctcccccgtgcttaaggtcgttgccgttcccatccagaagacgaacgccgagggcctgcagaagtccggcaccggcgtcgttggtggcgctgccgccgagcccgacgatgatgcgcttggctccggaacggacggcggcgagtatgagttcgccggtgccgtaggaggaggcaatcaacgggttgcgttttttggcttcaagcagtgcgaggccgctggcttcggctgtctcgaccacggcggtcgtgccgtcggcgagcaggccgaagtggccttcgacaggtcggccgagcgggtcgtggaccggcacggcgtgcatcgatccgccagtggcgtcgacaagcgcacgtgcggtgccttcaccgccgtcggccatggggaggcaacggacctcggcatcgtggtcggcattctcaatcccctgagccatcgcctgggccgcctccatggcggtcaggctctctttgaaggagtcaggggcacataagtatcgcgtcatgcttcgagcataccgcacgacacgcggaacggtaaacgctttccgtaattcgcgtgattatttttgttcaaaattcaggctttccaatccacaatgctactattgcaagcaaaactgcgatatcattgcggtaagcgtttagacatgttttccgtttcagggaagaaaaggaccgattcgatcgtggctgtacagaacgataaggcgcaatcgccagcgacattgatggacgtcgccaaagaagcccaggtctccatcgccaccgcatcccgtgtgctcaacggcagcacccgcaaggtacgcaaccaatcgtatgtcaaggtgatggaagcagccaccaagctcaactatcgtcccaacgcctatgctcaggcagtggccaaaggcactgcaccgaacatcgtgctgctagtctccgatatctccgatccctacttcgcatccgtgtcgcaaggcgtggtcaaggcggcggccgaacgcggcatctccgtgaccatcggcgtggcagccaccccgcacgaggagttggaggcggtgcgtaagtccgtatccaccaggccgcgcggcatcatcatctccgaaagcgaatacaccgacgcgccggaacgccaggcgttgcagacggaactcatccagtacgaatcgtccggcggacatgccgtgttcgtactcaaccgcaacctgcccttcccggccgtggacgtggcgaacgacgtcggcgcgcgtgccatcgcaaagcttatcgtcgattccgggtatacgcgccctgcgattctcaagggcgatgacgcacaccgctcctccaaagaacgactggccggtgtgatggaagtgttggacgaggcaggcatcaccgtggacccgaaagccgtggcgaacggtaagttcagccgcaccgacggctatgcggccgtcatgcaaatggcccgatccggactgctgaagccgggcgaaggcgcactgtacgacggcaaaggcatcgattcaatcatcgcgctcaacgacgtgatggccatcggtgcgatgaccgcgttgcgcgccaacggcatcgagccgggtcaggaaatcggcgtcaccggtttcggcgacatcccctactccgccgacgtgttcccaccactgaccaccgtgcatctgccgctggccgaaatgggccaggccgccgtggacagcatcctgtccaaccgcgatgacgcggaggccaccggcggcactgccaaccgcctgatctacgtgcaaagcgccccggacgtagtcctacgcggttccctcccccgccggtaaaacaaaaaagctccctctgacggtgtaaccacaactagcgaacgggtaatggcgactgccgcgcaccataccaccgactcatacaccgacgtaatcgaagaactgttcgattaccgagtcattgagcaaccggccacgacgagtgggcaccactcgatgattatcggatacggtaatcaggccttcgctgatcatgggggcgagttggtcaaccgaaacggttcggagagtctggggcgtgctgctcatacctgcatcgttgatggcgcggttgatgcggtcgaggccaaggccctcatgcaggcgcagcccgagcatgatgagctcttcgaggttttcctcgggagtgatcgtctcgctatcggcccacggcacacggttctcgttgatggccgtgccccacaaacgcgggtgcgcgatgtcccagctgcgcagaccgtgtgagacagaaaccacccccagtccggcatccgccggacagcccccgccagcgggggcatgaatttcttgggagttgttcccatgcgcgttgatcatacctagttcggcgttggtttctccaagttcggcgttggcctgtccatcagctgaggcagaggcaatggcttcggacttgcccccgctggcgggggctgtcagcgaagccgactgggggtggtcagcctcggtcaccgcgttgtagtgggagtgggcacctggccctagaccggcccaatcgacgttgcgccaatagccgaggttgtgctggctctcgtatccggggcgggcccagttggagacctcataccattcgaggccggcggcggcgaacaggtcgtcggcgatttcgtatttggctgcttcgtcatcgtcattgggtttgggcagagtgccggccgcgatttgacgacccattttcgtggtgggttccacggtcagtgcgtaggcggagatgtggttcacgccgaggtcgatggcggtcgtgaccgaggtgcgccaatcgtcaaggctctcccccggtgcgccgtaaatcagatccacgctggagcgcaggccggccttattggcggcattaacgcctgcggccacgttggccggcgtatgcgtgcggtcgagggttttgagcacgtgcggcacggcagattgcatgccgaaggaaacgcgggtgaagccgccggcagcgagctcattgatgtaatattcgttgaccgtgtccgggttggcttcggtggtgatttcggcgtcgggcgcgatgctccagatcttgcggatggcatcgagcatggcgaccagatcgcgggcggcgagaatcgtgggtgtaccacccccgaagaacacggtggagaccggtggctcctcgatgccgtggtcgagctgccactgcttggtcagggccatttcacgaatgaccatattggcatagttgccgcgcgaggcccccgcaccaagatccgtagccgtgtaggtgttgaagtcgcagtaaccgcagcgccgcaagcagaacgggacgtggatgtagacctcgaacactagccctcggtcttctgagcggcgcggatcttgtctttggtgtcgcggtcgttggagtcctcgccggtggacagggcggcgatgaacgcctcctgcggtacctccacatggccgagcatcttcatacgcttcttgccggccttctgcttttcgagcagcttacgcttacgggtgatgtcgccgccatagcacttggcgagcacgtccttgcgcaacgcacgaatgttctcacgcgcgatgatacgcgaaccgattgcggcctgaatcggaatctcaaactgttggcgaggaatcagactacgcaatttcttggtcatcatcacaccgtacgaatacgccttatcgcggtgaacgatggcactgaacgcatcgaccttctcgccctgaataaggatgtccaccttgaccaaatcggcggactgctcgccatcctcatggtaatcgagggaagcgtagcccttggtgcgggacttgagctggtcgaagaagtcgaacacgatttcggccagtggaatgcggtagtgcatctcgacacgatcggtggaaatgtactccatcgtgcccataatgccgcggtggtcctggcacagatccatcaccgcaccgataaattccttgggtgtgatgatgtcggcggcaaccatcggctcgacgatcttcttgatcttgccgtccgggaattcgctcgggttggtcacatgatgctgactgccatcctcggcggtcacgtcgtaggtgacgttcggggcggtctggatcaggtcgaggccgaactcgcgggagagtcgctcgttgacgatctccatgtgcagcagacccaggaagccgcagcggaagccgaagcccaaggccacggaggtttccggcgtgtagatcagggcggcgtcgttgagcttgagcttgtcgagtgcatcacgcagttcggggaattgcgcgttgtcgatcgggaacaaaccggcgtagaccatcggcttggggtcgcggtagccgggcagcggctcggtggccgggcggacggccgaggtcagggtgtcgcccaccttggactgactcacatctttcgcaccggtgatgatgtagccgacctcaccggcaccgagtgccttggtacgggtcatatcggggctgatcacaccgatctcgatgggatcgtgggtcatgccaatgcccatcatgtggaccttttcgcggtcgtgcagttcgccgtcctccatacggatgtaggtgacgatgccgcggtagggatcgtagacggagtcgaagatcagc

SEQ ID NO: 3744 - DNA, 4600 bp, Unknown
  R150_10m  MAG No. k141_15722
ctcaacgaaatcaagaacgcggacggccagatcatcaccttcatcgacgagattcacaccatcgtcggcgcgggtgcggccgaaggctcgatggacgccggcaatatgctgaagcctatgctggcccgtggcgagctgcgcctgatcggcgcgaccacgctggacgagtaccgcgagaacatcgaaaaggatccggcattggaacgccgtttccaacaggtgttcgtgggcgagccgagcgtggaagacaccatcgccatcctgcgtggcctgaagcagcgttacgaggcgcaccacaaggtgacaatcggcgatgacgcgctggttgccgccgcgaccctctcgaaccgttatattccgggccgtcagctgccggacaaggccatcgacctggtcgatgaggcggctgcccacctgcgtatggagctcgactcctcgcctgaggagatcgatgaactgcagcgcaaggtgacccgtcttgaaatggaggaaatgcagctcaagaaggctgaggatcctgcatccaaggagcgtctgggcaagctgcaagccgaactcgcggacacccgtgagaagctcagcggcctcaaggcgcgttgggatgcggagcaggccggccacaacaaggtcggtgacctgcgtgccaagctcgatgacctgcgtgtgcaggcggacaagttcacccgtgagggaaatctggctgaggcctcgaagattctgtacggagagattccggctattcagaaggaactcgccgccgcggaaagcgcggatgccgaatctgccgatgccggcgcggccaacccggccgatgagccgatggtcccggaccgtgtggacgccgactcggtggccgagatcgtctccgactggaccggcattcccgttggccgcctgatgcagggcgagaacgagaagctgctgcacatggaggactacctgggcaagcgtgtgatcggccagaaggaagccatcgccgccgtgtccgacgcggtgcgccgttcgcgtgccggcatctccgacccgaaccgtccgaccggatcgttcctgttcctcggtcccaccggtgtgggcaagaccgaactggccaaggcgctcgccgacttcctgttcgacgacgagaaggccatggtccgcatcgacatgtccgaatacatggagaaggcttcagtctcgcgcctgatcggtgcggctccgggctacgtgggctacgagcagggcggccagctgaccgaggccgtgcgccgccgcccgtattccgtggtgctgttcgacgaggtcgagaaggccaatccggagatcttcgacgtgctgctgcaggtgctcgacgatggccgcctgaccgatggccagggcaggaccgtggacttcaagaacacgatcctgatcatgacctccaacctcggctcacagttcctcgtgaacgaggacatggacgccgacgccaagaagaaggccgtgatggacgccgcccacatgaacttcaagccggagttcctgaaccgtctggacgacatcgtcatgttccacccgctcacgcgtgaggagcttggcggcatcgtggatatccaggtggctggcgtggcccagcgtctgaccgatcgccgcatcacgctggacgtcaccgactcggctcgcgaatggctggccaacaccggttacgacccggcttatggcgctcgtccgctgcgccgcctggtacagaccgaagtgggcgaccggctggcccgtatgctgctggccggcaaggtccacgacggcgacaccgtgctggtcgaccagaccggtggtgagcatcttgagctttccgcctgggccagcgaccagatcgtctccgacgacccggatgtgagcgtggacaacgtcaccgaagataagtgacaatcactggctcccctctctgagcgaagctgactgaggggagttcgggcggtttcgcaacagtgattttttctctgcaaaatctcttaaacaggtgggtatggtagcagtcatacccactttttcgtctttgtgggtctatctcgatttcgaggggctgatttgccccctttcggaggtctacttccgtttcgaggggctgctcttctgccgaaccgcgagtatcagcggctttatggcaacgccattccgccattgttgcgccgtgtctacttggctaccagccccttgaaatggaagtagacctcctgcaacatcgaaatcagccccttgaaacggaagtatctgtccgatccgtctcaattgtgttccccaagagtggaagaaccgtggcatcaaggtgttcactgtcgcatatggtaggaaagtgagtgttaacggacgaagggagagccagtgaccggacgattggcgccgacgccgtcggggcgcatgcatatcggcaacgtgtacgccatgttgggtgcatggctttcggcccgttcgcgtggcgaccgcatgctgatgcgtatcgaagacgtggacaagccgcgcgtggttgccggtgcgggccagctcatgatggacgacctgcattggctcggcctcgactgggatggcgaaccgatgttccaatcccagcacactgaacgatatgaatacgctctcgaatgcctgcgctcgcaaggtgtgctgtacccctgtttctgctcgcgtgccgacattcgcgccgcctcggcccccaacgagggcgacggcttcatggtgtaccccggcacgtgccgccgcctgctgcacgaccatcccgacgaggtccgtgcccgtctgtctcgcggcgaccagcattccatccgtatcgccatgccgaaaccggcagcgggagaaaagcaacgtacagtgcctgacgattccgctgcgctgtcgggagccgtgccgccggaacagcagggcgatgccggaatcgttgatggtgtcgcatgctttaacgaccgtgtctatagtccacagcactacgatttggcccgcgaggtaggcgattccgtgattcgccgagccgatggactgttcggctatcaactggtcgtggtcgtggatgacctcgatatggatgttgatgatatcgtgcgcggccgtgatctgctgcgctccaccgcgctgcaaatgtggattcgccagtgtctgttagctggcggctttgagccggaatgcggcaacacggaaaagcctctcgccgagcaccccgagtatgcgcacctgccgctcatcgacaatgcggccggtcggcgtttagccaagcgcgaacgttcgctggatatgggagccttgcgcgcccgcaacgtaacccccgagcaaatcatcggatactgcgcctggttgctgcgtctgcaacccactccaatcccttgcaaacccgccgatctgctggcagatttcagctgggagccgctgcgtgccaaccacctggaccgcgcgctgaagccggacgatccaaccactccacaatggctggcagaagcgttaggctagaggcagcccaacaggaaggattccaatgtcgtcgaagctctggagaaacgtggcgctggcaggcgtggccgccgccggtgctaccgtgtgggccgtggccccgcgcacgttcaatgacaagcgtcgtaatttcgtgccctccattccgaaggtatggtatgcccatcgtggcttgcacgatgcgggttctggtttggtcggctataccgatatcgctgattatggtggggataattcggtcagcgcccaagccgataccactgagcgatccatcgccgaaaacgatgattatgtgtcgcttgcccgtcgcatggctgtcaaggccggctacggcagtgcggatatgaccggtccgatcgctcctgaaaactcgctggccgcattcgccgccgcctgcgaggctggctatggcatcgaactcgacgtgcagcttacgctcgacggtcaagtggtcgtggtccatgacgccgatttgctgcgcgtggccggcgatccgcgccgcatcgaagatctgacgtacgacgaactgacccgtattccgctgttcccgaacggcaagtccggtgacttgaaggccgaaccgctgcccggtgccgacgcgaatccgccgctggtggtcacgccttccaccgcccccgctggctactaccagcatgtgccgctgttctccgacgtgctcaaagtggtggccggccgtgcgccgctgattgtggaatacaagttcagcgacaatagcgcttgggatgctcgtaccgaggagctgatggagaagggccacgccctgcttgaggattatgacggtccatacgtcatcgaatccttccacccgggcgccgtgaactggtacaaagaacatcatcctgaggtgtgccgcggccagttgagctggccggcgaagctgagcaagaatggtgcggctgaatgggccgccggcttactggcgttcgactggctgtctcgtcctgatttcgtggcctatgactggaccggtggcgcttcgccgcaagtcaggctcgctcgttcgatgggtgcgatgccggtttcatggaccgtgcgcagcagcgatgaactcgcccagtgcgcgccctacttcgaccgccacatcttcgaagcgttcgtccccgacgcagtgtgaggttgagggcgttattga

SEQ ID NO: 3745 - DNA, 7259 bp, Unknown
  R150_10m  MAG No. k141_15741
cgggcgtgtagttggtgcccttggtgttatcgctgatggcgttctcccacgagccgtcctgaatcatgtccacgatggcgttgttgattttggtggccagctgtgtgtcgcccttcttgatgcccacgccgtagtattcctgcgtgaacggtttgccgaccaccttgagcttgccgcgcgaggcggaggccaggccggccaggatgatgtcgtcggtggttaccgcgtccacgatgccggagaacagggcagtggcgcattcggcgtaaccgggctgttccataagctggacttcggaggcgaacttctccttgacggtggcggcggaggtcgaaccggtgacggagcataggcgcttgccgttcaggtcttcggggccgttgatggagttgtcgtccttgcgcacgagcagatcctgtccggccacgaagtacgggccggcgaaggagacggccttcttgcgctcgtcggtgatggagtaggtggcgaggatcatgtccacgtcgccgttctgaatcatggcctcacgctgcttggagggagcttccttccagatgatttcatcctcggagtagccgagttttttggcgatgtacttggccacgtccacgtcgaagcccacgtaggtgccggacttcttgaagcccaggccgggctggtcgaatttgatgccgatgcggatcttgccggtttcgtccgcgccgcaggcggccagcgacattgtgcaggccacggcggcgagcgcggcgatcacgcggcaaaccttccgtttgaacgtattggtgaatgtcattggattgcgtacccgtctttcagtgggttcgtcagtgggtgaggatcttcgagaggaagtccttggcacggtcggtctgcggatgctcgaagaactcgtcgggcgtgttctcttcgagaatctggccgtccgccatgaagacgatgcggtcggcggccttgcgcgcgaagcccatctcgtgagtcacgcagatcatcgtcatgccttcatgcgcgagttcgaccatcacgtcgagcacttcgttgaccatttccgggtcgagtgcggaggtgggctcgtcgaacagcatgaccttggggcgcatggcgagcgcgcgggcgatggccacacgctgctgctggccgccggagagctgggagggcatcttgctggcttgggagtcgacgcccacgcgggcgagcaggtccatggccagttgctcggcttccttcttgtccatgtgacgcaccttgatgagggccaacgtcacgttttcaagaatggttttgttggcgaacaggttgaacgactggaacaccatgccaacttcggccctgaggttcgcgagctccttgccttcctgtggcaggggcttgccgtcgatgcggatgtcgccggaatcgatggtctcgaggcgattgatggtgcggcacatcgtggacttgcctgagccggacgggcccacgaccaccagcacctcacccttggtgacggtcaggttgatgtccttcaggacgtgcaaagcaccgaagtgcttttcgacgtgggtcagttcgactagcggacggttcaggtcctctttgccgggaaccagcggggtcaatttggccttgcttggtgatgttgtgcttgtcgtgcgcgaacgcactgctgtttcattgttcgtttcagacatgagtgggaggataacacaccgacgtttccaacgtgttcacagtatgtccacacagttgctcagtcgatgtctcatttccgcatcagacatcgtgaaggcggcattgggcatcggcatacattctcgctgagtcgcgcatcgctcggcgtctgctgtgcgctgattgcctgctgcgtggcggctgagacgttgctgcgatggcagagctggcacgtgttgtcctatctgctgattccatgtttggccttggtgtcgttggtgttgttgccattcatgccgcagtcgggcgcatggctggcggtcactttgtattgtgtggggctggtctcgccgtttcccatgtcgtattcgtataaatgcgctaggcattttgagcgtggctagctgttagcacgcgatgaaggtgttatacggtggacgacactcccgaagcgcggtggataaccgggcgcggcacacgatatgccggtggataaccggttcgcgccgcttaagttatccccatttttcggttttgcccctgtgccaccgtggaatgcgctacgctcggcgcatgaacggatacagcgaagcgccgcacaatggcgaaatcaacaactatctgcgcaaagatcttgacgccaaagccacggccaagaacacggcctgttggaatctgctgggcaaagtgcgcacgaaacgcacgttgtgtttctcgctgtataccgcattggaattatgcggcgtggagttgccgaggcacagcacgttgccgcagaaggatttttatgtgacggtgaggagcaaggggacccgctcttcattggacaatgtcgactatcgcatatggaatgcaaagttcagcagtatcgctttttcaaacggcgtaacctgcatgcatcccatggatgcgtggatacagtttgcccaatatctcaacctcactgaattagtggtgctggctgaagcgctcatcagacgttatggatatgccattgaacaattcactcaacgactaacggcctttcaccgcgttattggtcgtgcgcgttgtgaggcagcgctgaagctcgtaaaaccatcggattccgttcaggaaactcgtacacgcttggcgcttatgcttttcggcctgcccataccgcaaacacaatatggcattaccgattcagagaacggatacacctacaccgttgacatggcttatccacaatacaaagtcgctattgaatatgatggcgatcatcaccgtcgcttccgcaaacaatatgtgcgggaccagcaaaaacgtcgacgtctgcggcaattgggctggaccgtcatcgaggtgttcgccgatgacctgtggaacaccgccaaacaacgtgccttcgcacaagaggttgccaccgcgatgcaaataccgcttcctggccgtcctcaaccttcatgccgggtattaatagacggcagccttaccatcaatgcgcgcaaaggggaatacaggaggcggaaacaagcaaaacacaacaaagcatcacaacattaatcaaatacggagttgcgatcgctcctcatgaggcggtaatttgcccatggggcggtttgaagaaattgtaaaaccgcggaattaagccattttgacctaccgccccatggggttttcaccgccccatgggttgtttaccgccccatgaggaagttaccgccccatggggggataatcggcaaacgccaagggggacaccgcatggtgcgaggtttgccgcatggcggaggtgccatcgggcggagtatttggcaccccttggcaggtatttggcacattgggccccacccgcaaaaagcaaatggcccttggaattattccaagggccatttgcggctaatagcaccggagcattactcctcgaaaattaatctacgcatgcggagaccgccgttcgaagccgaaggcgcactaaggtgcgtcgagtgctgaggaaaggcggtatacgctccgtagattagttttcgtcggcgtccgggtcgtagtcgacgccggtctcggcgcgctgctcgtcggagatcggggccggagcaccggtcagcgggtcgcggccgccgccggccttcgggaaggcgatgacgtcgcggatggagtcggcaccggccaggatggacacggtgcggtcccagccaagggccagacccgcgtgaggcggagcgccatacttgaatgcctcaagcaggaagccgaacttctcgtcggcctcttccttggtgatgcccagcacatcgagcacacgggcttggatgtcgtcacggtggatacgaacggaaccgccgcccatctcctcaccgttgcagacaatgtcgtaggaatcggacatggcgtgctcgggatccttgtcgaacttgtcgatccaatccttgctcggcatggtgaacgggtggtgcatggaggtccacttggagtggccgacagccacatcgtcatcatccggatcgtcggtgggcttgaacagcgggaagtccacgacccaagtgaaagcgaacttcttcggatccagcaggccttcgcgggaggcgagctccacacgcacggcacccagcagcagctgggcggactcgcgagaaccggcggcgaagaagacggcgtcgccttcctcggcaccgacggcctcgcgcaggccgttgcgctcctcatcggacaggttcttggcgacggggcccttgagttcgccgttttcgccgaagaccacgtaggcaaggcccttggcgccacgttggcgagcccaatcctgccatgcgtcgaactgacgacgcggcgtggcggcaccgcccttgaagaccacggcacccacgtacggggcctggaacacgcggaacggcgtgttcttgaagtactcggtcagttccaccagcgggttgccgaagcgcaggtccggcttgtcggagccgtacttgtccatcgcatccttccaggtgatgcgcggcagcggcagctggacctcatagccggcggacttccagatggcggcgatgaccttctcagtcatggccatcacatcttcctggtccacgtaggccatctccatatcgagctgagtgaactcgggctgacggtcggcgcggaagtcctcgtcacggtagcagcgggcgagctggtagtagcgttcgacgccggagaccatgagcagctgcttgaggagctgcggggactgcggcagggcgtaccaggaaccgggcaccagacgggccggcaccacgaagtcgcgggcgccttccggggtggacttaatgaaggtcggggtctcgacctcggtgaagtccatgtcttccagcgcgtggcgggcggccttagccatgtcggaacgcagcctcagattgtgctgcatggacgggcggcgcaggtcgaggtaacggtacttcagacgcacgtcctcgcccggcagcttgttctcggactcattctcgagagcggtggaaacctggaacggcagagcgtcggacttggcgaggatctcaatggtctcggccacaacctcgatcttgccggtggccagatgggtgttctcgttgccatccgggcgcaggcgcacttcgccggtaatctgaatcacgaattcgctgcgcagcgggcgggccatatcctcgtcgtaaatgacgacctgcacgaggccggtcgaatcacgaaggtcgatgaaggccacgccaccgtgatcacggcgtcggtcaacccaaccggcaagggtgaccttctggccgaccagggcctcggtcacttcagtggcatgatgtgttctgtaagccgtctggctcattatcttgtttctcctcgatttttcgcgcgaatacgtcagatttcgacggtttgctgggcaaccacagtatccggctcccacgacgtgcaatcggcggcaacctgctcgcccgtgacgatgttcttgacctcgtcgccagcgggctctgcaccttccgcaccttcggcagcggtggccgggaaccacacgtacggaatgccgagtttgtccgcgtacttgatctgcttgccgagcttggccgcggtgggtgccacgtcggtggcgatgccgcgcgcacgcagttggttcgcaatacggttggcggccgggcggtcctcttcattccacacagcgaccagcacggcggccgggctgacgcggttggcgtgcgcgccggcagcgtgcagcatgtagctgaccagtcggctcaggccgatggacaggcccacgcccgggtacttgcggttgccctgggaggcgagattgtcgtaacggccaccggaacagatggaaccgagtgatgcggcaccgtcgaggaaggtctcgtagacggaaccggtgtagtagtcgagaccgcgggcgatcttcaggtcggcgatgacggaaccggggcggatggcggcggcctcgtcgacgatcatggccagggtatcaagtccctgacgagccagcgtgtatgcctcggaatccttggcgatgccgtgagactcgcacagcgcatcgaacttggcggcaagctcggcaccgtcggaggcggtgagctcggccaattcgaggcaggcgcgtgcctgtgcttcggtggcgccgcaggtctcggtgagcagtcgggccacctcatcggcaccgattttgtcgagcttgtcgatctcgcgcagcacgccttcgacgtccgtcaggccaaggccgcggtagaagccttcagacaacttgcggttattggcgtgcacggtggccttggggaggccatacgcgcgcagctcttccagcgcggagaccatgaccagcggcagttccacttcatagtggtcgggcaggtcgccggcaccgatcacgtcgatatcggcctgcacgaactcgcggaagcggccttcctgcggacgctcgccacgccacaccttctgaatctgccagcgcttgaacgggaacgccaacgcacccgagtgctcgaccacataccggctcagcggcacggtcagatcgaaatgcaggcccaaccgctcttcaatcggagtgtcggattcatgaccgacctcctgcaaacggctcagcaggtagatctccttgctggtctcgccctttttcagcaaagaagcgccggtttccaccgctcgcgtctcaatgccgatgaagccgttgagctcaaaaaccttacgaagcgtatcgataacacgctgctccacaacacgttcggaggggagccactccgggaatcctgatattgatgcacctttagccacgaaatcaatataataggtgagggttgcgtcaaaacttcctggttcgcccgggatgggagacgctcccgcttatgcattctacgctttaaggagctggccatggccgacgaaactgtcaccgaacccgtaaacaccgctgcgcccgaagagcaggcaacgacacccgcacccgaagccagcgcggccacgccggcgccgactccgtcccccgcttccatgccgaaaccgcacgcgccctcccccgccgccttcgccaagaagactccgtcggccaagccgcgcgctgccgccccggccgccgccaccgccacctattccgaggctgatgtcaaggccgccgaggccttcggccgcgtggatgacaacggcaccgtcttcgtcaaggatggcga

SEQ ID NO: 3746 - DNA, 29769 bp, Unknown
  R150_10m  MAG No. k141_15763
cgccgcggcgaggtgctattcatggatctgcgcacgtggaatgagaatatcgagaaatacacgtacgacaagaacaagaacaagaagaagaccgtgctcacgcctgagcagatcggtcgcgttaaagacatcttcgagagctggcgttgcgttgacggcggctacgaggacgtgcccgagctgtgcaaatccgtgcacatcaagggcgacgattccgatcagatcaccatcgagagtcgcgggtatgcgcttacgccgagcaagtacattgagttcatcgaccatgatttgggcatcgactacgagaaggagatgggccgcatccaggccgagattaaggagcttttggctaccgagaagaaatctcaggccatgcttgaagctgcgttcgaaggtattggctatggaattgactaaagctagcctgtggcattatctagagcttgttgaacgtcccaatagcgaagccgtttatggcattgatgatgttcgcggcgtcaataaccaaaagctcatgatacggacgaaggcagacgtctcttctcgggactttgcaaaatttcaaatagtgatgcctggagaatttttctttaaccatcggacttcacgcaacgggtcaaagttcagcatcacgtacaactatgacgatgtcccccatatcgttaccgaggactatgttgtatttcgagtggccaataaaggcgagctttgtcctggctggctttatctgtacgtttgtcgtgccgagtacgatcgttacgttattcaaaactcatggggcagttcgacagagtttttcaactgggaagatttttgcgaagccgaaattctgttgccgccgattgaggtgcagcggaagtacgtcgccatctatgaggcgatgttggctaaccaacgggcttatgaacagggactcgacgatctcaaactgacgtgcgacgcgcttcttgatcgctgcaagaaatcgaagacgtgggagcctgtcggaaagcatctccgtgaggttgatgtccgcaatgctagcggtaagtgcgatgtagcttacggtgtcaacatcaagaaggagtttatgctctccagggcaagcagtgacgacttacttaaatacaagctggtcaaaccaggtcagattgcatgcaatctgcttcatgtcggaagagatgcctcttatccgattgcggtgaacgaaacggactcctgtattgctgtttcaccagcgtattctgttttcatggcatcgaataccgatatggcagtgtttctaatggcttggttttctcgtgcggaaattggccgtaatggttggtttatttgcgatgacagtattcgaggcagcatggctattgatcgcttcttatcttgcgaaattcccatccccgacggtaaaacaattaaagctatcgctgaattaaggacagcgtattgggcgaggacacgaatcaacgtctacctcaaggcccagctcaaggacatatgccccatacttatccggggctcaatcgaggaggcgtcgaggtaattatggagcgcctattctctgaacgttatggagagctgttccaggatgagccaaattggtttggcggagatgacggcagcagcgttccctatagcgctaaagtcctagtcgcacgcgtcatggaggacttccgtgagccgattagttttcagccgaatcgctacgatagctacaccgttgatacagacgctcttgaccttgcgataaacgagctcaacgagcatgtcgattatcgggtcgtcgacttggatatgatgcgcatgggttcgagccttgacgaggtccacgcccttgcaaacgtttacacaccgcacctcttcgacctcgtagagctccaatacgaggagctttccgacgacgccgaaaacggcaagggcggcttccgcggtgagatcaacaaggtgtttcgcgagaatgatatcccctggtttctcgttgacgggcgactggtcaagatcgatcccaggcagttcgagcaggacctgaagctcaaggctctcagcgagatgagggagctcaaggatgcggaccccctctaccggagagcttacgatgagctgaggaaggctatagatttcctgggacgcggcgactatgcggaagccgtgatcaatgccgagaagagctacgagagcgtcctcaaggtcatctgcggaccgaagtccgagacagaggcagccaacagccttattaagcgtttgctcgaggctgacaatctgtctctcccggagagccttaagcccgaggccttccagggcagcgttctcatgtcgcttcccatcatccgcaacaaggcggcggcgcacggctccgggacgacggggcgcgagattagtgccccgatggccaaccttgccgtcaatctggcatgcgccctcgacacatacctcatccaggaaatgaccgacaaagagtaggcaagtatggaagcggcagaccttaaattcgaaaacggaaagttcaccgaggacgagcttgaacaggcgatcatcgagctgttccagcagcaggacgccaacggcgtgcgctgaagctatgccaacggcgagcagctgcaccgccgcttcgacgagccgctcatggaagaccgtttgaagtcgagccttcgacgccgctatgccgatatcgacctgaccgagggcgagctccagacgctcgtgggcgagctcaagcgcattccctcggccccgctctacgacgggtgccggcgagcgttctggctcatcaacgaggggtacacccttctccgcgaggacgcaaacaagcctgccgttcacatcgagtacatcgacttcgacgacatctcgaacaacgatttcctcatcgtgaaccaatacacggtcgaggacgtgcgcacccgtcgtcccgaccttttatgcttcgtaaacggcataccgctcgccatcctcgagtttaaaaccgccatcgaggaggatacgaccatccacgatgcgtggaagcaaatcgccatccgttacgcgcgcgacatcccgagtctgctcaagtactgctgcatagccgctgtcagcgacggcatcaacaacaagatcggcactgtgttcgctccgtactcatatttctatgcctggaacaaggccaatgacgtcgacaaggtgtcgaacggcatcagttccctttacaccatggtcgagggtgccttcgcgcccgaccgtttcctgacaatcgttcgcgacttcgtattcttccccgacgacagcaaaagctccaccgagatagtctgccgctacccgcagtacttcgccgcgacgaggatgctcgacaacatctgtgagcacctgcgccccgaaggcgacggcaagggcggcacgtacttcggcgccaccggctgcggcaagacgtatacgatgcttttcctctcgcgtctgatgatgcttcgacgcagcgaggagctgggcaaccccaccatcgtgctcatcgtcgaccgcgaggatctggacaaccaggcaagcgagctgttcgtgacagcgaagcggttcctgcatgacgagaacgtgcgcagcatcgagacgcgcgacgacttggcggagacgctgcgcgggcgcgaatcgggcggcgtctacatcaccaccatccagaagttcagcgagcggatggggctcctttccgaccgctgcaacatcatctgcatatccgacgaggcgcatcgcacccagacgggcgtgggctccaagctcatggtcaccgaggagggtgccttcacccgctacggcttcgccaaatacctgcgcgacggcttccccaacgcgacctacgtgggctttaccggcacgcctatcgacgagacaatcgccgtgttcggccctgtggtcgaccgttactccatgaaggagtcgagcgacgacggcattaccgtgcgtatcgcctacgagcccagattggcgcgcgtgctcctctccggtgatgaggcgaagaggatccaggagtactacgaccgctgcgccgaggagggctcgaccgaggacgccatcgaggagagccagcgcgccatgagctcgatggaggtgctgctgcgcgaccccgaccgcctgaagaagctcgcggccgacatggtcgagcactacgagcgcctctgcggggagaagccgggcgttgtgcagaaggccatgatcgtctgctctaatcgcgcccatgccttcgacctgctcaacgccatccttgccgtacggccagaatggggcatggcgaagaaggccgaggacgagagcaggatttcgcccgagcaattggaggagctcgaggcgctgccaaagatcaacatcgtggccacgcgcggcaaggacgacccgagggacctcttcgacgcctgcggcaacaaggaatggcgcaagaagctggacaagcagttcaagaacaacgactcgaacttcaaggtcgccgtcgtatgcgacatgtggatcaccggcttcgacgttccctcgcttgccgttatgtatatcgacaagccgctgcagcgccatacgttggtacagaccatcagtcgagtgaaccgcgtgttcgagggcaaagaccaggggcttgtggtcgactacatcggcatcaaagagaacatgatgaaggcgctcaagacctacggcggcgacgattccggagccatcgacgatctgaccgtcgccctcggcatcttccgcaatcacctggccatgatcgacgacctcatggtcaacttcgactcgagcgccttccatgcgggcaagcctctcgaacgcctcgggtgccttaacagggctgccgagtacgtgcagctctcgaaggagttccagacgcgattcatggggctcacgcgcatcctgaaatccgcgtaccagatctgcttcccctcgggagagctatccgaccgcgagaccgcgatgtcccagttctatctcgcgatccgctccatcgtctacaagcagaccaaggatgacgcgcccgacgccgagatgatgaacgaggtcgttgaggagatggtacggcaggcgatcagctgcacgggcgtggagagcgtcctcgacgccgacggccccgaggacctcttcggcgaagaggcggttgccgagctcaacgccatgaagatgcctatcaccagattcaacgccttgatgaagctcgtgaagcgggcgatcaaggattacggacgcaccaacaaggtgaaagcgcggcagttcgatgagcgccttcgcaaggtggtggacgcctacaactcacgcgacgacctcaccttcacgagcaaggtcgtatctgattttgtcgacaacctgagcgaccagctcattgacatccttcgcgatctcaaggaagacaagagctcgtttgagaggatgggtgttacttacgcggagaaggcattctatgacatcttggtgaaggtgcgcgacgaccatggttttgtcttcagcgacgagaagtgtattgcgcttgcaaaagagatttcaaagctcgtaaacgacaaggcgcaatatgctgactggtcgacgcgtgatgacatcaaaagccaactcaacatggatctgaccgtactgctctataagaacggctatccgcccgagtgggatgaagaggtcttcgagaaggtcatggagcaggcagagaactttaaaagaaacgagtagacaggaggcaaaaagcattcacctatcgttccagagtccactcgcaagaacctctgagtcccttatacaataggacagagaagcaggtgctgaatggaaccaaggcatacggatgatgaatcattgcccgaattagtagcagatcttgccgacctcaagcgcgaagggtcctactgggatttcaagcgtgagtggcatggaaacaaggtggacttgcttcacggcataatctgcatggcgaataatcccgaagacacaacggggcttttgattatcggtattgacgaagaaggggacttttagctcacgggcggcgccgagctcttgggcgaacggaggaatacgcaaggcatcgttgatatgctgcgtacaaagcgacgtgtcgatgggggttcccaaagttcgtgtcgcatcgattgagctgggcaacgcttgcgttgacattgtcctaattgaccacgatagcgaatccctgccttattatttgaccgtgattatggagaggggcgcagtatcgttcgtgccggtgccgtctatacgaggaacgctgacagcaataccccaaaaaaagaagacggctaacccgctcgagaccgagcgactctggcgtaggcattttggtttgggcaagacaccgctcgagaggctccttcagctgctctccgagccttccaaatggttcatccccttcccgttttagtgagggatgaggaatacagcggatattgctattgccacgccgactttcccgagttcacttctgttcgcaagcctgcagaaagttggaccggagtcaagtacttcatgttggctagcccgtttttctcgcatccaaactggtggacaggctacttctactatcatcagacaatgattcgcagaatgcctgatgcatattccgaccatctgtggattccagcgccaagcatctccacccttcgcgattcttgccgagcggattcttccgaagccgctcactcctacgcctattacctcaaatactccattgaatgtgtcgcgatgatgtttgagctaaggtgtgtttacactagttgggtttctggctgtgttcttcgggtagacggcgatgaggatgggccgggggttggcgaggagggtctcgtcgagcctgtcgtggcgggtggcggccttgcggtagtgcttcatgcggttgaagacgcgttcgaccatgttccgccccgtgtacgcctccctgtcgcgatcccatggggccgcacggtttccctttgggcggcacgaccggcgtcaggccgaacgactcggccggcggccgggtggaacccccgtacgcgcggtccatgagcgggcgtgcggatttccaccccgatgatccgcgcctcccgcaatgccgtgaacaggcgccccatcgcaccgttcccggaccggcggtcgaaccgccggcagacggtgatccacttgccgtggcgctccggcgggtccctccacggggctcccgcgcggcgcatccacggcagggcgttgacgaacgtgtgattgccgaccgtcacgttgccgcgccggcgcggcaacggatgcgcgacccccatgaaccggtcaagcgtgatgtcgcacctcggcgtacgcatacgacaattaccacgcaaaacctagatagtgtaaacacactctaaatcagggaagggcaccattgataaatagcagacagcccaggcgttaaaacttaaacccagggttctccttgcggatggtaccaatcttcttgtcgctgcggaccttgcgaccatcctcgtggcgcaatgtcccctcgggcaatccgcgcgacttctcaaatgtcttaactgtacaatcgcttctggtttttctgactgtcattgcgttgacctcctgtcaactatgtatcaaccgctaggtcgagagtttaacgtctggtagcagactatatttagacgatgacatgagccgactagagtcagggaatgatctcaatgcgacaacaatcctagttcaaaaccgcccggcagctgctagcacttccctggcagagtagatggccgacaccccgttcccgctcaatcgttacataacctgtttccctgtagccacccggggagagtatgttcacccgacccaagagtgacaaattccaagtgaggagcgacgactctgaactgcggaaatgctgatgtgagcacaacgaatggctatatggcgttcgtcatcgcggaatcacgaaatcatgggggtaaaactttgagaccattcgtccaggtgccttctgatatcttcccatctaacctgtgtcgaaacaagatgcttcttcagatgaacactatccagcttatagagaataaccatgacgcactgtgcacatctccgcttctcttcatcgctatatcgcccaaagtcattcgtggggttaaactccctttcccgatcttgcaaatggctgccatcgttcagagcaagacgatacattgcatctgcgaggaagggtaactggtcaccgaggcgttcttgtaagtccggatcgcgagacagtccggacattccaatgccgtagttgaaggtactgtacccctcaagcacccttcgtaggatgtttccaattacgtatgactcctgcggatctatattctcggcgcaagcaaaatcgtaggtacgcttcaacagcgcaacatattcgttggcttttttactacgcgtttcgcaaaacatgtccttgagctcgagtaaatcaatttggaattttccgttgctgaatgtgtcatttatgtcatcgaagatgaccttcagttcgtttgccgcacccccatcgtgagtcatgaccgtgatacgactttccgggttcgagcctaatagatgtccagcacgctctctgattagcgagcagactcctatcctgttctccatgtcaaaactggaaattgggtcatcgagaatgagatactgagggtcgtcatcctcgtgatgccgctccctattttttccactctcagagaagaagtagcaaagcgcgagaatgtttctctcgcccgtggatacatcattcggctttaccgcttgccctttagatataatcttgtatttaccatcatccagggaaagctggaatctcctggtatcgaaatagacattcgcgaggtaatcgttaattacatcaactgcgatgtccatgttcttcatcttggcttcctgttcggccctgctacgagctaagcgctgaagactatcttcgtttttctttttcttgtcccgagcttcattatattcctttattgcctccttgtgcttttcaatctctgaggatgcatctgctgcagcaatcttattgttcaaatcacgaagctcgtcatgaatttttgacttctcatctatgtctttatttatcgatccaacttctttattaatggatttaatttcttcattcaacgcttgaatcacttctgacaaaccgagagcctcaatagtctttggagaataaacgcttgactctctctccaccatcaagccattgtatttttctattaggctatttgccttttgctctgcttttagcagttcggtctttagcttagcggatacttgttccgggacatcccgtgggattatttcttccaagtgcgacgccctgagttcctctttgaatttatccacttccttgctaagcactttgtgtacgctatcaacaatggaagcctttaactcagaggagattggtcgttggcacattgggcaaacgtccgcctccgatgaagaaaagacctcggctgactcctcaattagatgctgatgaccacttcgtacaagctcgaggattcgcttctcacgatcgcttaacgtggggtcttctacgcgtttagccagaagctctagaatccgagcttcatcgtataggcttggctcaagcggcagaagctcacgcagatgatttccaccggccgcactggctttttcgtagtccatcaatttttgattgaacttattgtctagacatacgcgcgatttaccaggcactgcattgcatatctcattcaaccgattatcagtgaaattaggcttcttgccgtcgactttctctgctcgcgacttccatccactgttaactgccgcgtcttgaatctttctttttagcgtctcaagagacttctcaccatttctaagctcttcgattttcttcgttagcccttggttctcggcttcaatgctttcaatcttctcgtcaatcttcttgatctcgtctgctacttcgacttgctcgccaagcatggcaaacgcctggaggccatcgtcaccaatacgcgttttcgactcgatgtaatcttcgttgaagacccttattcgtgctcggtcagcatcgtctaaatctaatctctgattacaatcgtagaaataaccagtaccattgccttccgtgatatcgttgatctcacgtgcaatagtcgattttcctgatccattacggccaaagacaatcgatgcgcgatgccgtctcgtattattgctatcgctatcgtgaaacagtcgaacgttggtcccttctgaggtaggtccttccgagaaggctccacgtcgcacttgaacaccgattatgcttgaaatctggctagccatcagaacctccaaaaaactgagatgcggcgagtaggatagcccgcagaacaatgcttcccattataacgtctgcttcttttacctaaacacagaagcactgagcgataaaaaaaaaatcgaatcagtttcgtgatgatccatgacctgacgtggcttagccgtagcttagtgcgcccgtagcctccatcaggtatttccctgcctgtcccgtccagcggacgcggcttcttgggccttgttacgaccaagagcactagatgcccgacgagaggaggtaggccatcccacgaaagccgacattctccagatgccacgcgacgcgttcccgactcaccaaggaatatcggataatgatgtcgaaagcctcaagaatgccgaggcggagatacggggtctgctgtctcctcggcatccgaagcaaacgacccgatcgacgacctcatgggcatgatgcgcatcgtgcatcccgaacttcctcattccgaagtgatcacagccgcacttcatccgtctgccggcccagcccttgccataaggggagacgcggtctgccatgaagacggcgtatccaacaggtccgctttccatggcctcgataagcaccttgaattcctcattcgtccggaacggcattgcatcggcgttttcctgcccatgttttccgccttgtggcggggatcctctctcgatccgtagaacttcaccgcaaaacatcttgggcgaacagtgcagctgcgtatatcgttcaaaagcagcgggtggttatggacggaacgctcggcgtggagtcgaaggccatgttccagacgcgcacattctggtcgacgatcgcggatcgcggcagaaagcccatgaccttgccggcggattccgaaacgctatcatgcatgttgctacgctgggagaatgcgcacttgatatagggtcgaaacacactatgatgtggccacgcagaacagaaacaaccatcaggcacggaagagacccggaaaggcgaagaggccatcgtcatgtccagtgaagtcagacaagggaagatgccgccaagacacatcgaggtgcggggcgcgaaggtccataacctgaagaacattgatatcgatatcccactgcacgagatcgtggtgatcgccggggtctccggctcggggaaatcctctctcgcgctcggcgtgctgtatgcggagggatcccgcagatacttggaatccctctccacctacactcgccggaggatgacgcaggcggaacgcgcggatgtggaggatgtccgatatgtgccggcggcgcttgcgcttcggcagcgcccggggttcccggcatccgcagtacattcggaacgctttccgaactgctcaatggtctgcggctcatgttctcccggcttgcgagtcaccgctgccccaatgggcactactgcccgccatctctttcggtcgcagccatgcaggaaatcacctgcccggcctgcggcgggcaattccacggtcccggagccgaggagctcgccttcaacagtaccggcgcctgcaggacctgcggcggcacgggaatcgtccagaccgtgaacgaggcgacgctggtgccggacgattccaagacgatcgacgagggcgcggtcgtcgtctgggggacgctcatgtggtcgctcatgaaggacatcgtacggacgatgggcgtgcgaaccgatgtgccgttccgcgacctctcgccgagggaaaaggagatcgtctaccacggcgagttgaaaaaacatcacgtccattacgtcaatccgcgcacgctggaaccgtcggaaatggatttcaactattacagcgcggtcaattccgtcaagaactcccttgccaaggtcaaggacgagaagggaatgaagaggctcgagaaatatctcaaggagggcgtttgcccggactgccatgggacaaggctctcggaggccgcccgcacgccgagactgcgggggaatcggtctggaccgggcaacggcaatgacgctttcggaactgatcccctgggtgcagggcgtgccggcatcgcttccgaaagagatgcgccccatggcgcagagcatccgcgaatcgttcatggacgtttccgagcggctgatggatctcggccttggatacctgtcgcttgatcgggcggcttcaacgctttccacaggtgaacgtcagcgggcgcagctcgcaagggcggttcgcaaccggacgaccggcgtgctgtatgttctcgatgaaccgtcgatcggcttgcacccccataatctcaaggggctgaccggcgtgatggacgatctgcgggcggatgggaattccgtcatcatcgtcgatcatgacacacgggttttgaagcatgccgactggatgatcgagatggggcaaggagccggagcggacggcgggacggtgattgccgagggcaaggatcgcaaacatcgcgaagaatccacggtccgtcatcgggccgtatctttccgaccggtatgaagcaagaatccgtccggtcacgcaggcggatcgcatgttcgacaagggcgccatacatctggaaacggggatgatccacacggtgcatcctctggacgtgcggataccgatggggaggctgaccgtggtgacgggcgtctccggttccgggaaaaccacgatggtgctcgaaagcctgatcccgtcgctcagggcgaagatcggcgggcagaagcttgcgggacatgtgaggaacatcgaggcggagggcatcgcacaggtcaagctgatcgacgcgacgccgatcggcatcaacgtgcgctcgaccgtggcgacgtacgcgaatgtccacgacgagctcagaaaggcatacgcaaagacacaggacgcgaaggaccgttccctcaaagccggagatttctcatacaatacgggaagactccgctgcccggcctgtgacggaacaggggagatctcgctggacgtccagttcctgcccgatgtgaagattccctgcccggactgccggggttcccggtacggcgcggatgctttcgacatccgcaggaaagcgaaggacggcaatgcatacagtctgccggagctcatgaatatgagcgtggatcaggcgctgaacgccctcgacggactgaagctcccccggcaacgactgcaggtgctgcacgacctgggactcggctatctgaccctcggcgaggaaacgcccggactttccggcggcgaagcacagcggctgaagcttgccagcgagatgggaaaggaccagagcgactcggtgttcgttttcgatgaaccgaccatcggcttgcatccgcaggatgtgaggacgctgctgcttgttttccagacgctgatcaatcacggcgccaccgtggtggtcatcgaacacgaccttgatgtggtggacaacgccgattacatcatcgatatgggaccgggcggcggaaaggaaggtggcagggtcgtcgcctgcgggacgccggacgagatcagacacacagatgaaagcattaccggtcgctatatatagcgtcatatgtaggagcgtggtctctgcctgacggcatcacgcgggagcgggtcggtacggccctgacccgcatcgcgagtggtgtgccgcggcggcccggctgcggcacgtcggcatggggcgcgccgccagggcgcggaatacggggaatatgccgcgtacgacaggaatgatatgattcaatcctggatttgcgttacgtttgccacacgcggcggaacgccgtcggagccgcagtcagagagggaagtcccgtgaaacgtttcgtgggtttggacggcatcaaaggattggcgctgatagccattgtgctgtaccactgcatgcagcaactgctgccaggcggattctacggagtcgacgtgttcttcaccgtctctggattcctgattgccgtcagtttgattcgttctctggcgaaaaccggatcgctgaatctcgtgcgatatattcccaagcgtgcagtacgtctctatccggcgctgtttctgctgattccggtcaccgtctccgtcggctggctgctcgatcacgatatgctggtttccatccgcgaccaagtcatcaccgtgctgctgggctgctacaactggtacgccattgccggaggccaaagctatttcgaccaaatgaacccgcaggtgtttcgccatctgtggttcattggcgtgctcatgcagttctacgtcatcgtgccgttcatcgtctggctgatgtggaagctccgccagacgaaactgccctcactcatcccactgggactcgcggcgttcagcagtatcgccatgtgggtgatgtacgtgcccaagggcgaccccacccgcgtctacttcggtactgatacccacagcatgggcctgatgctgggtgtggctctcgcctggtgggtcaccgctcctcagttgggccacgctcgtcagggagctgtgccgatgccccgcaccattaggtcgagcgcttcggccgccacgtaccgggctccgttacctcagattcctgtaaagcatcgcatctggaatgcgacggcaccggtattggcgttcctcagcctgattgccttggtcaccatgacggttatcggcaaacaggatgcattcgccttccgcggcggcatcatattgtccagcctgttgtccgtgctgctgattgccggtaccatctccgacgattcctggatgcaaagcctcatggtgttcaagccattggccgccctcggcaagtattcgtacggcatttacctgtggcactggccgttgtggattctttccagcgcccttgccccgaagatcttcaaggcagtagggccttggcctctcatcatgaccgcgttgctcaccgccattgcggtgatgatttcctggctgatggtggagaaaccggcggcaatgcactcggtgatatccgtcgtggtgccccttcgcacgaacaagaagaatcatgcggcccgggttattgccgttgacgttatcctggcgctgtcgttggtcggctgcgcgcagggcattactcatgcacctgcgaaaaccgccatgcagatccagctggagcaacaggccgcacaactggaacgcatacagaaaaccgaacacgtgctgctgcgccatgccgtgccggcaccgcccaagcccaagcatgagatgcccaccggcgatcagattaccgccataggcgattcggtgatgctggcctcatcacagggcctttcggaagtcttccccggcattcagaccgacgcgagcgtttcccgctccatcatggtcgcccccgaactcatcggcaatgatctgtccgccggcagtctgcggcaatgggtgctgatcggccttggcaccaattcggcaatcacccctgatcagctggaccagattcgtaatatgatcggccccgaccgcgtgctggtactggtcaatgcccacggagaccgtacgtggattccacctaccaaccaggtgcttgccgactatgcggccgcacatccggacaatgtggtgctggtggattggaatgccacagccaacgcgaacgcgcaggtgctcggctccgacggcatccacccgagcatggatagcgatatctatgcaaaggcggtcaaacaggccatcgaacaatggatcgcaagcggcaggtgaacggcaggcaacgctgagttgtccaaccggtcgtgaagaacggctatgctgaagactgcatcaacgagaccacacgttgggagacatggtgagcgcaatccttgaagggaagcccgataagaatcttattctcgttacgggaaggattcatccgaagttggctgaggatgtcgccgagcagctcggcatcgacgtccttgaaaccaccgcatacgatttcgccaacggcgagatgtacgtgcgctacaccgaatcggtgcggggcgccgatgtgttcgtgctgcaaagccactacaaacccatcaacaaggcgatcatggagcagctcctcatgatcgacgcattgaagcgcgcctcggcccgttccattacggcggtctgcccgttgctcggctactcccgtcaggacaagaagcaccgcggccgcgagcccatctcctgccgtctggtgttcgacctgctgaagaccgccggtgccgaccgcatcatgtcggtcgatctgcatgccgcgcagtcccaaggcttcttcgacggcccggtcgatcatctggtggccatgccggtgctggtcgactacatccgtgatcgtttccaaggccatctcgacaatgtcgccgtcgtctcccccgacgccggccgcattcgcgtggccgagcagtgggcgcagcgtctcggcggcggtccgctcgctttcgtgcacaagactcgcgacatcacccgcccgaaccaggcggtcgccaaccgtgtggtcggcgacgtcgccggcaaggactgcgtgcttgtcgatgacctgatcgacaccgccggtaccatcgcgggcgcatgccacgtgctgcaggacgcgggagccaagtcggtgaccgtggtcgccacgcatggcgtgctctccggcccggccatcgagcggctcaagaactgcggtgcgcgcgaggtcgtgctgaccgacaccgtgccgattcccgaggaaaagcgctgggatggcttgaccgtcctgtcgatcgccccgctgctggccagcgccatccgcgccgtattcgaggacggctcggtcgccgaactgttcgacacctaccccgagcaccacggtcaaggcttcctgttcgcctgatcacgtgcgtgtttgttcaaggaaagcacacgatgcgagacgcgacatggcgtagtctttcggtaaataccgacagtatggtataaatgaacacttgtgggccgaaagcccacgactcccccatggtgtaatggcagcacacgggtctttggaaccctttgtcttggttcgagtccaggtgggggaacggctgacggccgctcgacatccgggcggccgtctattgttttgaggtgtttccaccctcaatagacattccgatcgaagggaatacgtcagttatggcattatccgcagccatcgtcctcgccgccggcgagggtacccgcatgcgttccaacaagccgaaggtgctgcatacttttgcaggcaagaccttcctgaacagggtcatggattcggtgaccgccctgaaccccgacacgctggccgtggtcgtgcacttccaggccgagcgcgtcgccgaagccgcccgctcctatgacgagcaggtcaccatcgtgaaccaggacgacattcccggtaccggtcgcgccgtgcagtgcgcaatggcacagctcaccgaggctggcaaggtcgatggcccggtgctgatcgccgcctccgacatgccgctgctcgacagcgagacgctgcaccgcctggtcgaattccacaccgcctccggcaacggcgccaccgtgctcaccaccatcctcgatgacccgaccggctacggccgcatcatccgcgatcgcgaaggcaacgtgctgcgcatcgtcgagcagaaggacgccaaccgcagcgaactcgccgtgcaggaagtgaacacctcggtctacgtgttcgaggcttccgtgcttaccgaggcaatcgccggactgaagtcgaacaacgcgcagggtgagttctatctgaccgacgcgctggaaaccgccaaggccgctggcaaggtcggcgcgttcgccgctccggatccgctcaccgtcgaaggcgtgaacgaccgcgtgcagctggccgcgctgtccaagacctacaaccgccgcgtctgcgagcgctggatgcgcgacggcgtgaccattcttgacccggaaaccacttggatcgaggacgatgtccagatcggccgcgacgccaccatcctgcccggttccttcctgcaaggccacacggtggtcggcgaggacgccatcgtcggcccgtacaccaccctcattgacgcaaccgtggacgaaggtgccgtggtcgagcgttcccgcgtgcaggaatcgcacatcggcgcacgcacgaacatcggcccgtggacctacctgcgcccgggcaacgagttcggcgaggatgccaaggccggcgcgttcgtcgaaatgaagaaggcgcacatcggcaacggcaccaaggtgccgcacctgagctacgtgggcgacgcccagctcggcgaccacaccaacatcggcggcggcaccatcaccgccaactatgacggtgtgcacaagaatcgcaccaccatcggctccggctgccatgtgggcgccggcaacctgttcgtggccccggtcgaggtcggcgacaacgtgaccaccggtgccggctccgtggtgcgccacgccgtgccgagcgacacgatggtctactccgagaacacgcagcacaacgtcgagggctggaagcccgcctgggagcgctgaaccatgcccgcacttcaggattccatcaacgccgtccgcgtggccgccgaggccgcagaccgtatcaaggccaccgacatcgtggccttcgacgtagccgacctgctcggcatcaccgacatcatgatgatcgccggcgcctccaacgagcgtcaggtactggccgtggccgaggaaatcgaaaaggacctgttccttaagtgctccggccgtcagccgcgctctcgcgagggcctgaccgagggccagtgggtgctgcttgactacggtgatttcgtgattcatgtcatgcacgaggaatcacgtgaattctacgggctcgaacgactctggcgcgactgcccggccatcgatcttgaactcgcacacccggaaacggcggagcatgcggacgctgctgccgtcaccaccgcgtaacgtgcgaatcacataacgctgatattcgctgatactcgctgatactcgtgtgtcgggctgcctgttgccgaacgtcattgacggcaccaggcagccctcccttttccctgtttcctcactggaatcgaaaggatcgtcactatggccaatcatgttcgttccattttccttatccgtcatggacgcacttcctataacgccgctcacaagctccaaggccaggtcgacattccgctggacgccgtgggtgaatggcaggtcaagcagaccgccgcggccttgaaaagcctgtacgtcgatcgtcggccggaaatcaaccaccggttcattgtctgctccgatttgaagcgtgcgcacgccaccgcgcaggctttcgccgacgtattgggtggaatcgagcccgtcgatgatcatcgcgtccgtgaacgcagcttcggcgactgggatggccatgccgtggctgaactggccgaacgctaccctgaggacttccgttcctggatggagtctcggggcggtgaactgaagtatggtgccgaacccaaggaagccgtaggcaaacgcggtgtggaggctcttgaggactggtccacgcgtgccggagacgacacggacctgttcgtgttctcgcacggcgcatggatcgcgcagacattgcagaccctgttgggcatttccgcgatcgatccgaccttctccacggtggtctcattgcgcaatgcgcactgggtgcgcttggtgccgatggacaatcccgatggcactgtgcgctggcgtctgctggactacaatcacggtccggccatcgccgacaccgacgaatgggaacgcgaacgctgatcatgttcccgactcccctgctaatccaataggtccggtgcattcggaaccgttcaagcaataactgaatgactcaatgcctgaataatggcggaaacaagccaaaaagtgtcgccaaatcacacttttgtcatttggcgacacgccggcttttgccagaatcgacatctcgtcgtaatgtatacgaggtccgaacaacgggccaacaattgaaaacggggctatagcgcagctggtagcgcatctccatggcatggagagggtcgggggttcgaatccccctagctccacgacgaagccatcaaatcgggtgatatggtggtttctccgctggttcgtggcgggtcttgtgactcccatgaatcagatagcttcactcggggctatagcgcagctggtagcgcatctccatggcatggagagggtcgggggttcgaatccccctagctccacaatcaaggccggtgcttcacacaccggcctttttcgttttctatcctatcgggcgacttttgcgcaacattcccgggaatgcgtcgcaaaacagggactggaatgcatgcagtgcgatactttccccggaaagtatcgccaaggggacgctcttccgattggcgcgacaccggcgtgagagataacagtaatcgccactacaatgaggtgtggtccctatcgtgttgatcatcaaaggagacaaaaacatcgtgaccgtcacccgtgtatatatcgccagccctgaaggcgccaatggccgcaacgtcgtcgcttacggcgtgctcaacgcattgacttccaagtacaagaccatggtgttccgccctgctgtgtccaaccatgacgaattcaccccgatcctgctcgccgcttccaatgccggactcggcgtggccctgtccaccggcctcgatgtgcataaggtgcgcgccgacaaggacaccgcccgcggagacatcgtcggcgagttcaactacgccatggaggtctcccgcgcgaacgccgccctgatcgtcggcaccgacaaatcccacgtcaacgacccgaccacctacgagttcaacgcggacgtcgccgccgatctgaaggccggggtgttcctggccgtgtgcaccatggaccgatggccgcacgagctcgacgagaccgtcaagctgtccatcgagggcatgcgcgccgcgggcaatacggtgctcggcatcttcgtgaccggctgcgagccgcgccacgccttctccgtcaaggagaccctcgccaaatacggcctgccggtctggaccctgccgcaggtgcccttcaccgacgaatccaccaaggatctggcccttgagaccttccgcaagcacgctcccatcgacgaggtgctcgccgcgctcgatgtggacgtcaccgcgccggtcacgccgtacgccttccaattcgacctgctcggcaaggccaagagcaacaagaagaccatcgtgctgcccgaaggcgaggaggaccgcatcatcaaggcggccgactacctgcttgagcgcgagatcgtgaacctcatcatcgtgggcgacaaggacgccatcctggcccgcggcagggaactggggctgaacagtctggggcgcgcccgattccaggccatggacgacgagaacgtgctcaagccgatggtggccaaactgtgcgagttgcgcgccaagaagggcatgaccgaggagcaggcccgcaagcaactgaccgacgccagctacttcggcaccatgctggtggtgctcggctatgccgacggactggtttcgggttccgtgcattccaccgccaacaccgtgcgccccgccctgcaggtcatcaagaccaagccgggccagaaactggtctcgggcgcgttcctcatgtgcttcaaggaccatgtggccgtgttcgccgactgcgccatcaacctcaacccggacgccgagcagctttccgaaatcgcgttgcagtccgccgagaccgcacgtgccttcggcatcgacccgaaggtcggtatgctctcctactccaccctcggctccggcaagggcccggacgtggacgtggtcgaggaagccaccaagctgctcaaggagaaggctccggatctgccggtggtcggttccatccagttcgacgccgcctggtcccccaccgtggccgccaccaaggccaagggcaacgatgtggccggacacgtcaacgtgttcgtcttcccggacctgtgcgccggcaacatcggctacaaagccgtgcagcgctcctccggcgccttggccatcggcccggtgctgcagggtctcaacaggccggtaaacgacctgtcccgtggtgcgatggtgcaggacatcatcaacaccatcgccctcaccgccatcgaagcgcagtgagcccggcttagctcccgccagcgggagccactgtaatgcttattttgtagcaagcaacgagtaatctaatcaacggtaacccgtgtctcacgggaacattcaatcacaatggaggatgcccacaatggcgaaaaccgtccttgtcatcaattccggctccagctcgatcaagtaccagctggttgatctcgaatccggcgaaggcctcgcttccggcctcgtcgagaagatcggtgagccggtcgacggccactacaagcacgagtacaacggcgaaaagcacgagcttgaagagccgattcacgaccacgagcagggtctgaagcgcgtgctcggcttcttcgaggagtacggcccgaacctgtctgaggctggcattgtcgccgtcggccaccgtgtggtgcagggcggctccatcttcccgaagccggccctcgtgaccaacaagaccatcaaccaggtcaaggatctggctgtgctcgccccgctgcacaacggcccggaggccaagggtgccgaagtcatgcgctccctgctgccggacgttccgcagatcttcgtcttcgattcctccttcttcttccagctgccgaaggccgccagcacctacgcgctgaacaaggaaatcgccgatcagtaccacatccgccgctacggcgcccacggcacctcccacgagtacatctcctccgtggtgccggacgtcatcggcaagccggctgaaggcctgaagcagatcgttctgcacatcggcaacggcgcttccgcttccgctgaggtctccggcaagccggttgagacctccatgggtctgaccccgcttgagggcctgatgatgggtggccgtaccggtgacatcgacccggctgtggtcttccacctgatccgcaacgcccacatgaacgtggacgagctcgatgccctgttcaacaagcgttccggcatgatgggcatgaccggctacggcgatctgcgtgaggttcaccgtctggtgtccgaaggcaacgaggacgccaagctggctctggatgtctacgtgcaccgcatcgtcagctacatcggcaactacacctaccagatgggtggctgcgacgtgatcaccttcaccgctggtgtgggcgagaacgacgacgtggtccgcaagatggtgtgcgacaagctcgctccgttcggtgtcaagctggacgaggagaagaacgccacccgctccaaggaaccgcgcatcatctccactccggactcctccgtgatcatcgccgtgatcccgacgaacgaagaactggccatcgcccgcaagtccgccgcaatcgccgaggctggcaccgatacctacggcaacaccttcgccaagtaagtaaccgccgttaggcatctcactaatctctagttgcaacactatgggggctgattccgattggaatcagcccccattcgtatatggtcatgagaccactacccctgcgtcatactcccctcagtcgcctccggcggacagatccactcagagaggggatccagaccctataacttggctcccttctctgaggggagctgtccgcgtagcggactgaggggagttccaccagaacacaggaccccttactgcctcagcatgccactccacataccgacgaaatcaggcaaggtcttgcgcgtggtggccacgttgatgacctcgatatcgggaatacgcagccccagcatcgcggcgaacgtggccatacggtgatcagcataggtttccatcacggcaccgtgcaacgtctccgccggcaccggttcgatacgcaatccatcaggcaattcctcagccgctcccccaacacgacgaatctcgttgaccaatgcctccagacgattcgtttcgtggccgcgcaggtgaccaataccaaccatgtctgtcgacttatcagcaaacaccagaatcgccgccaacgagggcgcaatctccccggccgccgtcaaatcgaacgtacccagcccacgcacggtgccgtcaccggtcacctcgcaatagcgcacgccgccgatggtcgggaacgatacttcggcacccatctgctccagatatccgggcaacaggccgcccggctgggtggtggtttcaggccaatgaggcacccggaccgtgccgccggcgatcaatgccgcgccgaggaatggcgccgcgttcgacagatcgggctcaacggtcaccttgctcggcagttgcattgcgcgcggttcaaccgtccatgtgcgggcggattcgtcggcctcaaccgcaccgccggcaccggtcacatcggccacggtcatgcgaatgtgcggcaggctcggggtcttctcccccgtgtgcgcgaggtgcagaccgccaggcagtttggaactaatcagcaacaggccggagatgaactgggaagaaccggacgaatcgatgctgacctgcgcctgggcagccggcaaggttgcaggcggcgtaatagtgaacggcagacggccaacctcgccgtggtaatcaaccgttgcacccagctgttccaaaccgtcaagcaccggcttcatcggacgtgcataagcctgttcgtcgccatcaaaattcactgggccatctgcaaacagggcaaggccgggcacgaaacgcatcaccgtgccggccagtccgcagaacacattgacgttgccatggaatcggccggatacaggaggagtaaccgttacggtggtgtcggttgcggaatccacgtcgcagcggacaccgagggcttcgagtgcgcccatcataaggtccgtgtcgcgcgaacgcagcaggccaatcagagtaacgggcttgctgccgagggcggcgagaatcaggtagcggttggatagggacttgctgcccggcaccgttaccgtagcgttcaacggctgtgcggcgagcggggcaggccagagattcgtgagtcgttcagtcataaggccaaatctatcaaacaaattattcaccggtcggcagcgatgcgggattcgatctgctgatcaggtgcggaagacggctgctcaaaaccgccttcgatggcctgcgcgtgcaacaactgagcggccgcgcgatcggcctcgatggcggcgatctggcgcgagaacacgatgaaccagccgaggaacgccagaccagccaacgcctccacattggtgagggtgttgtgacccatcatcatattgacccagaatgcagcgcatacgagcgcggtcaagtcggaggccaccatcactgctttggacaggcgtggcgcaagccacggcaggagcacgaacagcagcagcatgacgaacggcaggcctttggcgcatatattgtgcaagagattgtgtggcgtgtaccgaaacacgccgatgccgatgaatgccaggccggccaccatcagcaggaaggacagaatggagatgcgcagcatgaaatgtgggatttcgtagccgcgattcggatctctgttggtgcggtcgtgccagaggcgctgtagccgttcggtggtcaccagttcggagatggcgaagtagctgacgatgatgatgcatgtgccggcaagaatcagcgtggagttgaacatacgggccgcaaacgtggttctgtcgccgagctgcgaaaagttgttgtgataccagtatgggtcgtcggtggtcatgccggcggtgaccacgccggagatgacgaagaacggcaacagactggcaatagttttggcgttcatcatctccgcctgtacaaaggtcatgtaccccaccacgccggcgaaggcggcgcagacgctggagatatagccggagaagatggcattgcccatcatgtcgttggccgcaccgatgagtgcaaaagacgacaggaaaatggtcgaggcatacaccaccgcaagggcgacgatttcgaaaatgcgacgaatcggtgcaaaccaaccatgtttgaggttcaatgaacgtgatttgcgcgcatagccaataataaaggaaatgacgccgcatgccgccacgatgcccgaacataccatgaatcggcgttgcgtcagctgccagatggccggcgcgtattccatgtacaggttcatcgataccgcgccaacgacggcgcaaatcaagaaggagatgagtccggaggtttctgcacgctgatgacgtcccatgccgggcctcccctatctattcgatgccgcgttatctttcaacaacaaacaaaactccccccgaggacaacgctttactagcaagccagcgggatttggctgtcgccattctactgaaaatctgaaacactacaaaaaaacgattatgtacgggcttcttagcctttgcgactatcgttaccgccttgccgagtaccgttgttcatgcagaaagaaagcagtattggacacaatcgaatgagcgtgtcggtatcgttgaaaaagtaatgaatgacggttctatcggttcaacctttaagggacgaaccagccgcggcaccatggcgctgatgcatgactatgccgagctcatcaatgaattacgtccgacagcagagcaattcaccgagatcgagcaatactgggtcaaacgaattcaggcgttcttcaccagcaaaccattcaagctggagtccgacaactcgctttccgttgatgcggccgtggaacatctgctgcggcaggcagcgcagcggcgaagggagaatccgggcaccatgtacgtcggcaccgtcctgcagcatctcgtcgcggcaaagctcaccatcgttgctccggaagtggaaatcaacggcgcgtccgttgctgatgatccgagtccgcggcttccaacggtgaggccgcggaccgtctcacaaaaccgtccgcggctccgccctcctgtttcgtcgcaactgactacaccgacgggttcgggcgcttcgtcacgaaaacgccattgcgatgcaccgtatacgcgccgccgtcactgccccgttccgcccggaacaggacgatcggctcccctgcgatgtcgcgcagttcgacatccgatctgccacgtgtcagatagaagtcgaatatggcgtcgtcggattgacgcacggtgtgcagaacgtcagaggtcacgccgctggcgggcgaccgcaggttggcttccggctgccggccatcctgcggctgcacggcaagccagcctcccacgaatcgcgtcagatcgctcatgcccagatcgcagccgaggaaatacgcctccccttcaccgtacgtgttgcgggtgatcgcggccatgccgtcaagctcccactcatccgcttcttcgccggcatacgaggcaagcacctgcacatgcggtccggcgacggtcacgtcaccgagcttgtcgatgacgcgatcgagccagtcgaaatcccaatggtcttcgatgggctggaggcgatctcagctgaagatggcaagggccacggtgttgacgccggcctggcccatcaggcggatgtcgtcatcccagatttcctccggccattggtcgggactatagtcgccaccgaaagcgatgccgcgtccgtccgcggtcagcagttttggccatgcgaagtcacgtcatgcacgcacggttatctcctttggcaggcggcgcagggccacggcccatatcggataccagctgatactagctgatagacactcctggccgatagtcgacacgccgccggttccggccccactgccggaaccgacatgggtatgttcatgaccgccgaccgcaggaacgaacaggcccgtccgccacggaccgcatcttgcggttcaggcggacgggccttatgggagggatgggaacgggagatcagttcttaataactgcctgcgcctcatcaccggcggcctcgacggcctccacgacctgcgcctcatcgtcgacgatctcgccggaagcgagcttggcttcgagctcgtcaacgatctgcgcatgcatcttctcatcgatcttgaccttgaaccagaacacgacgaggctgaggatgatgagaacaagcgggacgtagaaggcgaaggtcttgaacgtggcgatgttggacgcggtcatgtcggctgccgtggcatgaccggtcatgccagccgcgagggcaacggcaccgaccgcaccgttggacatcgcgccgccgatcttgtcgagcatgggacgcaccgacaaggtgaccgcctcgttgcgcctgccgttcttcagctggccgtactcgatggagtcggtcagcgacagaatcgcggtcatctggatgaactgcgcaggcacatagaagaagatcagggcgacgatgacgaccggcaggttgctggagaacagggcgagcatcgtgtagccgataatcatggagaccatgccgccggtgaacaggtagcgacggggaatccagcggttgagaatcgggtacagcggcgccatgatgaatccggcgatcagcgggatgatgccggtgatggagaaggcggcaggctcgtcaagcacgaacacgaagaggtagtacatcacaccagtcgtgatgacgtttgcgatggcgtacagcaggtaggacagggcgacccacagcagctggtcgttctggaacagcgccttgaacgcctcgaacgggttgccgttcttctgggccttggcacgcagcgcgctggtgctttccttggtgccaaaggcgacggtccaggcggtaatcaggccgaggagcgcgacgatgaagccgaaggaggtccatccggcctggccctggcccttggcgccggtgaacgtccaggtgaagtagctgacgatcgggatgacgatgacggtgatgccgttgtagccgatagagccggtgaaggtgccaagggcggtgtaggtggaacgttcgtgggagtcggaggacaacgccggaatcatgccccagtaggagatgtcacgcagggagtagaacacgtcaagcacgatgaacgtgatgacgaacagcacgatgaacagcgtggtgttcacgttgaccagtccgaacatgccggagaagatgagcacgatcaacacggaggagaccagtccgccgatgaactgccacgggcggaaacggccccacttggtggtggtgttatccacgaggttgcccagcagcggatcgatgaagatctcggcgatgcggataacgacgatcaggccggtgatgacggcgatcatttgggcggcgagagccttgctgtagctgacgaacaggcagctggtgacgtacgtgacgaagtacgtgctcattgcgttgtagaaggcagcctgccccaagttgccgcacgcgtaggcgatgcgctggccgagcccgcccttcctgcggacgtcaccgtccgcgacattttcgttgctcattaatcttctccttaagaacccagagcatggatttatctatctattagataatcacttgccgacaggtgacacgccgccggttccggccccactgccggaaccgacatgggtatgttcatgaccgccgaccgcaggaacgaacaggcccgtccgccacggaccgcatcttgcggttcaggcggacg

SEQ ID NO: 3747 - DNA, 7125 bp, Unknown
  R150_10m  MAG No. k141_16022
ccaagtcccattgcacagataaggtaggaaaccatgagcaatatcgcaatcgcacccagcatcctgtccgctgacttctgcaacctcgaacgtgatctcaaggccatcgccaacgccgacctggtccacgtcgatgtcatggatcatcatttcgtgccgaacctgaccctgggcgagccgatcgtcggccgcatctgtcaggtcaccgatctgccggtcgacgtgcacctcatgatcgaggacccggaccgttgggctcccgaatacgccaagctcggcgccgcctccatctccttccacatgggtgccacccacgcccccgtgcgtctggcccgacagctgcgcgagatgggctgcaaggcctgcttcgccgtgcgtccggccgaaccggtcgagccgatcttcgatatcctcgacgagttcgacatggtcctcatcatgaccgttgagcccggcttcggcggccagaagttcctcgacaaccagatggccaaggtccgccgcctgcgcgatgagatcacccgccgtggcttgaagacccgcatccaggtcgatggcggcgtgagccccaagaccgcgcacatcgtggccgaggccggcgccgacgtgctcgttgccggttccgccgtgtacggcgccgagaatcccgcccaggccatcgacgacatccgcaccaaggccgaggccgcgttcaaggcctgagctccaagcctgaaccgcaatccacctttcgtccataaccgcaagaaaagaatctgaatcacatgaagacgtttgaatccctgttcgccgaactgtccgaaaaggcccagacccgccccgaaggctccctgaccgtcgacgagctcgacaagggcacccacttcatcggcaagaagatcatcgaagaggccggcgagacctggatggccgccgaatacgagggtgcggaccgcaccgccgaggaaatgagccagctgctctaccacgtccaggtcatgatgatcaagcacggcctgacgcttgaggacgtctacaagcacctgtgagaggaacgcaaatgctgagaatcgcagtgcccaacaagggcatgctatccgaacccgcgtggaacatgctggccgaggccggctaccgtctgcgcaccaaccctcgccagctggtcgtgcaagatcccgacaatggcatcgagctgttctacctgcgtccgctcgatatcgccgtatacgtgggccgcggcgccatcgacgtcggcatcaccggccaggatttgctcaagaactccggtaccgccgcgctcgagcacatgccgctcggctttggtgcctcgaccttccgtttcgccgcaccgaacgaatccccgatcaccactctggaggatgttcagggcaagcgcgtggccaccacattcgataagctcgtacacgactatctggtcgagcacggcatccaggccgagaccatccacctggacggtgcggtcgaatcctccgtgcagctgggcgtggccgacctcatcgccgacgtggtctccactggcaccaccctgcgcaacgccggcctgcgcgtgtttgccgaaccgctcatgcactccgaagcctgcctgattcgctcgccgcgtctgaacgagcaggatccgcgtctggccgtgctgacccgtcgtctgcaaggcgtgctcactgcacatcagtatgtgctcatggactatgacattccgatcagcaaggtcgccgccgccgtggccgtgacccccggctttgaaagcccgacgatctccccgctgcacgacaaacagtggaacgccgtgcgagtcatggttcccaaggccaaggtcaaccagctgatggatgatttgtacgaagtcggcgcacgcggcatcatcgttaccgctctgcaagcctcccgcatgtagactgttagtcgatatgaccaaccagaaagtcaacgccagatacagtccggaagcacgtgacatctatttcaccgtgcccaatttgatcagcgcgctgcgaatcatctcgattcctttcatcagcgtgctgatctccaagcatgaggtgattgcggcgctagccctgatcgccatttcctcggcttcggacggactcgacggcatcatcgcgcgcagattcaaccaagtgagcaagatcggtcagattcttgatccgatcgccgaccgactgctcattttctgctcgattctggccctcagcgtcgccggcatcatcccatggtggatgctgattatcgtgggactgagggatctgtggatggcgattcaggtgctatggcttgcccagtacggttatggcccgctgcccgtgcatttcgtgggcaaggctggtaccgcgctgctgatgatttccatcgtcagtcttattttcgccgatttgggcaccagtacgttcttccacttgctctacatcgccgcgctggccgccggcatctggggcatcgccatgtattggctcgccggatatatctataccaagcagggcgtcggattgctacgcaaggaactgggggagaagtatggcgcttgaggccatggccccggtctcgttccccatacccaaggagaatgagccggtacgacgccgcgccgtgttctcccactcagtccgaggcgcggaatcgcatcatgcgctttccccggatgacgccgccgccatccgcaccagacgtcgccgtaaaaccaacgacgattcgcttcagctcatcgatgatcttgtcaatcgtccgatggatccgatgttctccgactcacgactggtccatgagcatcgttcgaccttctccatctggtttaatcgcatcgtcgtattcatcatctgtgtcggcgttggctttgcctgcagcctattcgtgcaacagttgcaatccgatccacgtaagcaggtacggcagactttggccacgcaattggagaatcgcaactcacagatagacgaactcaccacggacgtcaataatttgcgatcccaagttgacgaacagtccaagaaaatctccggcagcgtgaaaagcgacacgcttatccaagacgaaatggtcaatggtgccacggtggtcgaaggcgaaggaatcaccatgacgctggccgatccaatcgcggcaagccagtcggatcaatcctcctcgacgagagtcggcacctccacgaacatccgagtcatcaccgatctggatctgcaacaactggtctccctgatgtttcaaaacggagccgaagccattgccatcaacggtaataggctcggcgcgcaaacctcgatacgcaaggccggcgggcatattctcatcggcatgaccgcgatacaaagcccctataccattgaagccataggcgataagagcgccttggccgaagcgatgggggagaagagacttgcaagtctttacgattccttcaaggaagccggtatctacccgcaggtgagcaaatccaattcgattacacttgaggcagcagtcactggcgaagtgaagtacgcggaaaggaatgaataatggcagccgttctgggactgatcatcggcgtcgtcatcggcgtgttcgtcaagccggacattccgatcatcgtgcagccatatctgccgattatggtggtcgctgctcttgacgccctgctgggtgccgcgcgagcctatttcgagcgcagcttctccgaccgcgtgttcgtgatctccttcctcgccaacgtggtgacggcaacactgctcgtgttcctcggcaaccagctcggcgtcggttcgcagctgcagacggccgtcatcgtcgtactcggcatccgcatcttctccaacgtgtccgcgatcagacgcttcatcttccgaggctgacaagggtactgacgtatggcacgtaaagcacaatcagacaacatgctggagaaaatgcgcgaccagcatgcacaagacaaggtcaacgaccggatggaaaccgggtcgttccccacggtgcgcaagaagccccggaaggatctcaaccgggccagcaacaaatcacggctactatcctcgattctcattgctctgatgtgcgcgctgctgggtttcgcctacatgagccagatcaataacactaaatccacgtacgagacgatggacgagagcgaactggtgcggctgctgaatgagtcgaacacgcagatctccaatctcgaacaacgcaaaacccagttgaacagccagctcaactcgctgaaatcggcggctaacgagcaggagcaggcgcgtaagatcgccaagcaaaacgaagagaccagcggcttgatctccggcagactcccggcgaagggccaaggcgtgaccatccggatcggacgaggctcgacgactaaagtggacgcctcaatcatgttcaacctcatcgaggaactccgcaatgccggcgccgaggtaatcgccatcaataacgtgcgcgtcatcacctccacctacattcaggacgccgaggaaggcttgatcgtggatggcaccaccatcaagcccacatacacggtgaaggccatcggcaatccgcaggagctgtccaacgcagtcgatatcgccggcggtgtgggcgctcagctccaggtgaaatacggatccaacgtcaacgtgcagccttctgacagcatcattatcgacgaagtacgcgaagctacgcaaaaccagtatgcaaagacggtagaataggggattatgaccaacccgattcctagcgcaggcgaaaccaccattatcggcctgcccgcgattaatgtactgcccattaccaccaccggcgatcgaccgctgactcaagaggatctggacaccatcaccagattgtccgagggaacggcattgctgatttccgccaggggagcggtctcaggttctcgttacttgcttgacgaggatgaaatcaccgtcggtcgtgatccgcgagctgatattctgctcgacgactccaccgtatcccgtcagcatgccgtgttccgcagggtcaacggtcagttctttgtggttgacgcaggaagtctgaacggcacctacgtgaaccgtcagcgtgttgatcaggcgtcgctgaagaacggcgacgaaatcatgattggtaaattccgtctcgtgttcttcacgaaatccgccattatttcccaatagtccacacccagcacggggttagactgattgcagaaattgcaatcatgtgattacaccagtgtgagtcacatgcgagacacgcatgagttaggggagtgccatgggacagacagggctgcatcttcatgtttcgcttgaggaccgtcagaatctgaacgctgacgcgattcagggggagttgttctccaatgtcgatactgaggagatcaagcgcggctaccgtggcactgtggcctccaaggtggccggcatcacgtaccgacagctcgattattgggcacgcaagcagattgttgagccgtccatcacgccgtctcatggctccggttcacgccgactgtactcgtttaaggatgtggtgattctcgctgtatccaagaagctgcttgatgccggtgtgaatctgcagaacgtgacggcggccatcggattcttgactcaacgcagcaccgatcagctggccaatgtgaccatcatgtgcgatggtcaaaacgtgcacgaatgcactaccagcgaacagatgctcgaactgttgcaaagcggtaaggcagtgttcgccgtgtcggtgggttcgttgtggcaccagattgagacggccttggaacaggaagaatatattgatcttgaggccaagccgctgacgattgccacgggccgtccgattgatgaactgactgccatgaggatgcgcaagaagctcgaggcacagcgcttgcaacgcgcaaccgcctgatacatgtatggttgttggcgacttgccggctttggtcggcaggtcgctttgttgtatgtgttgcttttgttgcctgccatcttatgtttttatatgttgcggtgattattatgactgattggaggaccgggtgaacgggattgttgtcggattgttgccgggcgttctgtggatggtcgccgtcatctttgctgtgtccatcatcactataacggtcagccgaggccatctgttcacgccgaaacgccggcgaccgccggtcgatccggtcgactggtcgatggtgaaaacgcatttcatgtcgtttgcggcggcgctgattccgtttcccgtgttgacgtttacagcggatttgatggatgctcgcatgctcgcgttctacgaccacgcgcaattgcccggagcaatcatcatattcgtgctggtgctgctggaactcatcgccatgtatctgcaggcacgcaacgcctcagaaaccgaaatggacaagcgtttgggcgttgcttctcaccggaataaggatgatgttgcgaagtagccgattctctgcggcgaggctaatccgcagctagatactactggttcggctaaaatcaccacatactattaaccgataatgtacgctgtgcgacagtgatttgaccggacttcaggaatggctttatttcaacggtttgaagccatgctaatcagcggtttggaccggagcctgccaaaggtagccaaacccgtatatgacaattggctatgggggtgaagcgacccacggcctcagcttgcattgccctttgccgcgggtcggtttcatcatacccggcactcctgcccggcgagtttcgccaagctggcgtcgggcacatcgaaccacgccccgcgtttggcggacgacaccagctccgcgcccaacccgtgccccggcgtccatctgcggacgagccccgatgcgtcgcggtacaccacgccgtgctccgacctccagaagccctgccattccggcgtctcgcggctcctgtcgaagtcgaagcagccatccctcagaagggccatgagatcgggttcgacgggttcgccggtcacagggtcgttgacgaccagactcaggtcggcagcgttgcgcctcacggcggagattcgccatgacttcggcagaccgccgggctcgaacgtcacgagacggtcgcccggcaccacgcgccaagtgtccgtcagaccgttgcgcgggtcgcggtcgggcaggtcgggcgtcgggcgcacgtcgtcggggccttggtcttcttggagtgc

SEQ ID NO: 3748 - DNA, 11695 bp, Unknown
  R150_10m  MAG No. k141_16135
ggagtgggctcaagcattgctcccctcagtcaggctttcgcctgacagctcccctcagggaggggagccaacaattattgaattattgcttagttgctcacttggcggcttcgacttcggcgatggaggccttggcggcttccaccacgtgctcggcggtgatgccgaggtcgatcatgttctgagcgccgtcaccctgcaggccgaactgctcgatggagacaggcttgccgtaggaaccgaggtacttgtaccacggcatggcaacgccggcctcgacggagacacgagccttgacagcggccggaagcacagcctccttgtactcggcgtcctgctcctcgaaccattccatggacggcacggacacgacgcgagccttgacgccctcgccggccagggtcttggcggcagccacagcccactggacctcggaaccggaagccatgaggatgacgtccggagtaccctcggtgtcgaccaggatgtaagcgcccttcttgacaccgtccttggccttggcagcggtctcggcaagaaccgggacaccctgacgggtcagaaccatggcgccaggcagggtgttcttcttctcgaagaagtaacggtaagcctcggcggtctcgaaggcgtcggccgggcgaatgacctcaagctgaggaatcgcgcggaaggaagcaaggtgctcaaccggctggtgggtcgggccgtcctcgccgacggcgacggagtcgtgggaccagatgtacaggttcgggatctgcatgagggcggccagacgaacggcggaacgctcgtagtcggagaacatgaagaaggtgccgccgaacggacgggtgtgggaacccagcaggatgccgttggtgatgcagcccatggtgaactcgcgcacgccgaagtgcagctggcgaccgaactcgttgcagttcggccactgcttggtggcgcactcggccggggcgaaggtggcagcgcccttgaggtcggtcttgttggagccaccgaggtcggcggagccgccccagagttccggcatgacggcggcgatggcgttgagcacggagccggaggcgccacgagtggcgacacccttgccgacttcgaaggtggcctcaaggtcgtcaagggccttgtcgaagccttccggcagttcaccggccttcagacggtcgtacagggcggccttgtccgggttggccttgcgccaggcgtcgaacttctcgtcccaggccttgtgggcctccaggccgcgatcggcgaccttgcgggcgtgggccagggcttcttcgtcgacgtggaaggactcctccggatcgtagccgaggagtttcttgaggccggcgacggcctcggcgcccagcttggagccgtgggaggacgggtcgttggtcttgcccggggtcggccaggcgatcagggagtggaccttgatgagcttcggctggtccggggcggcggcttcggccttggcgatgacgtcggccagaccctcgatgtcctccttgtaggagccgtcgggctggatgaagctgaactcgtcggtgtaccagccgtaggcctggaagcgcttgagcacgtcctcggccagcaccaggttggtgtcgccttcgatctggatgcggttggcgtcgaagatcacggtcaggttgccgagcttctggttggcggccagggaagcggcctcgccggagatgccctcctcgatgtcgccttcaccacagatggcccaaatcttgtggtagaacggggaatcttccttcggggtctccgggtcaagcagaccgcgctggaaacgctcgccgtaggcaaagccgatggcggaggcgaagccctggcccagagggccggtggtcctttcgatgcccggggtcaggccgtactccgggtggcccggggtgcgggtggcagcgccgccacggaagttcttaaggtcgtccagggtcacgccgtagccggagaagtacagctggacgtactgggtgagggaggcatggccaccggaaaggatgaagcgatcgcggccttcccagttgggatcattcggatcgtgcttgatgaagtgctggtacagcgtgtaggcgacgggcgccagggagacgggggagccggggtggccggagcctgccttctcaaccgcgtcagccgaaaggaccttcgccatcttgatggcgcgctcgtcgagctcggtctccttgaattcggtcatggattactttccttccaattggtcgggccgcgtatccggcttgtgccgggcgcttgacgccctcacattgcgattaccatgctagcgtcggtttgcgacgttgcggtgcaattttggcgtgttttggtagtttgtgttctgttagcgttcacagtgaacattgctacgctgcaaacgaacgcattagcactcaagcctaaggagtgctaatacaatgttctaaggtgaagtgcgccacctgcacgtggcggagccaagaaagaggcaatatttctgggttcccgcgtgtcgcggcgtggcgaaccgaccgtcggggtacgccctgagtgaaccgtgactgatatgaatatgtatgcatatataaggaggcgcgcatgacgcaatcaagacgcatgctggtgctgcgcgccgtggtggaggattacatccgttctcaggagcccgtgggctccacttcgctgacgcgcgaccatgatctcggcgtcagttcggccaccatccgtaacgacatgtccgctctggaggatgaaggatatctgattcagccgcacacttcggccggtcgtgtgcccaccgaaaagggctatcgatactttgtggaccgacttgctaccgtggtgccgctcagcgaggcgcagcgccgcggcatcaacagcttcctgtccggatcggtgagtctcaaggacgcgctgcagcgttcggcacgactgttgtccgaaatcaccggtcaagtggccatagtcacctcgccatcgctggccaaggccacattgcggcacgtggagatggtgcccgttgccatgaccacgttgctcgcggtggtgattaccgacaccggccgcgtggcccagcacggcctgaccatcgcatctatgcccgccgtggacgagatcaaccggctctccaacaccgtcaacgaacaatgtgtcggactgtccctatcgaaatccgcggagaccgtgcgatccatcgccgccagcgccggctacgagtcggtgcgcggcgtggccgacgcgctggccgacgccttcgaatcgatggcattggacgaacgcgcggacgaactgtacatgtccggcacctcgcacctggcccactcccgatccctggccgatctggccccgctcttcgacgcgctggaagaacaggtcgtgctgatgaagctcatgagcaacctgagcgaggagacgaatgcatccggcgtgggcgtggccatcggctccgaaatgcacacccccggcctactgcatgcctccgtggtcagcagtggctatgggcgcagcggtgcggcgggcgaaccggcggggaacgatcccgtaggcgaacccgaaaccgaatccgagacggagagccagacgaacgacacggaacccatcgccttcgtcggctccatagggccgacccacatggactatgcggccactatggccgccgtcagggccgtagccagatatttgaccgccttcctctccgagggccggacccaagactgaccgccgtctgtggcacaatgacccgcagaccaaacgaacacaaaggatcaatcaagtggcagattattacgagacgctgggtgtggaacgcggcgccagtgacgacgagatcaagaaggcataccgcaagctcagccgtaagtaccaccccgacatcgcgggccctgaattcgaggacaagttcaaggaagtgaacaacgcctacgatgtgctgtccaatccggacaagcgccgtatgtatgattcgggcgtcgacccgaacgatccgaacgccggtgccggcggcttctccggggcgggcttcggcgatatgagcgacgtgttctccacgttcttcggttccgcgttcggtggtggctcacagggcccggtgccgcgtacccagcccggccgcgacgccctggcctccgcgtccatcgacctgaagaccgccgtgttcggcggcaccgcgcacgtcaagatcagcacgttctccctgtgccaggagtgcggcggctccggcgcccagggcggcgcacagccggtcacctgccccgactgccacggccagggattcatgcagaaggtcgtgcgcaccatgctcggccagatgatgacctccgccccctgcgaacgttgcgagggccacggtaccatcatcaagaacccgtgccccagctgcatgggccacggccgtgtgcgtaccacacgtaccgtgggcgtcaccgtgcccgccggcatcaacgacaacgcgcgtctacgtttggccaaccaaggcgaagtgggtgagggcggcggcgctgccggcgacctgtacatcgacattcgcatcaaggcggataagcagttcacccgcgatggcgacgacctgcactgctggattcaggtgccgatgagctgggccgtgctcggccacgatctgtccattgacacgttcgatggtgagaagaccgtgtccatcccggccggctgccagcctgaggacactgtgacgcttaagggactgggcgtcacgaacatccgcaacaaggacgagcgcggcaacctcatcgcccacgtcaatgtgctgattcccaccaagctcaacgaaaccgagcgcggcctcatcgaacagttcgccgcctcgcatgattcaggcgccacgcacgtctcccaggcatcccgtccacaggctggccaaaagaaaggcttcttcagcaagttgaaggacgcgctgagctgagagtggatgcgttcttggctcccctcagagaggggagccaagtctgttacttcagcagggagcggcacatggagcggtattcgttgacgtagccgccgccgaagaagacacagtgaccggcgatggggtagagctgccagagcgtgatacgctcctgccatccggccttcaacggatgcacggactggtagccctcggtgatttcgctcagatagctcatgccgaacaggtgcagcatggccagatcctcctcgcgatgaccgccatgtgccgccgggtcgatgagcacagcctcgggctgcccggaatcggcggtccacatcacattgccgctccacagatcaccgtggatgcgcgccggcttgtcggacgcggctcggcccatcagatccggcaacgcttcaatcacgcgctcggtcagttcgacatcgcgcttatccagctcgccacgcctcacaccaaggttgaccatcgggcgcagacgtccatcagcgaaatagctgatcgggtcggtccactcgccggtatccattttcactgggtcctgcaatggcccgaaatagcatgtgccgttatatccgtcaggcgcagacccgaaatattcggcacccacatcatgcatatgggccagagccgcaccaaaagctcgtgccgcctgaggcgtgggggacgcgctgcccacacgttcgatatccagataatccttgccccagccgtatacctgcaccacgcgcgggccgccctgcgcatgagccgctcccaaccattcgagtcctcgaccctcgcattcgaagaatccttccggtgcgaatgccctgcttttgcgatacgtggccataatgctcccttcgtcgcttacgtactatatccactttcattgtagaagccgtggatgttaccgattcttagtgttgttctacacccccttgggtagggtgttcatcgtcataacacatcaaatacttagaaatcacgaggggttatgaattttttccaagcgatcattctcggcatcgttcaggcgctgaccgagtatctcccggtatcctccagcgcgcatatccgtattttcggcgatttgatgctgggctctgatcccggtgcggcgtttaccgccatcatccaaatcggcaccgaacttgcggtgattctgtatttccgtcacgacatcatcaatatccttactcactggttcagctgcctgttcggcaagaacggcaaggattggaaggcccgcatgggccgcggcgacaattacgccacactcggctggaacatcatcgtcggctcgattccgattatcatcctcggcttcactctgcagaacgtcatcgagacctcgttgcgcaacctgtggattacggtaaccgtgctgttggtattcggcattctgctgtggatggtggatgccaaggctcgccagaacaaaaccatgaatgatatgacgtatcgtgatgcgttcctcttcggtttgggccagtccatggcgctgattcctggtgtgtcccgctccggcggcaccatcaccgtcggtcgcgcactgggctacacgcgtgaggccgctgtacgtctgagcttcctgatggccatccccgcggtgttcggctcaggtttgctcgaagccatcaaggccgtgaagaactacaaaaccgatgcgatgttccccggctgggggccgaccctcgtggccatggtcatcagcttcgtactcggctacatcgtgatcatcggattcctgaagttcgtatcgaacttctcctataaggccttcgccatctaccgcatcggtttggctgtggtcgtcgccttgctgctgattgtgggcgtgctgccggccatcgatccctccgtggcggctgcggcataagacgggtcgatagacgactccaatataatggtgctcccgctggcgggagccgtcagcgaagctgactgggggtggtcactggaatatgccagcagaaccaccctcagtctcgctacgcgagccagctcccgacattttgtgcgacgtgcacatggtgcactgctatgaacagcccacagggctgttcatccagcgggagcacgccatatatgggctaattgcccatctggcgcagaaacgcttctgcttctttgactagttgttcggcctggggcgctcccaaggaagcctccgcctcggctttctgctgcaagtcgtagtcgtgctccaaatgctccacgtaatcgtgaagctggtcattacaacgaaccagtatcgaggcttgcgccttccactgttcggctttctgcttcagatctgccgtatcgaaggtgaagccgatatgcttgcccaacgcatccagcaatcgcatagtgccggcagaacattcgtcgctgcccaaatattgggggatggacacccacatcgaggaatgagcaaaaccttgctgcgcggcggccacatccaaaacggtaggaatgcctaccgggccgttatacgaccggtctccttcgcattgacagtctccgtcgctgacggcgatgggcaacggacgggtatgcgggcaatcggagaacatcgaacctaacgtaatgatccgattgacatccagctcatcggcaatggccagactctggctacagtattccttccaccgatagttcggttcgggggcgatctgcgcatagatatgcttgcctgcgtccaacgtgatgtcgtagaacgtggtctgcggccagataagattggtgcgtcccgcaacatggcacagcataggacgggcaacctgatagtcatagaaatcatcacatctaatatgacgaatctcgcgggactcatatcgcttgaccagatggcgcaccgcgttcgtcgccgcctgacaggcatcattccatccctcgaatgcggcgatcaatactgcgccggtgtccttcgctgcttcactcatacctctagagtaactggaattcattgcccgaagcgcacgctttagccataagcgagagtatgcaattacaggcgacacgccgcagctggacgaactacacgcatgtgagtatagtaaacactcgtgcttcggcagggagacctcgccaaggaaacacacgcggacatagcttagttggtaaagcgcaaccttgccaaggttgagaccgcgggttcgagtcccgttgtccgctctaggtccgtgagttgacagaccttacggtgggttagccaagcggttaggcagcggcctgcaaagccgtatagacgagttcgactctcgtacccacctctcagaccagcgaagcaattcaatgggatgaaatatgacccgggcggttggcgcagtggtagcgcacttccctgacacggaaggggtcacaagttcgaatcttgtatcgcccacgaaagtcgaagcaattcgactggatataactgaagaaccgagtattcgggcgattggcgcagcggctagcgcacttcgttcacaccgaaggggtcgtaggttcgattcctacatcgcccactggattccgcttctcacggcggattcctttgcggacatagcttagttggtaaagcgcaaccttgccaaggttgagaccgcgggttcgagtcccgttgtccgctccacaacgaaacctcgcttcggcgaggtttttttcgtattggttcagatgctggtggtatttgtcgcacgcccaacctatcgtgtcctacgttgattaaccagtccaggcctgcacattagtaccgtgggccccgatagcaaaggacaaatcatggcgcaagctaccatctccataaccgtcaacggcgaagcgaaggaggtggaagcaaccaccaccggcgtagaactgttcgcggaagacaagaacatcatcgcggtcaagatcaacggcgagaaccgtgacctgtacacgccgctgaacgatggcgataccgtcgaccccatcgccctcgactccgaagacggcctcgcaatcatgcgtcactcggccacccacgtcatggcccaggccgtgcaggaagtctacccgaacgccaagctcggcgtcggccccgtcatcaaggacggcttctactacgacttccaggtcgaccagcccttcaccccggacgacctcaaggacatcgagaagcgcatgcagcgcatcatcaagtcctcccagtccttccgccgccgttccgtgactgaggaagaggctctgaaggaagaggccgaccagccctttaagatcgaactgatcgaagacaaggaagcacacctcgacccggccgccgccaccgagatctccgaaaaggagctcagcttctacgacaacgtagaccgtgatggcaatgtggtttggaaggacctgtgccgcggtccgcacctgccgaacacccgctacatcaaggccttcaagatcgagcgttccgccgccgcctactggcgtggttccgagaagaacccgaccatgcagcgcatctacggcaccgcgtgggccaccaaggaagacctcaaggcctaccagacccgtctcgaggaggccgccaagcgcgatcaccgcaagctcggtgccgagatggacctgttctccttcccggatgaaattggccccggcctggccgtgttccacccgaagggcgccgccgtgatcaacgcgatggaggactactcccgtgagatgcaccgcaagcaccactacagcttcgtgcagaccccgcacatcaccaagggcggcctgtacgagacctccggccacctgcactggtacaaggacggcatgtacccgcccatgcacctcgacgaggagaaggacgcggacggcaacatcaccaagccgggcgccgactactacctgaagccgatgaactgcccgatgcacaacctgatcttcaagtcccgtcagcgctcctaccgcgagctgccgctgcgcctcttcgagttcggcaccgtgtaccgctacgagaagtccggcgaggtccacggcctgacccgcgtgcgcggcctcacccaggacgactcccacatctactgcacccgcgagcagatgaaagacgagctcaccagcctgctgaccttcgtgctgaacctgctcaaggactttggcctgaccgacttctacctcgagctgtccaccaaggacccgaacaagtacgtcggctccgacgagatctgggaggaggccaccaacacgctcgccgaggtcgccaaggaatccaacctcgagctcgtcgacgatccgtgcggcgccgccttctacggcccgaagatctccgtgcaggcccgcgacgccatcggccgcacctggcaggtctcgaccatccagctcgacttcaacctgcccgagcgtttccagctcgagtacatcgcgaaggacggtacccaccagcgtccggggatgagtcaccgcgccctgttcggctccatcgaacgcttcttcgccgtgctgctcgagcactacgcaggcgccttcccggcgtggctggcccccgtgcaggtgctcggcgtgccggttgccgacgagttcgccccgcatctggccggtttcgtcaagtcccttgaggacgagatggtccgttgcgagatcgactactccgacgatcgcttcggcaagaagattcgcaacgcctccaagtccaaggtgccgttcatcctcatcgtcggtgaggaagacatgaacaacaacgcggtcagcttccgcttccgtgacggcagccagctcaacggcgttccggtggacaaggcccgcgagcagatcctcaccgtcatcaagaagcgcgtccaggtgaactccgccgacgacttcaacgccgctgtggctgagtgatgtgaatggtactggctcccctctctgaggggagctggctccgtaggcgactgaggggagtcctgcatggctcgcactcccctcagtccgtttcacggacagctcccctcagagaggggagccaagaaagggtgcgaaaatgactgacgtgcgtgtcgataatccggcggactttccgcctcaggaggacacggtcgaacgactgtggactccgcagcgcatgacctatgtgctgcgcaacagcgaggatcgcccaaccaagcccaagacgaaggaatgcccgttctgcgccggacccaagaaatccgacgaagacggcctcatcgcctggcgtggcacgcacgtgttcgccatcatgaacctctacccatacaatgtcgggcatctcatgatctgcccgtaccgtcacgtcggattcatcaccgaactcgacgatgccgaactgttcgaattcgagaaggccaccaccctcgccatgaaggtgatggaaaccgtctcccgtccgcacggttacaatatcggcattaatcagggcgaagtagcaggcgcaggagtcgccgctcacctccatcagcatgtagtgcctcgctggaatggtgacgcgaacttcatgcccatcgtcgcccagacacgcaccatgcctattctgctgtccgaccagcgagaagcctatgcccaggcattcgaacagctggctccgcagtatcatctgccgcttgcctaacacaggtgcggcaccccgcgtgaccggtcttatcggtacgcataacaagacaatcatcggaaacatcacgggtatgtctgattaacggcctacaatcgtttcgtttgacatcatccgtttcaataattgctaggagcattatgtcaggtcattccaagtgggcgaccaccaagcacaagaaggccgccatcgacgccaagcgcggcaagctcttcgccaagctcatcaagaacatcgaaatcgccgcccgcctcggcggtggcgacccagacggtaacccgtccctgtacgacgccatctac

SEQ ID NO: 3749 - DNA, 15329 bp, Unknown
  R150_10m  MAG No. k141_17073
atcgccatgttcattctcgatttcacctgcatacatccgttcaatgacggcaacggccgcatgagtcggctactcacgctcctgatgctgtaccgcaatggctatatggtcggcaaatacatcagtatcgaacaccttatcgagcaaagtaaaagcacttattatgaggcactggccgcaagcacccaaggatgggacgacaacgccaatgattatgcgccattcacgaactacctgcttggcatcatactgtccgcgtgcaaggaattcgacgaacgcatcaatctcacggcaggcggcagagcgcagggagcaccgcgagtagccaccaagggaatgcggattgaagcactgcttgatcaatccctagtgccactctccaaggccgatattctcgctcgcatgcccgataccagcaccaccaccattgagcgcacgctgaaatcactgttggactccggtacgatcatcaaaatcggtgccggtcgcagcacccgctatgtgaaacgccgctaaacgcatccttgtgcgcaacatctcgtcactcttccggcgccccgctggccacgcgaatcatcgcgtactgcgactcgtagaggcggtagtacgcgcccttggcggcgagcagctgcgcgtgcgagccgtgctcgacgatctggccgtgatcgatgtagaagatctcgtccgcgttctcgatcgtcgacaggcggtgcgcgatgatgaagctcgtgcgccccttgagcagatgctgcaggccggcctgcatcgcctcctcggtgcgcgtgtcgatgttgctcgtcgcctcgtccaggatcaggatacgcgggtcggcgagcagcacgcgcgcgaaggcgatgagctggcgctggccggccgacagggtcgatccgcgctcctccaccaccgtgtcgtacccgtcgggcagttccatgatgaactcgtgcgcgtgcacggccttcgccgccgcctcgatttcctcgtcggtggcgtcgagcttgccgtagcggatgttctcgcgcacgttgccggagaagatgaaggtgtcctgtagcatcacgcccatctgccggcgcagcgatgcgagcgtcacgtcacgcacgtcgtagccgtcgatcgtcaccgagccctcggacacgtcgtagaagcgcgacagcaggttgatgatcgtcgtcttgccggcgcccgtcgggccgaccagcgcgatcgtgcgccccggttcgacgtggaagtccacgaggttgaggatgttacggccgtccttctcgtagcggaacaccacgtcgttgaagtcgacgcgcccgcgaatctgcggcaggtccgccgcgtcgggcttgttgcggatctccggcgtgacgtcgagcgtctcgaagatgcgctcgaggtacgccgagcaggtgatgagctggttgtagaagttgccgatgttgatcaccggattccagaagttgttcgcgtagccgacaaacgcgatgagcacgccggtggtcacgttcacgcccccgaagcccatcacgccgacgaagtagatgaacgagatggtcatcacggagatggtctgcacgcccggccacatgaggaactggatgtgcacggcgtgcatccacgcggaacgcacctcgccctgctgctcctggaaggtcctgaactgggcctgctcctgcgcgaaggtctgcgtggtcttcacgccggcgatcgactcgtggatgtaggcgttcaggttgctctgcttgttggagagcttctggaaggcgcgccgctggaagatctgcagcacgcgcacccagatgatgagcaccgggaacaggatcaagctccacagggccagctgccagtcgatcacgaacatcacgatcagagtgatcacgaaggtgaacacgtcggagatcacgttgatcagaccggagctcagcgtgtccgaaagcgtgttcacatagttgaccacgcggatcaggatcttgccgtgcgggcgcgaatcgaagtagctgaagggcagcgtctggatatgcgtgaagatatcgcggcgcatgtccttgagcatgagctggccgacgcgcgtgatcgccaccgtgcggtagcgcagcccgaactcgtacagcacgatcagcgcggcgaggattacggcgaggatgccgagcttgccgaggtccttgttcgggatcgcctcgtcgatcatgatcttggtcaggtacggcacggcgacgacgatgcagctcatcgagatgacgacgacgagaatgcgcgccacctgtgccatatacggtttgatatatttgccgacgcgagcgatgtcgtggaggttgatggactcctccagctcctcatcctcgcggaatgtattgcgttgtgccataagtcctcttctaaaacccctgtgcggcgccggactggagtccgagctgcttgtggtagatgtcccagtagcggccgtgtgcggccacgagttcggcgtgggtgccgcgttcgacgatacgtccgtgctcgagcaccagaatcaggtcggaatccttgaccgacgagatgcggtgggcgatggcgacgatggtcttgccgccgtccatctccttgaggtgcttctggatctccgcctcggtctccatatcgacggccgaggtcgtatcgtccataatcaggatcgacggattgtccgcgagcgcgcgggccagcgacaggcgctgcttctgcccgccggacaggcccacgccgcgttcgcccacgacggtgtcataaccctgcggcatcgacctgatgaaattgtccgcgccggcgatctgggccattttctggatatatcggtcgtcgctatcatcgctggcaccaaaaccgatgttgccgccgatggtgtcggagaacaggaacgtatcctgcgccacgatgcacacctgcgagcgcaaggtggtcagcggccagtcgcgtgcgtcgatgccgtcgatgagcacatggcccacggtcgggtcgtagaagcgggagataaggctgacgagcgtggacttgcccgcgccggtttcgccgaggatgccgagcttggagccggcgggcacggtgaagtcgaggtccttgaggatcggggtctccgggtcgtccgggaaggcgaagctgacgtggtcgaagcggatgtcgcccttgatgtgcagcgggcaggacttgcgttcggcggactgctgggcaccggatgttccggaagccccgggcgctccggtagcctcatcatcgtgcttgacctgctcgacgatcgtgaccgcctgcttgacggcttcggccgcgtcgggcttctccacgatgcgcggctgttcggtgagcagcttacgaatcttgatgcagctggcgttgaatcgctgccagtcgttgatgagccagccggactggcgcaccgggccgtcgatcatccacaggaaggagttgaaactcaccagattgccgagggtcatgtagcccttgatgacaagaaagccgccgaggccgagcgtgatgagctgcagcgagaagccgaggccgtccagccaaggcatgtacttgcgcgagttgtaggccagggccatgttgcgatgcatgtaatcgtcgttgtgctcgtcgaacttttcggtctcgtacggttcgcgcacgaatgccttgaccacacggttgccctcgatgttctcttcgaccatggagttgagggaggccagcgagttgcggatggagaagaacagcgggtgagcgtgcgtggacaggccgcgcgtgagcacaaaaatgaacggcgtgacgcaggccaggacgagcgcgagtcgccagtcgatggcgaacatcacgcacagggcgcccacgaacatgaccacgcagtcggcgatctgatagctcacccaactcaggcagtggcggatcgcgtcggtgtcggaggtcaggcggctcatgatgtcgccggtgcgtgtgtggttgaagtacgtgaagtcgagctcgtgcagcttctcgtattcgtcggagacgaggcggtagaccgagttctggccgaaacgctccatccacatctggtagccgtatcgcgcgcccacgcggatgatggtcatgaggatcatcagtccacacagacgtggcagttcgtcggcatgtccgccgacgatgacgcggtccacgatgataccggacagaatcggaatggtcagggccatcgtgttattggcgatgaacagtaggagcgcgcctgccacgcggggcaggtctggtttgcagtatggcagcacccatttgagattgcttgcgctggtatcgattcccggatcgacgtacatgtgaggagatcaccgtttcttggggattgtttgcttgtggtatggtgcggcatgctcctgcgccgcacgcggcaatcgctgccgccgcgattcacgatcagccgtgcttcgcactgcgcctgtcattggccgcatgaccggagctctccttcatcggtcgaagcacgttcgactttcgcaaacgcgtattagtctagacggcctgcgtccaatcgcaacagcccacaactctgcgtgttccccgccttagcaacgcggcacggcccgctaagcgcaacattccccggaatgtgtcgctgcgcccccaaacaggcccaattcgcgacacattccccggaatgtgtcgcgcgaaacgttgcgcatgcggcaatgcacgctcgagacctgttgcataccagtcgaccaaattatagaatcataattaagtaaattacgattctataatttgcgcgtgtgtgccagggcagacagcaaagcaaggagacaagggccatgttcgtcgggcgagataaggagctttcggcactggaacgccgctggagctcacagcagttcgagtgcgtcgtggtctacggccgtcgccgcgtgggcaagaccacactcatcaaccgcttcctcgaagatcgccccacgattttcttttcggcaatcgaatccagcgcttccaagaatctcgaatcgttaagccgcagcattgctctgtatgaaaagggctcagaggcgttcgagacaacgcccgtataccgcagctttgaatccgcactggaagcggtgttcgcgctggccgcaaagcaacgcatcgccttcgtcatcgacgagtacccatatctggctaaagcagaccggaccatcaattcggtcctgcagcatgccatcgaccgccataaggatgacagccagctcatgatggtgttatgcggctcttccatgtcgttcatggagcgccaggtgcttgggtatgagagccccctgtacggcagacgcaccgctcaaatcaaagtggagccattcggctacgccgatgtccgcaagttcttgccaagatacagcaacgaggacgccgccactgcttacggacttaccgacggtatcccgcagtatcttcggcaactggacgacggcatcagcatccgagacaacatccgttggaacatcctcgacccaagctgctatctgtttgaggagccagacaacttgctgaagcaggagctgcgcagtccggccgagtacaacgccgtaatccagaccattgcctccggggcatctcggtcgaacaccatcgccaccgcatgccatatggaatcgtcctcatgcgccacctatttgcgcaatctcatcgatctgggaatcgttcgcaaggagacacctttcggcgaggacgctcctcgcaagacgatctaccgtatcgaggactcgttcttccgattctggtaccgatatgtgccgaacaacatgtccctcattcaatccggtcatgccgatctcgccgccgaccgtgttatgcgcactatctccgactttatgggacaggtgttcgaagacatctgtgttcagtggatatggtcccataacggtaccgaggcattgcctttcctcatgcttgatgccggacgttggtggggcgccaatccgaccacccgcagtcaggaggaaattgacatcgtggcttcaggagaacaaccgaaaactctcctattctgcgaatgcaaatggcgcagcgtgccatccggtctgcagcagttggaagtgctgcgcaatcgcgccagactgctgcaccccgaaaccagccattacatgctgttctccaaatcaggcttcgacgagcatgtcgccgcccgcgcggcgcaagacggtacagtgacgcttgtcgattttgcggatatggattagtcggttcactccattgcggacggtaagggtgaagtaacagggctgggtcaatggaccgaacctctaggacgggcaacagacccaattcgcgacacattcccgggaaagtggtgcgcgttacatcacgctcaaacaacccagcatgtatatgggcaggtattcggttcggccaacagtctccacgttgccatcatggaacacgtaggcatgtcctcacacgcttgtatctcgtcaagaaacagcagagtcttgcccggcgtaatttccgcgccggaaagtaccgataaccgcagtatcaggtcttcggtgtccttggccttgcttaccgtttcgaccgcctgaggcatttcgatgaaattcacctcagccacatgctcataatggtctgcaccgaactgcccaatcagcgtggtcttgcccacctgccgggcacccgtgaccaataagccctacttggttttacggttcttccaagtcagcaaccggtcatatgcatggcgcttgagcatattcccctcctcttttgtggagaatgactgaaaacacgcaggtcatcacacaatcacataccgatatcatcttagcattcacgtttttacatatgcaaaacgcactttgagtcacaaaaaacacaagaatagtgaatggttcattcacgttttacgtattgtgcgacggaatcggcatctcccgcaacacgtgagatatacaaaagtgccgcacgctgaatggtgatcagcgtacggcactgcgcgaaacgcgtgaaatccgcagaacgcacgaaactcacgaaacaaataaaacgtacaaaaacgcaagcaaggcgaagacaacgaacagacagagacagacagcctacaggtcagaacgtcagcgaacgcacgtaggaaccaacttgcgggcggacgggaaccagcgagccgtcaggattgtagtcaagcggcgcgaataccacttcgcgatgacagccatcgcctccagcccagcgaccggccggattgtaggcgaaccggtgatacgcgataatccattcgtcggtgccgggaatattcacgatgttatggtgaccggtggcatacagcttgcgcgccgggtcttgttcgatcagcacgcgcggttcgctccagggcccatgcagcgattcggccatcgcgtacttgacgcagtattccggctctcgggcgtcgttctccgaccagctggcgtagtagatgccgttgcgcttgtgaatccagatggcttcacggaaatcgcccggcacccagctgaaagcgcgcgattcgtcgaacgacagacagtcctcattgagcggcgcggcccaagctatgccgttgccccacaggaagtaccgggtgccctcatcctccacgtatacgccggggtcaatggtgtggcaatcgaacgtaccttcgcgcacgattggttcgggctcaggcacgaacggcccgcacggggattcgcccacagcggcgccgatctgggaaccggccacgaagtagaacacgtatttgccgtccgcgcgctgtaccacggaaggcgcccaagcaccatccgagccatcccaccacggcacatcgcgcaagtcgagcgccggatatcgctcccatgtggccaagtcgtcagacacatacacactgaacgcggtggtgtcccaattatccacaccgtcatcggtgcagtacaggaaatatcggccatcgaaaatggcaagattcgggtcggcgcaatacctgcgcagcggattagtggtcagtaccgcgttattcacgcgatgaggaaggccgtcacgaggcacggctctcggttttggcgatgtttgtagcacagtgccaacagtacccatgggaaattcctatctggtgaagaacatggctccccacacgccgcggaaggggatgatatgagcgtagtggggagccggaattaataccgtgatcagccagccgactagtcgatcagccgatcagcccttgaccgaaccggcgacgaggccggagacgatccacttctggcagaagatgaagaacacgaacacgggcagcagggcgagcacggtgatggtcatgaagctcggccaatcggtcgagaactggcccaccgcgttgtacacctgcagcacgattgtgcgcagttccgagctggagaggaacacattcgcgttcatgaagtcgttccacgtgcccatcgtctggaacacgaccacggtcgtcaggatcgggcggatcagcggcatcacgatcgaccagaagatgcgcagcgggccggcgccgtcgatgcgtgccgcctcgatcagttcgaacggcaggctgcgcatgtacccgacgatcaggaagtagcagaacaccgctccgcccaggtagataatcaccagtccggccaaggtgttgaccaggtgtgcgttcgcctccatgcggtacagggggatcagcgtcgtctgcgccggcacgacgaacgcgaccatcaggatcgcgccgaccgcggcggtgaacgtggacttgcgcaggatcatgccgtatgcggccagagcgccgacgagcacctggatcacgaccgcgaagaacgtgacgatcaacgtgttcagcagggagcggaacaccgggaccgtctcgaacgcgttgatgtagttcttgatcgtccattccttcggcaggccgagcgggttggcggacatgtccggaatcgtcttgaacgtgttgatcaggatgtaccacagtggaaccgcgcataccagcgcgatcaggatcatcaccacgctggtgaccgccgaaccgatcctcttgcgcgtcgtgaagttcatgcccttcggcgcggccgtgacggaagaagccttgttgcccatgatttactcgaacctcctcgagatcaggttggaaatgcccatctgaaggaacaccacgacgcccgtggcgatgaagaacaggaccgccagcgcggaaccgatgccgtactgcgactggccgatgccctgctggatgatcgactgcgtgaccgtgtacgtcgaatagcccgggccgcccttggtcatcgtgaacggcaggtcgtacaccttcaggccgcccgacatgagcaggaacgtcgaggtcacgatgcccggcatcagctgcggcagggtgatatgcgcgaactgctgccacttgttcgcaccgtccacggtcgcctgctcgtacaggtccgcggggatcgcctgcaggaacgccaagtaaagggtcgcatgccagccgatctgcgcccagatcgcgatgaagatcacgcagaacttcgccagagagttgttcgacagccacggcaccggtcccaaaccgaacgccgcgagcacgctgttgaccacgccggtcttcatcggggagaagatgtacttccacaccatgcccatgatggccagcgacggcaccgagaagaagaagaacacagagcgcacgaaatcacggccgacgaacttgcggttgaggatgaccgccagcggaatggcgatcacggtcaccccgaccatcaccacgatcgcgtacaggatcgtgaagcccaggccctgcagggtggacggatccgtaaacaccttcttgtaattgtccagaccgacccagttcatgtccatgctgtaaccgttgaagtcggtgaacgagaagtacgcggtctgtgccaacggcaccaggaacagaaccacgaacaccgccaggatcggcagcaggaaccagaacgacgtcacgtcctcatgcaggccacgcgcacgacgacgccgacgatacaggtcttcgtccaacggcggcaggttgccgaccgccgagccttgcattgttgcgctcatatgccatcctcctttgacattggcttatgaccgaaatccgattgcgggcatgcgaagggcgaccagccgcagccgacaggccgccccattaccatgcgcacggttcatgacgaaccggagattgtagttatctatgtgtgattatgtgcgatccgttgcgggtcactgcgcggccgcgaccttggcgtcgatgttcttggcgtactggtcgggcgtgatctgcccctgcaccagctgctggttctgcgccttgagttcgctcttgagaatgtccggcttcgaatagaagttggtgtgcaggtagtacttgccggtcttgatgtcctgattgtagaccttctggtactgcgtcatcaccgtagcgtcgaacccgtcgacagtgacagcgtcgccggcgtcgttatgcttctgcagcgcccacttgcttgacaggaaggtgaggaacttctcggcggccttgagcttgtcgccgtcgagcttcgcgtagatcgcccacgccggggaggcggagccctgcgcgtactgcgtgtagtcgtcgccgagcttgggcatcggggcgaagtcccagttcatgccggcctgttcgaaggtggcaaagtcccacgcgccgtcgacgatcatcgcgacctgtccgttggtgaactgcgtcttcatgtcgtcgccgctgatgccgaccgtgtcacgggtcacgccaccctcatcgtacaggcgggtgtattccttgacggcctcgagctcgtcggtgcccggcgtctggttttcctgcgtggacagcgtggtcgggtcgacgcccttcttctcgaggatggatccctggaaggcgtcgatgaagcggctcggctcgtcggcgttcggctcgaggaacggctcgatgccggcgttcttgagcttcttgcacagcttgaggaagtcgtcccagttcgccggcggctcgtcgtagccgacctgcttgagcagatccttattgtaggcgatgccggagacccacgaggtgatcgacatgccgtaggtcttgccgtcgcggccgacgaagtccttgttggcctgggagatgttcttcatgaacgactcgtcggtcaggtccttggcgtagccgttgtcgatgaggtcgtcgcgattctcggaggtgatgatgaacacgtccggggcctggttgccgacgaggcgggtctgcagcgtggagatgtactcgctggtcggcggcgcgtagctgaaatcgatcttgatgtccgggttttccttctcgaactcgtcgatgtacggcttggacgtctgctcgttgtcccagctcaggtagctgagccggatcttgccggcgtcggcgtccgagccgcaggcggccagcgggaccagcatcgctcccgcgcaggccagagcgagcattcgtttgccccagatcttcattgacattgcaactctcctttgtgttggtggcatacgccatgttgtatgccgaaagaaaccacattgtcttccgtgcaagagcccggttttaaaccgatttaatcttgtagttgtatttatagcactccgttcaaacggcgtcaactcgttgcaaaaccttttaaacacaagggctgtggaacgcgcggaatcgcaccggacaacgaaaaataattaaacaaaaaacgccgcgagttgtcccaccgatcggcgatccaccgcgaacaaccaccggacgaccggtcagcgcgtgcggttggacgactcgcgcaccagcacctcataacccaccgtgacatgcttgggcatggccggcgcgccgtaacacccctcctcgatgcgctcgcacaggatgtcgacggcctcgcgggcaagcttgtcgatgtccaccgcgatcgtgctcagcgtcggcgcgctgtacgatccctcgcgcacgccgtcgaagccgatcaccgccacgtcgtccggcacgccgatgccatgctcgcgcaacgcgcgcaacgtgccgaaagcgatcgcgtcggtcatgcagaacagcccgtcgaacgggaagtccccctcctcgatgcgccgcgaaaccgcgcggtacgcgtcgtcggtgtcccagtcgaacagctggatcgtgtcggccttggtcagcgtgcgctcatgccgctcgaacgcgcgatggcagccgatcagacgtcggtcgcccacgtgcatcgaccggcgcgcctggtcggccggtatgaagtccgtaccgaccagcccgacgcgctcgcaccctatctcgaacaggtgcgtcaccgcggcctcggcgccgttctcgcacggcgtgaacaccgagtcgaacggcccttggtacgactggtcatcgagcagcaccaccggcttgcccctgcttagctcaatgatctcggcgtcgctcaggccgcccgcgctcaggatcacgccgtcgcagaacttgttggcgaccttctcgaggatgcttttctcatggccgaccttgccggtcgagatctgctgcgccacggcctggatgccgcggtcgaacgccgcattcgacacgccggcgagcagctgcgcgtagaacggccggtcaagctggaaaacggcggcctcgatcacgccggttcgccccgaacgcaggctcttggcagtgatgttgaccgaatagttcatccgattggccacgtcgatgatgtgccgtgccgtttcttgtttaattctgggatcgccgcgcagagcaaacgacacggacgcaggagagacacccgccgccttcgcgacatcacgcatcgtcaccgccatggcgtcctccttaggtatttatgggcttttcggcatctcaccgagcagctgccgacaccttcaatcatccatttgacgaagacaacctcgacgtacataatggccaccaggaattaaatcggtttaacgctgaaggggcaacgtcaccacacacagggaccgccgctcccgacggcgcgacgccgaaccaccccaacgcgagtccgccgcacgccggccacaacgccgagaccggccgcaggccgcatcatcgtcatcgcaaaggagtacgcatcatgaccgacaccatggcacacacccaacccgcatcacccgcatcacccgcatcgcctgcaccgaccatcaccgcaccgggcggccgcttcgtcttcggcggcgactggaaccccgagcagtgggacgaatccacctgggcggacgacatcgccaaactcgaacgcgccggcatcaacgaggccaccatcaacgtgttctcctgggcgctgatccagccggacgagagccgctacgacttcgccatgctcgaccgcatcgtcgacctgctggtcgcgcacgacttcggtttcgtcctggccacgtccaccggcgcgctacccgcatggatcgcgcaacgctaccccgacgccacgcgcaccgactacgaaggccgtcgccaccgcttcggcgtgcggcacaacgcctgcccgaattcgccgaacttcctgcgcctggccggcgcgctggccggcaagctcgccgaacgctacggcgccaacgaccatctgatcgcctggcacatctccaacgagctcggcggccgctgctactgcgacaactgcgccgccgccttccgcgtctggctcgaacgcaagtacggttcgatcgaggcgttgaaccgcgcgtggaacgcgaacttctggagccatacctacgccgatttcgcccagatcctaccgccgaacgcgatcagcgacggactggacggcgagcgcgccactctgtccgcctgcagcatcgactacaagcggttccagtccgactcgctgctgggcacctacgtcaccgagcgcgacgcgatccgcgcgttcgacgcgatgcatccgatcaccacgaacctcatggacacctacgagggtgccgattatttccgttgggggcgcgagatggacgtgatcagctgggacgattatccgttcccgcacaccacgccttccgacaatgcgttcaagcacgatctgatgcgcggcgtgggcgacggcaggccgttcatgctcatggagtcgacgccgaaccagacgaactggcaggagtgcaacgtactgcgcgcgcccgggcggatgcgtgcggaaagctatcaggcggtcgcgcatggcgcggataccgtgcagtatttccagctcaagcagtcgcgcggcgggttcgagaagtaccatggcgcggtgatctcgcacggcgggcgcgaggacgagcgcgtgtacggcgaggtgcgtgcgctcggcggcgagctggcggcgcacggcgcgcggttcgtgggcggtctgaccgaggcgccggtcgcgctgatgttcgactgggattcgtattggtcgaccgagaacatctcgttgctgccgaagggcttcgactatccggatcaggtgcggcgctggtatgcgccgttccaccaccgcaacatcgcggtggatgtggtgccggaagacattgacgccgggcggctggcgggctatcgcgtgctggtcgcgccggcgctcatgatggccaagccgggcgttcgtgagctggtcgaggggttcgtgcgcgccggcggcacgttcctggcgacggtgatggcaggcatgcacgacgagcatgacaacgtgatcctcggcggatacccgggcgcgttccgtgaggtgtgcggaatgcgcatggaggagatggacatgatcccggacggccgcgacgtgcgtgtcgtgttcggttcgggcgagggcgaggacgcggacacggacgggtcccgggtctcgctggttgccgggctgatcaagctcgacggcggggcgcgcccgctggcggcctacgccggcgacgtgttctaccggggtacgccggcggtgacggtgaacgatttcggcgcgggcacggcgtatttcgccggtgcggtgctggacgaggccggcatggacgccgtggtcggcgacgtggtgcgccgggccggcgttaccggcatcgtctcgccggagccggtggaggtggttacgcggcggtacccgtcacgcggggagtcgttgacgttcgtgatcaaccatgcggatacggccacggcgtggcaggatacgccgttcgccggatgcgagtcggtgcttgacggcacggtactgggcagggatctggtgctggagccgtacggcgtgacggtggtgcgcaccgcggcatgacggattcgaccgccggccggtcgcggaccatatcccaagtcagcaaccggccgaaccatatctcgcggcttcagtcatccttcatcatcagtattcggtagcggccctaaatcagctccgccatccggctcataatcactcgccaaccacgggcggaagtagctcccgactatccacagtgggacattggtcagccaatcctgctccttgtaattccgcatcgacgtacggtaaccgcaaatcccg

SEQ ID NO: 3750 - DNA, 3083 bp, Unknown
  R150_10m  MAG No. k141_17324
aatcctcgcgcgtctcggccggggcggacgaggcttgggcccaggcgattttcgcgctctcggatgatgccgtcgcatctgaatattccggcgacaccaacgatgccggtgacgatgccggttctgacgattctgacagcgggttcaccggtgctgccgtggccgtggccaaggcccatgacgcgggcgtcgaccccgaagacggcgaactgttcctttcccgcaccgtacgcgcttccggacgttcgcgggccgtgctcggcggcaagtccgtaccgcgttcggtgctgggggccatcgccggcgaactggtcatcattcatggccagaccgatcagctgaaaatcgcggccgccgcacggcaacgcgagtttctggaccgggtggccggagacgaagccgaactggccgcctaccgcaaggcgtgggatgcgctggccgccatggatgagcggctggaacgcctgcgctcgcaggaatcctctgcccgccaacaggccgactacctgcgcgaatccatcgaccgcatcaaccgaaccgacccgcagccgggggaggacgaggagctgaaggcgcgccgcgaacgcatcgaaaacgcggccgacatcgcccaaggcgtgggttcggcgctgggcgcgctggatgcctcgcaggtggatgtggacgccgccgacggcgcttcggccgtggaactcatcaatcatgcggtgacctcgttgcgcgcgattcgcgtcggcggcacgttcgccgagcaggccgatcggcttgaatccatcaatgccgatttgggcgacgtggtgttcgccctgagccaggagctgggcgacgaaggcagcgtggaggatctggaccagatcaacggccgtatccacgagcttggcgacctcacccgtcggtggggccccaccctggccgatgtgctcgcttggcgggacaaggcggcgttcgatttggaggatctggacgcctcgccggaaaaggtcgccgaactcgaatccgaacggcagacgctgtacgatgcggccctcgccgccgccgacgtgctgagcgccgcgcgcgtggctgccgctgccgacttgggcgcgcgcgtcactgaagaactcggctcgctcgccatgctgggcgcctccttggaagtgcgtgtcacgccgcgagacaaggccgatgatccgctcggtccgtatggtcgcgacgatatcgcgttcctgtttacgccgttcgaggggtcgccgcagttgccgatgggcaaaagcgcttcgggcggtgaactgagccgactgatgttggccttggagctggtggccgccgacacgcgcggcggtgccgaccagaccttcatcttcgacgaggttgacgccggcgtgggtggcaaggccgcggtcgaactgggcaaacgtctggcacggctggcccgcagcgcgcaggtcatcgtcgtcacccacttggcgcaggtcgcctcgtgggcggacgcgcagttcgtggtcaccaaggagccgccggatgccgatgacgacgatttgggcgtggtcaccaccatcgccgaagtcaacggcgaaacccgcgtccacgaaatcgcccgcatgctctccggcagcgaatccgaagcctcactagaccacgcccgagaactgttgaaggaaagtgtcctatgaccaaagccgccatattcgacctcgatggcaccctcctagactccatgggagtctgggaccaagtcgacatcgacttcctgaacaagcgcggaatcgaagtgccgcccgactacatgaccaaagtctccgccatgcaattccgccagatcgccgaatacaccatcgcacgcttcggccttacagacacgcccgaagagctcatgcaggaatgggacgacatggccagcgtcgcctattccaccacggtcgaagccaaacccggcgcgcttgactatctgcgcgatctgaaagcctccggtgtcaaactgggtgtcgccacctcgctgcccccgcatctgcgtgagccggcgctacgccacgtcggcatgttcgatctgttcaacgatatcgtctccgtcgatgacgcgaacgacgtcggcaaggaccagcccgacgtctacctgctcgccgccaagcgcctaggcgccgcgccggtcgactgcacggtgttcgaagacctgctggtcggcatgaagtcggccaaatcggtcggcatgaaggtctgggccatgcacgacgactcctccgcctccgattggcccgaaatctgccacctggccgacggcgtcctcttcgacttccacgacgctccgcgcgtgctgtgataaaaaaaattacacccccgctggcggggctgtcggcgtaacggcgttgtttggcataggtgccccttcccgaggccattgtaggcgcggcccatgtttcgacactgtatgttggcaaggtgtttgttcactgtttagctgttatgtaacacaccttgacagttaagcagaacagttatactgtgttgtataacagctaaacagctggggtgctagtcaaccacaatcgaaaggggcataggtgaaactgatcatctcatccgtgtccggtgaacccatctacgagcaaatcaaaacccaaatccattcggcggtgctcagtggcgagttgaaggcgggcgaggccctgccttccttgaggaaactcgccaaggagctgcgcatctccgtactcaccgtcaccagggcgtacaacgaactggccgatgagggcgtggtgcagaacattcaaggcaaaggcactttcgtgatggacaagggcaacgaactgatgcaacgtcagctcgaaacccggattcgtgaaagcctggccgaggcaagccggggcgccaaagccgccggcattccgctgaacgcattggaccgcatgctcgaagaggaataccgcaaggaataacctcaagaaaggaccatggacatgaccgccatatccgaatccgacgcgatggcgttgcaggtcaccgacgtcaccaaacactatgattccggcttcacgctggacgacgtgaccttcgacctgcccaagggctacatcatgggactgatcggcccgaacggcgccggcaaa

SEQ ID NO: 3751 - DNA, 31652 bp, Unknown
  R150_10m  MAG No. k141_17547
gaaccggatcggtccaaacgggctactcaggccgaccagcccagccagtccgttcagaccgacctaactgatcagagcgggccctctgaccagtccgaaccatctgaccgacatgtacttgttgactaagtgtgcggcccgcatgtgggcctgccactcgttgttgaacgtacggctacatttttacaaccacagaaatacggttccagtcacgttttccaaccataagaatgcggttttggctacgttttccaacctcaaaatggggagttttatacacttttccaacttatgtatgtggagactctctatttcacgtgagacgaaagtggctcccctctttgaggggagccacggaatactgcttttacttatgccaggtgagagcgcatgaaccactggaacttttcgagttcctgcacgtggtcctggatgatgttggagctgatcacatccagctcgtccagctcggcgatggccttgcggtcgtcggcgatgaaggcgtcatagtactcgatcagcgccttgagatactcctcggtgcccacgcggccctcggcgtcgaacgacttccacgtgcggttgcgcacgatggcgtccgcgcggccgtccggggtgccgcccagagtggcgatgcgctcggcggtctcgtcggcctgagccagcacggcctcgacctcggggtcaagcatctcgtgaacggcgatgaagttcgggccggtcacgttccagtgcgcgtgcttgaggaccagagcggcctcctgctcctggctcagtcggttctgcaggatggcgatggccttctcactggccgcttcatcaaggcccggcacaacaaatgcaagtgtcataatgttccttctttcagtaggtggaacctgtccatataattctacgatttttggttatgccccgggccgaacgaataggtggtgaatatcacgtggctagttggcatcgtcgctttgtgattcggctggcagtggcgcatggtccggggcaccggctttgcggacttcgatggtttcgatgcggcggccatccaccttggtgacgaccatgttgtagccgtcgtcggaatgcagcacgtcgcccaccgcacccatcttgccggtcttggacaggaagtagccggcgaccgtctcgtacgggccgtcctccaattcgatgccggtcagatcggcgaagtcctcaatggtcatgctggcctcgatcgtggccacaccattgacgaacgcggtgcgggtggtgcgttcgccgcccttctcgctgggcagatcgtactcatcgcgaatatcgcccacaagctcctcggtcatatcctcaagcgtcacgatgccgtccgtgcctccgtactcgtcgatgaccacggccagatggatgccgcgcttacgcagcagttccaggctcggcagcagcttggaggtgccgggcagggagatgccttcgcgcaccacatcgcgcacgatcttggcgttcggatcgcgcacgtccagcagatcgcgcacatgcacgaagccgatcacgtcgtcgaaatccttgccggtcaccgggtaacgggagtacggctggtcgcgtacgaacgcggcggcctcggccaggggctggtcgccctcgatgaagaccacgtcggcacgcgggcgcatcacctcggcgacgatggtttcggacgcgtcgaacacatcgtccagaatcgtgcgttcgtccttggaaaggttggtgttggagctgaccagcacgcgcagctcgtcgtcggacacctcggactcggtctgctgcgggtcgaagccgagcaggcggacgatgccgttcgtgttcttgccgatgagccagatgatcgggcggcagacggcggcgaaggcgtcgatggcgggcaccacggcgcgcgcgatctgctcggtgcgctgcatggcgatgcgcttgggcaccatctcggagatcacgatggagcagtaggagatgatgagggtcaggatgatgttcaccaggccgccggcgatgccggggtgcacgccccagctttcgaccaccggaatcaggtagggggcgatggaggaggcaccgaacgaggcggacaggaagccggagagcgtcacgccgatttgcacggtggagaggaaggtgttcgggtcacgtgcgattttggcgactttggcgccgcgagcgtcctcctgctccatttgctcgatctgcgagccgcgcagagagaccaatgccaactcggtgccggagaacacggaaccgataacgagaaatacaaaaatcaggaggatattcaaaccaagtgacatggcttcaactctaggggagcggcacgtcaaattggggtgtgctggctgggcagtaagaaactcggcaaggggaagggcattctcatcactatcgatgagacgcaagcggcctcgcatgatgatttggtggctattgctacagccgtgcagcacgtcattacggatgccgatgaaagtgatacgcctgatgaggataagaagggcgttgccatcgtgtttgctggcttgccatatatgatcaacgatttgctggataacgaggtaaccacattcctgcgccgtgcgctacgccgcgaattggataacgtgccgcttccagacgtcaagaatgcgttcctggaaacagttgcggattccggcaagaccatcagtggggaagatgcgcttgaagccgctcgccagtctgaaggatacccgtacatggtgcagcttgttggctactacatgtggcaatccacacaacgtcgaggttcaaatgtcattaccgcggacgacgtgtcgaccggtgtttccgatgcgctgctcgccttcgacgattcaaggacaaactcatccgcccggcaggtcatgggcagctggaatttgcggtgccgcatttggggcagtatttgcagtcgttgtagcaccaaatatagggctgggttcattcatttggtaggttgcgcgttcatttggtgggttgtcggcatggtgaggcgttggaatggcggcatttcaatggtcagtgttggagtgcagtgaccaaatgaacgcataattgacctaatgaatgaagtaagccggttgcgggctagtttcgatccagttctatgagcgccgacgcatcttggccacggcattgctgacgcaaatacgcagcacaatggtgaagacgactaccataatccccagaatgccaatgttgaaccagaactgatccgtggtgtgctcccacagatcatcctttttgaacatcggcaccttggtggggccatacagcagatcgttgagcccgatatccgaggcggcggcggagaagccccaacgtccggggaagatcatgctgaccagctcgaggctgtcgcggccggtgaccggaatcatgccgccggagaacaccaactgggccatgaccagcaccaccagcaatggcatcgtctgttctcccgacttcaccaacgccgagccgacttcgcccaacaatgcggaagtccacgcagtcagccaaatcgccaacaccagttcgggtatgccggaatcagtgaccacaccatggtccgggccgggcttgccgaggctgaccgcagtggtcagaatcgccgcctgcaacaaggtctgcaaacccatcacgatgagtttcgaggcggtgtatgacgtgggcgacaaacccaccgcgcgctcgcggccgtaaatcgctcgctcggagacgatgtctcgcacggacaaagccgatcccataaaacaggcacccagtatgacgagcacaagcagctggttcggctcggtggcggcgtctttgaaatcgggctcacccaagccatgagaaccgggcacaaccagcgacagcagtcctaggagcaatggcagcaacagcaggaagatcagcaatccggggtcggcgatgatcaaatgcagctgacgaatcaccagagtgatggtctgtttgatgcggaatggctttgccggtttctcatgctcggtgtgccgcgtgatggtggactcggcctgcatggtgcgctggcgtgaatcagtaatcgaatacacccgttccggagattcggcgacatcgttgaagatgtcggcccattccttgccgttgaacgcctggctcatctcctgcacggtgccgaagaatgccggatggccgccgggagcgagcatgagcacgttatcgcacaacttgttgatatacgacagtgaatgggtgaccacgataaccacgcggccggcatccgccagttggcgcaacatggtcatcaccgtaagatccagcgccgggtcgaggcccgaggtcggttcgtcgagaatcagcagttcgggttcggtgagtagctcgatagcggtggacacgcgcttgcgttggccgccggacagtctgtcaatgcgattcttacggcgagacgtgagttccagctcattgagcacgttgtcgatgatttcggcgcgctcggccttggttgagccgggcaggcgcagcttggcggcgtattcgagcgccgcgtccacagagagcttgcggtgcaccacgtcgtcctgcggcacgaatccgatacggctgcgcaacagttcgatgttctgatgcacgtcgtatccatcaaacagcacgcgcccgtccgtggggctgttgagcccggcgacgatggaggtgaatgttgatttgccggcgccggaaggtccgattacggcggtgagcgtgcccttggcgaatacggcgttgatgccgtcaagcagccgggtgcctttgcccacggtcagtccgatgttttcggcgataaccgcgtcgttgctgacaaacggcgtgcggtcgcacagcacgccttcatgcacgatcaggtcggtgttgccgacggtgacgacgtcgtcttcccgcagccagatcttcgcgacgcggcggccgttgacgtaagtgccgttggcggagttcaggtcagtgagcaggatgccgctgctggtggtttccagcgagcagtgtttgcgggagaccagataatcgttgatgcgaatcaggcaggaggtatcgcggccgatgacgcctgtggtgtcgtgctcggggctgaaggacccgtgcacgcggttggtggtgagttgggattcgagccttaccgcttgcgtgctgcctgccagaacggtgccggcggcattcgatggggaaggggatgcgcagggagacggagatggtgatgcgggtgataccggcactggcgatactgccgtcggtgccactgctgttgggcggggttgctgttgcaggtgcgcgagggccggggatacgcggtgcggggccagcggggctggcgttggttgcggttgtaccggttgtgccggttgcggtgctggtggtgtgggttgcactactgggcgtgcctgttgcggcgcgagttgcgtgggttgtgccggttgcgctgatggtgccggcggtagcgcaggctgggccacgtttgccgcagggcgtcgcgggggctgtgccggcgtggacggcccgctggttccgacgatgcagacgatggtggcaccttgtgccagcgtcactttggtgctgttcagcagcagtacggaagtggtgtgaatgccgttgatggacagtccgtttgcactacccgtgtcttccaagagccaaccatcgtcggtaaaggtgacgcgagcatgatggtgagatacgtacgggttgtgaatcaccagatcgcaatccggcgcacgcccgatggtcgtggcacgtgcaggattgggggtataggtggcggatccgtagtgaatagtaagggcaggtggcattggttcagacttccgtgttcttcgatctctctgcacacagatgtaccacgaccgcattacccccggtgaacggggtctgactgatggtcagaaactcagcacctcgaccttgccggtgtcgagctggtaacgggcgccgacgatcatcagctggtcggcagccaatgcctgctgaatgatgggggattgttccaccagcgtctcgatggtgtgggccacgtgtacgcgctcgatgtcttcatgcgcgtcgagctcggcttcgcgcgcctgccagacggacatgccggcctggcgcagaataatcgattcggcggcggcgatgtgctcgtcgaggtcgtccatcgcatccgcggcctccagtgagccgtcggcttcggaagtgatggtgtgcatcaggtcgtccagctcctgctcggcggcctcgattgcgccgcagtgctcgtgaccgagcacacagatcaggctgacgtgcagtttcttgaccgcgtactccagcgaggcgataaccgcgctatcgatgagttgcccggcggtgcgcacggtgaacaggtcgcccaggccctgatcaaaaatgatttccggaggcacgcgcgagtccgagcaggaaagcaccgcggcatccgggttctggccatcaagcaacgtttgacgggtctcctgatcctgccatggatggtcgggcttgccctcggcaaagcgccggttgccttgcagcatgcgactccacgttgcgttcgcggtcgattcctgttcaaagtctgactgagccatgaaacctccattatcagcggactgctggtacccatagtagcgattggaagtgcggattcgcgactgcgtgcataatctggctttgcccaaagcataatgagaacgctcacgatctcaatcctgtttaagggtgggccgtgatgatagtcagcacaagggttgcgggtggtgtgataaggctcatacgttacacccgcgcgagccgtggctcaccacattacgataggtggtggtaaacgcttgaagattaacaattcccgaaaggaccgatgatgactcttctgcagcatgaactgaccgatttcaaggtgaacgcattccagaacaacgagttccacgaagtgaccaaggacgatgtgctcggccactggtccctgttcttcttctacccggccgacttcaccttcgtgtgccccaccgagcttgaagacctggccaagaactacgccaagttcaaggaaatcggctgcgagatctactccgtctcctgcgacacccacttcgtgcacaaggcttggcacgacgccaacgagaagatcgccaagatcgagtacccgatgcttgccgacccgaccgccctgctggccaaggacctcgacacctacaacgaggccgatggcgtggccgagcgcggcgacttcatcgtgagcccggagggcaaggtcgtggcctacgaggtcatctcctccaacgtgggccgcaacgccgaggagctgctgcgccgcgtgcaggcctcccagttcgtccacgagcacggcgaccaggtctgccccgccaactggacccctggcgaggaaaccatcgagcccagcctcgaccttgtcggccagctgtgatcgacactgaataggcggtaaccttggctcccctctctgaggggagctgtcgctgaaagcgactggggggagtgctcgcgagagctagcctgatccgatatgcttccctcagtctcactacgacagctcccctcagagaggggagccagtgtatgtaagggagttttcatgactcagaccaacaatctctatgacgtcgtcgtcattggtggcgggccggctggcctgacggccggcctgtacctggcccgcgctcgctaccgcgtgctgattctcgaaaaggacgatttcggcggccagatcaccatcactaacgaagtcgtcaactatccgggcgtgggccgcaccacgggccgcgcgctcacccaaaccatgcgccagcaggctcaggacttcggtgccgaattcctctccgccgaagccaccggtctcgacgtggatggtgacatcaaaaccgtgcacacctcacgcggcgacctcaagacgttcggcatcctcatcgccaccggcgccagcccgcgcaagctgggcttcgagggcgaggccgagtacgccggccgcggcgtggcctactgcgccacctgcgacggcgagttcttcaccggcaaggaagtactggtggtcggcggcggattcgccgcagccgaggaatccgtgttcctgaccaaatacgcctccaaagtcaccgtgctcgtgcgcgaaccggacttcacctgcgatgccgcagtggccgccgaagccaagaacaacccgaagatcgacgtgcgttatcaggtcgagctgaagggcgtcaccgccggccaaggaggcctgcgagaagcctcgatcctgaaccttgccaccggccagaccgaaacgtggaagcccgccgacgccggcaccttcggcgtcttcgtgttcgccggctatgtgcccgccaccgatttggtgcgcggcgtggtggagctcgacgaccacggttacgtggtcacgcacgactacctcagaacctcggtgccgggcgtgtacgcggccggcgatctgcgcgtcaagaacctgcgccaggtggtcaccgccaccgccgacggtgcgattgccgccgtggaactggagcgttatgccaagcagatgagcgagaaaaccggcttggtgccgccgcgtcccactgcttccgcttatgaggagtccgaggccaaggccgcctccgccgcctcggccgctggcacgacgcccaccccggctcccgccaagcgcagtgccgatgccgcatccaacgccgccaagaagtccggcgaactgttctccgccgccatcaagcagcagcttggcgtggtcttcggccgcatgacccgcccggtcacccttgcccttgagctggacagcaccccgctttcggcggaattgcagggcttcatcggcgagatagtcgcgttgtcgaatggcaagctgaactcggtcgccgtcgatgccgcagggctgatcacggcggtggatggtgcttctgtgcctacttctttggtggttggcgagccattggccgtcactttgccggacggcaccgaactgcccacttatggttcgttggacgattccggccgcgccacattcgacgtcgccggcgtcctgccgctcgcccgcccaactgtgcgcatctgcgtgccggctgagggcgacggcaaggccggcaaggacggcaatggttcactggtcttcaccggtctggccttccacggcgtaccttccggccacgagttcaactcgttcgtgcttggcctgtacaacgcggccggtcccggccagccgctgggcgatgacctggtcgaacgcgcgaagtccatcacggacccgctgaacatcatgatcctcgtctcgctcacctgcacgatgtgcccggaaaccgtgcttgcttcccagcgcattgcctccctgagcccggccgtgcgcgccgaagcctacgacgtctcgcacttccccgaacttaaggaccagtacggcgcgatgagcgtgccctgcatcgtcatcacccacgccgacggcacccagcaagtcgaattcggcaaaaagagcatcccccaaatgctcgaactggtcggcgcgtaagccgcacgacctcaggtactcaacagcaacaacaacgattctgccaaaatcgtgacgtacatcgactgatgcgatcgatgcgcccgactccggcagaatcgttgttttgcggcagctcagcctcggtcttcgacggccttcgtgacgtttctgtcgccgaggtacttgaccaggctgatgctgatcagggccacaacgaacaggccggtgagcaccgggatgagtgcggcgtagcggtgggcctgatcaggcgcgtgggcaactacgaacgaggccaactggttgccggacagaccggcgaacgcccaggcgctcagcgtcagaccgtgcgtggtggagacggttttggtgccgaagtgctgatcaagcagcacgggcagcgtcgagaaaccgccaccatagcccgcgttgacgaggaacagcatggccagcacggcccacagcagagcgttgtcgatgctgttggtgaagatctgcagcaagcacacggcaatcgacatgatgaagattacctgatagacggtctcgcggcgcttcaggtggtcggagagtgtggagaagcccacgcggccagccgtgttgaacacggagtccacggcgagcaccagtccgatgatgccggagatggcggcggcaaacttggcggggctcaggttggcatactgcgggaaggccttgagcacatcgtgcaggatgtccttctcttggctgatgagggccaggccgcaggtgatgttgatatagaaggctatccagatgccccagaacacgggcttcttgaggattgtcttgcggctgacgtgtgaggtcgcgggatcgtacacccagccggccggacgcttgatgagcaggaagccgacgaacatcatcaccgcgtagaccgcggcgaggatgaagaacatgctgaccaggccaaccgtgccgatgagatattccatcagtgggctggcaatggccttggccaggccgaagccggcgacggcgatgccggtggcgaggcccttgttgtcggcgaaccaaagcatcaggttcttgaccggagtcagataaccgacgcccaggccgatgcccatgatcgcgccataacagatgaacacgcccggcaggaagttcagggcgatgctcacgcccgtgccggcgaagccgaccacgaagcagaccatggagacgagtgcggatttcttgatgtttttctccaccattggcccggcaaacgcggcggacatgccgaggaagaagatggcgagtgagaagccccattccacggaggcggggctggcgtggagacggtcagcgataagctgcttgaacacgctccagcaatagacggtaccgattgggatatgaatcagcagtgcgggaataatcgcgctggtccaacgattctcggtaaaccttgccatatatggacggatcctttcgtaactggtgtacgatgacctgccgacccgaacgagagtcgtatcgcccatatccacgcacatcacgacggcatgcccccgtgaaccatccgggctgcacgaatcgaatcaaatcgaatcgtgcgaactgcgaacaattcgctaaacatccttggtgtgcatttcatcggcgctgctggctcttgtcgacgccgacaaacagaactataacgctgttatggggttgctgtggctggtttctgtggtcggaagctatgagctttctcacatcgaaaacagttatatgacggtatcggcgtgattgatacgtgacgtctgcccgtggacgcggcatatccctctcggaaaacaatgactccgtcatgtccatttcttggtttgacatgttttcgtttgcagcgtcggtgctcaccacggtgaccgcggcgttcgagtcgccgggcagggcctcgaccgagggtctcatcctcggctgagatgtgggcggtactatggattcttatcgataaggttcgtgatatgcggagatggtaacgatggtgaccttaaaggatgtcggcgaactggccggagtgaccgccaccaccgcctccgcggccctgcgaggcaaggattacgtcaagcccgaaaccacgcaacgcgtgtgtgacgccgcccgcaaactcggctacaaaatcaacctgtctggccggtccctgcgttctgggcggtccgataccatcaccttccttacctcgggcctcgagggcgactatttctcccatctggccatgtgtgtggctgaggaagtgcacaagcgcgactcgcacatgctcatcgaactgtcccggtatcttaccgacgacaacgatctgtcgtacacgttttcggacggcatcatcgccatcaatgcgccacgtgcggtcgatatcctgaagcggcacccggccgtcatgctggaaaactacgacaccagcctgcccatcgacaccgtgaacgcgccgagcgacgccggctcacgggcggcaatcgaacaccttatcgcgcgtggctgtgcgcgcatcggcatcgtcggcgacaatcacgatcccaacaatcccaacatcattcccggctcgcgtgatattcgtatgcgggccgccaaggagacgattctcgcggccggactgccgtttgacgagcgccgtgatttcatcaaatcctcgtggtcgattgacggcggtatcgaggccgggcgcggcttggccaagaaaggcaagtgcaagtacgacggtctgtactgcctgaacgacggtattgcgctcggtattctgcgtggtctggcggacgatggcgtaagtgtgccgggcgatgtgcgcgttatcggcttcgacggcctgagccagagcatgtacagcgtgccgactttgaccaccgtggccaccgatttcaagggcatggcggataccgcgctgaccttgcttatgcggcgtatcgagaacctggacgacgagttcttcccgcagaccgtgaatgtgggctataagctcatcgagcgcgaatccactgcggcgtagagtctttggccgtgttgagcttcaattgggtgattggactggcaccagcggctgatatcagatatgccgaaagcagcgatgatcggatttaagttgctggagatgacaggatggattgctctttacccctttcaccatcttgcaataattcttacatgtaagaactctctgttaacatgtaagaattattgcaagatggtgaaaggggatgctcatgttgccggccaaagaaagtttgacggttgagttcaagagtgagcagaagcgccctcaatcgcatgatgaaattgttgacaacgtagtggctctagccaataccgaaggcggcacactgtatctcggtattgaagacgatggcactgtgaccggcgtatgtgacgagcatcgcaatatcaatggacttgcggtactaattttcaataagactgttccgcagcttcccgctcgcgtggcgctcttgtatgagaacgaggtgccgatagtcagtattgaggtggataacagtcagcaaatcgtatctaccagtcaggggaagacattgcagcgccggctgaaagcagacggctcgcctgaggtcgttccgctgtttgtttcccaattcattagccgtttatctcagcaacggttctacgatttcagcgcgcaacctgcaccagaggctcggttggacgatttgaatccagactcacggaacaagttgagaagccatattcgcagtgccaatgcgcaaaactcgttgttgtcttttactgatgaggatttcgatcgggcacttgagctggttgttgatggcccgtatggattgcagccatctgttgctggtctgctcaccattggttcggttgatgctattcatcgatcggttccagccgcatcggctgtttttcaagtgatgaaaggcatgtctccaaaggtcaatatggatccgttcgtgttgcctttggtggatatgtttgatcgtgtaggcgagctgatggagccatggaatcccagccacgaagtcatgagcggcttgattcgtgtcgatctgccagacttcgatcgaggggcattccgtgaggcaatgattaacgctttctgccatcgcgattatgcacgaatgggttcggtgaggttcctggttgatgatgatgggttgaccatagctaatcccggaggattcatagagggtgtttccgaagataacctgcttactgcacaaccgcgttcccgcaatccgcagcttgccctgattctgaaagctgccggatatgttgaacgcgccggacgaggcgtggataccatctatgccgggtcgattgcggcgggtggttctttcccggattattcacagtccagtgctgaggaagttatcttgttcttgcgccgtgtggtacctgacgaggcattcgtaaccatgattggcgacgaggaacgtcgacgtggggctccattgccggtctggtcactgattgtgctctcgctgctgcgtgagcatcgtaggcttaccgtggtccaattgtgcgatttctcccatttggagcatcgacgcatcgtgtccgctgttgagaatctggtggaagctggtttggtagagggggtcggtagcgggagctctcgttcgtatatgctgagtgcccgagtgtacaaacgttcagaggggctggcgtcttacgtgcgccagcgtgacatcgatgccacccggcgcagtggccttgttctggagttcgccgaaaaaaatgatggtgtcgtcactacggcggatgtcatggatttgtttggcctgagctatatcagtgcataccggttgttgaagaagctagaggatgcgggcaagttgcgccgcgaggggaatgggccgtcatcccgatacgtgttgggatgattggcgcgcgtgaaagtaagttttttcatcacctttcaataattctttcatgtaagaactctctgtttacatgtaagaattattgcaagatgatgaaagatgtacacaaaacggggaagctctgctcgatgtgagcggggcttccccatatgcgctggtgtgtagatcagcctgtgttctgcaggccggcagcaacgccggagacggtgcacaggatgaggtagatgaatcctgcctgctggctctgcgtgttttgcttcaatttttctttggtattcagctaaagcattgaaagatgcttctcatgccgataggcttcctgatgtggcagaagcagacacccttgcgcggatgtatgctgcttatctggagagtccgcgtcgatagaggctagctaatgaatcggtgaggaagattccagagactgcctcaccgattcattaactgcatacagacgcggctgcttggcgaagagacacgacgtctaccagccttcctccattgcggttgcccagagatagaacatgaagagcagcagactgaagagcgagatgatgaatgttgcgatttttgcaaagatgtgcttattgggaagcggctgagaaacaccggggaactgatcatcaacgaacagctgcgcaatatggaggattgcgactgcaagccagcagacgagtccagcacctaatgtcgccagaagccgatgagaatagacgatttgttcagccggcgttttcccacaaggaggggaaaacgttgttaatatccggcaagcgacatcgtagttgccatcatgaggaccaaaccagccaataacagaaggggatagcaataccagtcctatccaccacagcgtgcgtcggatggtcgcgagtctgtcgcccggcctagtgtccggcttgccgccttcgccctccgtcccggcaccgtccgcgggcgtgtggtccccctcgtgcgcgtccatcgtcccgtccgtgtccctttccgcgtccatatgtccccctccgatcatccgagtctgtcgctcggcccgcgcgcccgttccgtgcgcgccgtcgccggccagtctagggccgtgcgacgcgagcggggaggcccgcgccgtcaatcggcacggaacctccccgctcgcgtcatctaggcggtcagccgaaaatcagcccgtgttctgcaggccggcggcgacacccgagcaggagtgtcacaaagcccctgccgctctgggtacccaggtggcggtttatgaggacagcatcggtcaactcatcctgcagtggcttcgcaaacctgagtactggtcggaaggtagttccggcacgcaggcactatggcatgcgtacacacctgagtcggttactcccagtgaattggccttgtcgcgtcaggcatgcggtgtcgcatgtgatgcgcaacctgtcatcaaaggcacgctgcccaatcgggacatcgcccatatggccgccacatccttgggatacttgacatggggcgttacgaacgatccaatggactatggtctcggtgatctgggcggatgggccctggatttgctgcagatttggggaagctacctggcgaatgccccggaagaggacctggcgtcatggctgcacactcatctcggcgagcaagacgctcgtatgggattcagttacagcgatgttctcgcggactgcgatgcatggttgctggcgcggtccatgcagagcaattcctccgaaaggtctttgtccaccgctatgcgggacgctttcgcgcactacttaagatttgggcaggcctgttcgtttatatatgcattgtaattatgcccaagaaaagaagaggcaaagatacgcagagcatgaaaaatgacacaattccgattacgacatgtgaagccatcggcgtatccaagtcgggcacattgggatagaagtttcgaatgacggatttcacgcaagaaacaaccggtatcatcacccaacagagaaaacctaagcccagcactgctgtaagtctggagccatacgtattcaaatcactgcagggtgggggagaaagtgtcaacacgctgcaaacgaggctgtaattatcgcgttcagcccatgtcattactgctggtgaaagcagcagtaatcccagccaccatagcacgcgtctggctttgcccaaagccacatagcatctactcgccttagggaatttggtagctgctttcggtgccaaagcacatttctcgccggaaaaattttctgacgtatcttctgtgccgtgtttcttcccaatgccatcggttgtagccggattcgctttgcaaatgtggcgttcggtcccggcgtcgccctccgccttgatgccgtccgtggacccggtgttcccgcgcccgtccgctggcttgtccatgtcccctccgatctgtcgaggtgcccgttccgcgcgtccgttctctgcgcgcccgcccggcgtgcgccgtcgccggccagtctagggccgtgcgacgcgaacggggaggcccgcgccgtttatcggcacggaacctccccgctcgcttttgtcggtcggtcaggcgcggatcagcctgtgttctgcaggccggcagcaacacctgaaacggtgcagaggatcagatagatgaatccggcctgctggctttgcgagagctcttccttgtccaccttcttgcgcagcgacttgagcgccagcacctgggtgacggacagtgcgtccacgtatggggagcggatgcggatggcctggccgagcacgtgacggtgctgcagcggccacttgtcgcccacgatggccagaacccacttgcgggtgagctccatctcgttgagcaccttctcattgaggtcctcgcggtcgccgagggcaaggtacatcctggcgatgcgctcgtccgtcttggcgatggacatctcgatgttgtcgatgaaggtggagaacagcggccattcctcgtaagcctgacgcatggtctccagatcgccgaacttctcgcatgcggtgccgagaccgtaccaggcggccaggttgatgcgggcctgagcccaggagaagatccacggaatcgtgcgcaggtcgtcgagcgacttggcgccgaggccacgcttggccgggcgggagccgatcggcagcaggccgatttcggtcagcggcgtaacgatcgagaaccacggggcaaagccgtcggtgttcaacaggtcgaggaagcggttgtgcgcggcctcgtcgagctgagcggccatatcggcatacttctcggtcatctcggtgttgcgcttctccacactcggcgcggactgcagcaaggtcgctgcagccacggactcgacgtggcggatggccagcaccgggttgccgtaacgggcgaagatgacctcgccctgctcggtgagcttgaagcggcacttgacggaaccgaccggctgggcgagcaccgcgcggttggcggggccgccaccacgaccgacggcaccgccgcggccatggaacagggtcaggtcgatgtcgtgcgactcagcccatttggcgatgcgctcctgagcggagtgcagggccagcgtggcggaggtcgggccggcgtccttcgaggagtcggagtaaccgagcatgacctcgagcttgttgccggtggccttcagacgagcctgaacctcggggatcttgatcatttcctcgagcacgtccaccgagttctgcagatcctcaagctgctcgaacagcgggatcacgtcgatggtgggcacgtcctccgggtgggagaaggccaagcggttgagctcgtagacatccttgatgttctgggcgctcttggtgaaggagatgatgtagcggcgggcggccttgaggccgttgcgcttctggatggcaccgagggcgcggaaggtgtcgagcacctcgtgcgtcatcggctgcagttcgccgcgctcgccgtgcaggccgtgctcgcggatatccgcaagggcgcgggcgtgcaccacggagtgctgacggaactccatctccaccatgtggaagccgaaggtctcggtctgccagatcagatcctgcagcgggccgtaagcggaacgcttggcgccggcggcggccagcgaacgctggaccaccttgaggtcggcgaggaagtcgtcgcaggagtggtacatgaggtcggcatcgcgctcgatggtgtagtgcagacgatcggccatcaccagcatgaccgcgcggtgcatctccttggtggagatcagggcggccttgtcggtcagacgctcgctcatttccttctggtggctccagaggctcttgagctcggcgctcggcggcgtggtctcggcttccatcgtgaggttgcggcccacggtgcgggtggcttcctcaagggcggcgatcacgtgatcggagaacttgcgggccacggcgcggctcaccttggcggtgacgttcgggttaccgtcgcggtcggagccgatccagctgcccgggtggaagaacgcggggcaagcgggctcgacgagaccggccttatcgcccaggacccagtcgtcgaagcgacggtagaccttggggatggtgttgaacagcgtgttgtcgaagatgtcgagaatcgtgtccgcttcctcaaccggggtcggcttcttcagcgcgatcggagaggtgcggaacagggcgtcgatctcgttgtagagacggcgcaggcattccttcttatccgagccgccgaggcgcttgtactcctcaagcaattcggaaacgcggcggatcttgccttccacggccttacgacgggcctcagtggggtgcgccgtgaagacggggtggaattcgagctggttgagcagttccttggccttggccgggccagtctcattgatgagctggtggtaggcgacggtgagctcgttgatcgggtcgaccgcctggtcaacggacacgttgttctcgcgctcgtggagcacggaaacgcggtagttctcctcggacaggtttgccagatggaaatacgtggcgaacgcgcgggccagcagctgggcgtcgtgcagcgtcatgttgtcgatgacgttcacggcctccttcaggccatcctggtcggggttcggatccttcagctcggcgaaatgctcggcgctggcctccaccgcgtaatgacgcacggtgtcgaacgtagacagcagttcggggttgtattcgcccagtacgttacgcaggatctcaagacacagatccatgtcgtacttcaggctttcgggaagatcatgctcctccgggccctttcggccggtcccggtagtgacgatggcggcgtcagcgggagtgatctgttcttcaggtgttgccatataacctcctttgccgaataacaggttgctcggtctaccggtcgtctgcggctcctccgcagttgttgaggccagtcgttgcgagcccacagcccatattcaacgtggttgttgtgtgggcaatagtgtatccccgcgaaatcgctatttgcgttacggagtccatatagtgcgtcaagttgtccacctatagagaccgaatatcggacagcatatgagacactgtccgattcgcggaagatttgagcaccttacgattgctggcgggggaggcagggagtagtaatgagggatgtgagcgaacagaagaaaaaaagtgcgcccgaagcgaaaggcgcaacggctgtacgtaaattccacacccactccattccgctggacatggaagatattgcgcgcgattgggaaaaaccggtggtggacgccggtatcgccgccaaagccagcgtgattgtacgggtcggcatgctggacctgggagccggcaccggctccttccgcgtgcgtgaaatgatgcaccgcatcgcctacccgctgggcgtgcacgtacgcgccgacgtgaacctgacggatatcgaggccacctgcacggatggtcgtaaccgcatcaccgaagtcgtggatttgccgaccaccggcgtgaacaccgaacgtatctggctgctggaacatttcgccgactggttctccgtgaatctcggcaaggggtcgatgtatcacgtcgattcgcaactgtccgatggcgtggtcaagcatttggacgaacgtgacgcttcgcagtattcggccgatctggccaagcgcctgcgcgaacgtgccaaggccgaggctgaggcggccaacggcagcgtggacgagacgctggatcttgcgttgaaaaccaaggtactcgtgacctccgtggccaagtccttggatgatgacaatgaagaagcccaccgacttttggcggacagcgcggaagtcactccggtcgaagacaaagcggccgaagagaaggcctacgacgatgccgaagtgtttaccggtgactccaatgagtcggttgaatcggcgaacgcggcgaatgccgaggcgggcgctgagggcgcggcggcgaacggcgcaaccgccgaaagccctgctgcaagcagtacgaagcgcaagaatcgcgtgcccaaggaatacgccgaacacttcaacgagcgctccgacgaagagaaggccaagggcggtatcaccgtgcggcaggcgcacgagcgactcgatctgattgagcgtcgcaagccgctgtacaagccgtggttctccggtctggcctccgccctggcctgcgcggccttcgtgttcctgctcggcggcggcccatacgacatgatcggtgcgttcgtgggcgcgggccttggccagtggatgcgtcgccggctgtttgcataccatctgaaccagttcttcgtcacctttgtgtgcgtggccgcggcggcgctcgcctgcaccggcaccctgcgactcatcggcattttcgacccagtcgcgctctcgcacgatacggcctacattggcgccatgctgttcgtgatccccggtttcccgctcatcaccggcggactcgacatggcgaaaatcgacttcccctcgggcatccagcgcgtggcgtacgtgctgtgcatcatcctgatggccacgctggcaggctgggccgtggccgtgatggtgcacctgcacccggaaggctttgaaccgctggggcttgacccgtgggtcaacggattgctgcggttcgtggcggcgttcgtcggcgtgtggggcttctccgtgctgttcaattcgccgcagcgcatgtgcctggccgccgccctgatcggtgcgatcacggacacgctgcgcttggaattgcaggacttcaacgtggcacccgagatggctaccttcatcggcgcgttcctggcgggcattctggcatcggcgtggcgttcatccgtgcgacgtggctggctaccgccgcacctcggctacccgcgcatctgcctgaccgtgccgtcgatcgtgatcatggtgcccggtctgtatatgtaccgtgccatgtggtacctcggcagcttccagaccatgaatgcgctggactgggcgttccgtgcgttcatggtgattatctgtctgccgatcggtttggcgatggcccgcgtggtgaccgacaagtcctggcgctacgacatctgaccgtcatcttggctcccctcaggtggggagctcggataaaacatcgtctcagtatggaaacggtgaaaggtgcttgagcccttgtatccactaccatcaggcgaagtgcgttgcggccgtattcacggctgtgacggtctgtatgacgccgctccggcgtcaatcgcatatcagcacgcatatcagcacatagttctgccatggcggtagccgcttggcgtcatgattggggaggtgtcgcagttggccaacgatttctggattctgctggccatggtcatctattttgcggccatgctgtccatcggattcatctactccgaacgctccaactcctcctccaaggaatactttgcgggcgggcgcggcgtggggccgtggctcacggccctgagcgccgaagcctccgacatgagcggatggctgctgatgggcctgccgggcctggcctacttcaccggcgcggccgacccgatgtggaccgccatcggactggcgctcggcacctatctcaactggaagcttgtggcccggcgactgcgccgctactcggtagtggccggcgatgccatcaccattcctgacttcttcgccaagcgtttccatgacaagaagggcgtggtctccaccatcgcggccgtgatcatcctggtgttcttcagcgtgtacgtgggcagctgcttcgtgaccgtgggcaagctgttcgccacgttgttcggtttcgactaccacgtcatgatgatcatcggcgcggtggtcgtgttcgtctacaccgtggtgggcggctacttgtccgtggtgatgaccgacttcattcaaggcatgctcatgttcttcgcgctcgcggtggtgttcatcggcaccgtggccagcgcgggcggcatcgacaacaccgtggaattcctgcgtgccatccccggctacctgtccggcacgcaggtggccgcgcccaagctggacccggccaccggccagcagctcgtcgaggcgggcaaggccgtgttcggcgcgccctccgactacggcatcatcaccatcatctccatgctggcgtggggcctgggttacttcggtatgccgcaggtgctggtgcgcttcctgtccatccgcagcgtggaagaagtgcgcaagtcccgaatcatcgccacctcctggtgcgtgatttcgctgggttgcgcggtgtgcatcggcttggtgggacgtgcgatgatgcccaccgaactgctgacctccaccgatgcggagaccattttcatcgtgctggcgcagaccctgctgccgagcttcatgtgcggcgtggtggtctccggcattttcgcggcctcgatgagctccagctcctcgtatctgatcatcggcgcttcggccatgggcgagaacatcttccgcgggctgctgcaccgcaaggccaccgacaagcaggtcatgatcgtggccagggtcacgctggtggtcatgttcctgttcggtattctggtggcatacgaccagaactcgtcgatcttccaggtggtgtcttacgcgtgggccgggcttggcgcctcattcggcccgttgatgctgtgctcgctatactggcgtcgcgccaacaaggccggcgccgtggccggcatgctgtccggcacggcggccgtgctgatctggcacaacctcgtcaagcccttgggcggcgtattcgccatctatgagctgctgccggcgttcatcatttcgctgctgttcatcgtggtggtttcgttgctgaccgccaagccgaacgagcgtatgctctacgaattcgaccactacatggacgatccgctgcccggcaccctgccgtccggcaccgtgctcgtcgacgagcccatggaagccatggagtccgaggttcgcagcggcaaatgacacgtgcctgctgtgcggtcgcctcgtatggcagaggagtggcttttttgtggttcggcaggaaccattgaggccaaaacggacttcgaggggctgatttgacgttctggagaggtctactgccgtttcaaggggctgatgcctgagtagacgcggctccaaaacggcggaatggcgttggcgtaagggcattgatacacgtgatctagcggatgatcagccccttgaaacggaagtagacctccggcggaggccaaatcagccccttgaaatgggttttgaataccgtagcgcggtgcggacggtgcggactgactctaccgggcttattattcctgcgtcgtcggaataattggcagcagaggctcgaatttcagccgtttgtacagcggaatacggcgtagctttcggacatcgctaatttgctgggtggtttgccgcatcgtgagctggaccgttttgcccgtaacctcctgtatcctctcggcaactcttcgggcaagggcctcttctcccgcttcgtcgccaatatctaatttggtgacttgaatgtacttccagccagcgtcttcgatcatctggcggcgtctcgcgtcattcagccattgcccggcatgatgagagccttcgtattcgatgcatatcttgaattcagggtatgcaagatcgagatatatgggtctggtgttgtttcctacgaatattggataattcacctgcgggcaatccagaccgtatttcaagagaaccaaacgagttcgtgtttccatggaggaatctgtgcccgcgcgcgccaaaagcagggcgcgacggcatttgttatacccgcggaacaaatacgaattggtgccattctctttgtcggctcgcacctgggcctcggcctcatcgagatacagagaaagggcgtcgatggttgttctgcagagccttcgatctcgtcgcatcatggaatcagcgagaacgatgagttcttcaagttcgagatacgcggagaacatggcccatgtgcaagctggtgaagtgcatgtgaattgtccctcgattatgaccgtgtctagtgggaaaggccatacaaccactttgacccccacaatgtgccgtttgtcattggcgtgtggaaccgcaacaatggttgtagttgcaaggcctctgtgtttgcttgatatgcggggtacttcaattgacaaaagctccaatgctgttgtcagggcatagggtgggtgccatgcgcttcgtcgttgaacatctgcgcacgtctgcattcgttgatacttctgcattgtcagctcggtcaatgccgttgagctacccatgatgatcaccccttcgtgatgttcgctttgtcctcgcagtgtagggtccggctaccggccctgtctaccgcctcaatttttcggtggataaatgtggataagtcggtggataaactatgggcgttcatcgcagttgcaggcatcccgcaattacatggaacgtaggggtttgcaggcagccagcgggaatcgccgccgacggcgcgattcagcttgaacgaatctccatggcgttcatgcaaaggtggcatgatggcgggtatgagtagcttggtgcgtattgtcaatgccggtgttccggggtctcagggccacgtggatgtggtgcttcgcgatggggttgttgcgtctgtcggccctgctggaacggtctcggcttcggacggcacgatgcagactaaggcgcatacgacatcgttggcatacgcgacgaatgccattgcttctggcagcgtctcaatcccaacgtcggccgccgcacctgctgacgaaaccaccatcgacgccgacggcctgtgggttattcccggcctgtgggactgccatacgcacttcacgcaatgggctaagacgctgggccgactggacctcatcaatgcccgttccgccgccgaagcgatggacatgttgcgccgtcatctggatgagcgccgcgccgccggcacgcttgacccagatgccttcgtggtgggcatgcgattccgtcactcgctgtgggccgacgacgagcagcccacactggccgcaattgacgccgtgaccggcgaacagccggtggccctctccagcgcggacatgcactgcggatgggtgaactccgccgcggcccgcaggcttggcgtacatgtggacgaatccggtctggtcggtgaactcgaatggttcaacgcctacaccgccttcgacaaggtgccgggcgctgctgaagagactgaccgtctgctgcgcgaggccgaacaggacgccgcaagcaagggcgtggtgggcatccgcgattatgaaatggccgaaaacatcgatacgtggatcaatcgtttcgcggccggcattaacggtttgcgcgtggacgctggtgtataccccgagcggttgcaagccgccattgacgcgggttggcataccggcaacccactgccgggcagcgccgggctcggccatgtgggcgccatgaagctcatctcggacggatcgctcaacacccgctccgcctactgctccacgccgtattcgggcatcgagccgccgacgtatggcacgctgagctacacgccgcagcaaatcgaagactatatgcgcctagccaccgagcatggcttcgacatcgcctgccacgccattggcgacgaagcgaacaccattgcgctcaacgcagtcgccgccacgcacgcacatggatcgatcgagcacgcacagatgctcaaacccgtcgatatcccgcgtttcgccgagctggggctcacggccagcatccagccgcagcacgccatggatgaccgcgacgtcatcacccgtttctgggccaacccggccggtatcccttatccgttcagggccctccacgacgccggtaccacgctgcgcatgggctcggatgcgcccgtggccccgctggacccgtggctggccatttccgccgccgtgttcggctccgaaagctctgaccgcgagccgttccagcccgagcagtgcctcgatgtgcgcacctcgctggcagcctcgaccgccactggccgtgaccgccttgcattcggcgacccggccgatatggtgttgctggacgccgacccatacgccgccgatactccggaagccatgcgcgctatgccgcaacacgtcgtaatgacattgctgtgcggggagcgtacgtattgatgcaagccatcggcatgaagtggccagaggtccgtcttgatagccgcgttgcacggaaaacatgttgtgttttttgaattgagagttactaacgcttgattctccgtttcaaggggcggatttgagcctttccggaggtctatctccgtttcaaggggctggtcatgcgctcaatctcagataaaatcccattcacgccaacgtcattccgccgtttttgtgcctcgcctacttgagcaacagcccctcgaagcggagatagacctccggaaaacaagaaatccgcccctcgaagtgaagataggacacagcagacgccgcaatgcaaaaaacgccgtgtcagttgcccagttggggctgacatggcgtcttgctacgagcggcgggaaaatcagtacttcatgcccatggcctcgcgcacctggtcgagggtctcctcggcgatggcgttggcgcgcttgttgccgtcgtgcaggatgtcacgaatggagtccatgtccttggccagctcggcgcggcgctcgcggtgcggggccaggaactcgttgactgattcgatgacgtatgccttgagtgcgccggcgccggaatcaccgatctcctcggcgatgtccttcgggtcgcggccggtcaccagaccggcggtggtcagcagggcggagacctgcgggcgggcaaccgggtcgaaggtgatgcggcgctcggaatcggtcgggctcttcttgatgagcttggcggtttcctcggcggtggcgcccagcatgatggagttgccgtacgacttgctcatcttgcggccgtcgagacctggaatctccggtgcctcagacagaatggcggccggctccgggaacactgggttcttcttggcgtaacgctcgttgaaacggcgggcgatggtgcgcgtgatttccacgtgcggcaggttgtccttgccgatcggcacgacattggccttgcagaagaggatgtcgcacgcctggtgcaccgggtaggtgagcagcaggccggtcaacgcgtggccggacgcctccatctcggacttcacggtcgggttacggtgcagctcagcctcggtgaccagggacaggaacggcagcagcagctggttctcggccggcacggcggagtgggtgaacatcatggtcttgttcggatcgatgccggcggccatgtagtcgagcaccaggttcagcacgttgtcttggatgtgctcggtggtgtcgcggtcggtgatcacctggtagtcggcgatgatgatgttcgtgttgacgccgcgctcctgcatggcgacacgctcacggatcgagccgaagtagtggccgaggtgcagccggccggtcggacggtcgccggtcaacatggtgaaggacgacggcttggcctccagcttggcgagcgtttcgtccgaacgctttttggccgcgaggaagctcgcgcttatctcattgcctgccgctgtcagttgctgctcgtcggtcatgcgaaaatcctttaaatagggctcagataaacgctttttatggtaaaagtgtgagccgacaacgaacaagccactattagtggtactctctattgttgatgaatcgaacagcacagtaatcgcagggggtcagatgggccgcggacgtcaaaaagcaaaacagcagaaaattgcccgaaagctcaagtacctgaccaccgataccgattacgatgagctggcaaaagagctaagcgagcaggagccgggcacgggctctcctgacccgttcgccgacatggatgaccagtatgcggacaaggatgtggattctgctgctgacgccgacgccgccaaggtctcgcccgccgcgcaggaggacgacctcgacgagtacgccaagtgggcagccgaagccgccgcaaaggcgaccagcggcgagttcccggcctccgcgccggccgcgcccaagccgaaaccggctccccgtaagccgattccgatgcccatgccctcagcgctgaagccgaagaagagctaagcgcacataggcatatgccggatatcagcgggcaggatgggccaaggcccaccatgctcatcatggacaacgaccgcatggccctgatggcattacagtcgattttgtcgaaggccctgccagacttcgaattgttaccgccggtgagcgaaggcagcaaagccattcagctgtgcacggccaccaaacacccgcctgctgtgctattggccgatatcgcgatgaacgacatcaatggtccggatgtggtgcgtgcaatccgcagggaaaacgcgaccacggcgatactggccattaccgcctcgattgtgggccgacatgcccaggagatggcccgggccggcgcacagggcatcatgagcaagaacgatgatgtgcgattgcaggccgtggctatccgccaggtgcagaccggcaaaatatggggcgatggtggcgacgtgcggttcgagaccgcggccgttgcgtccgcgcgcatcaaggccgagaaggacaaccggctgagcgcgcgtgagatggaggttgcggaactgtggtcccgcggccggaccatgccgcagatcgccgccgaactgtccatcaccgaaaccaccgtgcgcacgcatctgatgcgtgcggccgacaagctcggcgccggcaatctcaaggaacttatcggcgcatggattcgcatgaacctgcactgatgaaggcgccgatgggtgtgtggggacacggtagaagaagcgcaaggcgcataaggggagcgggccggtgaaacgtccgattatcatttcgcggcattcgtcgtattcgtatggtcacgccgacggcaagaagcatcatcagattgatatcgatatagaactcaatcatccgctggcgatgttcggcccgatcggtgtgcttgcggtggcggccatcgtctatgcggtgaccgggtcgtggctggtcacggcgtcggcggcgttgacggcaagcgtgctgctggtattactgggcattgcgttgcgctggcgcaagcgcgtggtgaatcaggagaacgaaaacgagcagatggaatcggcgctggccgatctgcgccacggcaaccagctcgcgatcgaactgcacgacacgctgtccaacgatctgacgtatatctcgaccatcgcccggaataatctggccgcgccagccggcatcgatggtggcgactggcagcgcgtgctggatcgcagccaacgtgcctttgcggaagtgcatggcatcatcgattttctgaccgagcagagcggaatggacgccggcttccgggacgagtccttgccggtcggtggcaccgggacatctgaggtggcgactgcagaatcagggcaggttgattcgccgacgaaagaatccgccctggctcgtgacccggtaggcaccgggagctgtccagcgattgcgaatgaggtggttgacaatgccgtgcctgagaacgccggtggcgatgaccgtacgcaatccacagcgggcatgccgcaatccttcgtcacgcgtgtgaaggcgcagatcaccgataccgaggagtttctggaggcgcagggctatcgggggacggccgcggtcaacggcatcgccatggtcgtggaccccgaggcggcggccgaggcgctgtcgctgatgacggagatcggcacgaatatccgtcgccatgcaccggcgggagatgattcctatctgctgttcgtcactctgtctcccgaatggattgagattcgcgagaccaacgatatccgtgacgatgccgacgcgcagagtggcctgtccgcgcaggagcggtcggggcgtgggctggccatgcatcgcacccgtgtgcaggagttgggcggtgagttgaccgcccgttcggacgatggcgtatggatgatttacgtgcacattccatgcgtgcggggctgatggggcagaagctgcgatgtccggcgtccggcgctgattgtgccctgtcctcacaaatgaggacgacgaccgcagccatgtccccataaccgaggattgcgggtgttcggctcggcggcggctccctatggtggcgtccataaggaccaatcccagggagggcaacgatggcaagtgatacggatttatggcggggaactgattacggatggtggctggctgcggacacgtccggcgcggtcggtgccagcctgatcgcgttcgcggtgccgctgatcatgctcgccacgacaggatcctctgccgccgccaccacgacggaaagcatctgcgtggtggtgcagacggtgctgggccttgccggcggcgtgattcaggaccggtatgatcgccgtacgctcatgctgatctggggtgcgtccggtgtggtgctctcggcggtggcggcggcagcggtgatgctgttcggcaatgcgccgaagacgagcggccatggggttaacggggcaaacgctccggcattcggcggaccgtatgcccacgtgcttccgatcgcgctgctgtgtatcgtcgtgctgttttcggtgcgcgatgggctgttggagaatacgtcgaatgccatgctgcgtggcgtggtgccggatgagcagctgccgcacgcgatggcgctgaacgacgccagggattcgacggtcacgctggcaggcgggccgttgggcggtctgctgatgaccgtgggacatgcggtgccgtttctgaccagcgcggtgctgagcgtgctgggcatggtgtccgcatggcgtatccgccgctattggaaacgtgcgactgtgagcgatagcggccgtccgggcaatgttgataccggttcggaggtcggggccgtctcggacgcc

SEQ ID NO: 3752 - DNA, 5188 bp, Unknown
  R150_10m  MAG No. k141_18030
caaccttgggcagcagcgaagtcgaggcatttctgtcctggctggcgaacgagcgcaaggtttcggtctccacgcatcgtcaggcattggcggccttgctgttcttctacggcaaggtgctgtgcacggatctgccctggcttcaggagatcggaagacctcggccgtcgcggcgcttgccggtggtgctgaccccggatgaagtggttcgcatcctcggttttctggaaggcgagcatcgtttgttcgcccagcttctgtatggaacgggcatgcggatcagtgagggtttgcaactgcgggtcaaggatctggatttcgatcacggcacgatcatcgtgcgggagggcaagggctccaaggatcgggccttgatgttacccgagagcttggcacccagcctgcgcgagcagctgtcgcgtgcacgggcatggtggctgaaggaccaggccgagggccgcagcggcgttgcgcttcccgacgcccttgagcggaagtatccgcgcgccgggcattcctggccgtggttctgggtttttgcgcagcacacgcattcgaccgatccacggagcggtgtcgtgcgtcgccatcacatgtatgaccagacctttcagcgcgccttcaaacgtgccgtagaacaagcaggcatcacgaagcccgccacaccgcacaccctccgccactcgttcgcgacggccttgctccgcagcggttacgacattcgaaccgtgcaggatctgctcggccattccgacgtctctacgacgatgatttacacgcatgtgctgaaagttggcggtgccggagtgcgctcaccgcttgatgcgctgccgcccctcactagtgagaggtagggcagcgcaagtcaatcctggcggattcactacccctgcgcgaaggccatcggtgccgcatcgaacggccggttgcggaaagtcctccctgcgtccgctgatggccggcagcagcccgtcgttgcctgatggatccaacccctccgctgctatagtgcagtcggcttctgacgttcagtgcagccgtcttctgaaaacgacaatggaggtggtagccgagggtgtggaaacacccgactgccttgcgtggttgcggcaggcgggttgcgacacggtgcagggtttcctgttcgccaggccgatgccggcggcggccttcgtcggcttcgtcaaccaatggaggaacaccaccatgaacgccaatgaaccgagcaccagttgctgcgtgtgctgcaaggaaatcccgctcgatgccgccttcacgccggaaggggccgagtacgtggagcatttctgcgggctggagtgctatcagcgcttccaggcgcgggccagcactgcgaccgaaaccagcgtcaaaccggacgcttgtgattcgccgccgtcaggttgaggcataccctaacctgatgtcagatgccatgtgtaaattgcgtcaggataggattgaattttgaatttattgacatatctcgttgaaggtcatagagtcttccctgacattttgcagggaattccatgactggacagcgcattgggtatatcagggtcagcaccttcgaccagaacccggaacggcaactggaaggcgtcaaggttgatcgcgcttttagcgacaaggcatccggcaaggatgtcaagcgtccgcaactggaagcgctgataagcttcgcccgcaccggcgacaccgtggtggtgcatagcatggatcgcctggcgcgcaatctcgatgatttgcgccggatcgtgcaaacgctgacacaacgcggcgtgcatatcgaattcgtcaaggaacacctcagttttactggcgaagactctccgatggcgaacctgatgctctcggtgatgggcgcgttcgccgagttcgagcgcgccctgatccgcgagcgtcagcgcgagggtattgcgctcgccaagcaacgcggggcttaccgtggcaggaagaaatccctgtcgtctgagcgtattgccgaactgcgccaacgtgtcgaggctggcgagcaaaagaccaagcttgctcgtgaattcggaatcagtcgcgaaaccctgtatcaatacttgagaacggatcagtaaatatgccacgtcgttccatcctgtccgccgccgagcgggaaagcctgctggcgttgccggactccaaggacgacctgatccgacattacacattcaacgataccgacctctcgatcatccgacagcggcgcgggccagccaatcggctgggcttcgcggtgcagctctgttacctgcgctttcccggcgtcatcctgggcgtcgatgaactaccgttcccgcccttgttgaagctggtcgccgaccagctcaaggtcggcgtcgaaagctggaacgagtacggccagcgggagcagacccggcgcgagcacctgagcgagctgcaaaccgtgttcggtttccggcccttcaccatgagccattaccggcaggccgtccagatgctgaccgagctggcgatgcaaaccgacaaaggcatcgtgctggccagcgccttgatcgggcacctgcggcggcagtcggtcattctgcccgccctcaacgccgtcgagcgggcgagtgccgaggcgatcacccgtgctaaccggcgcatctacgacgccttggccgaaccactggcggacgcgcatcgccgccgcctcgacgatctgctcaagcgccgggacaacggcaagacgacctggttggcttggttgcgccagtctccggccaagccaaattcgcggcatatgctggaacacatcgaacgcctcaaggcatggcaggcactcgatctgcctaccggcatcgagcggctggttcaccagaaccgcctgctcaagattgcccgcgagggcggccagatgacacccgccgacctggccaaattcgagccgcaacggcgctacgccactctcgtggcgctggccaccgagggcatggccaccgtcaccgacgaaatcatcgacctgcacgaccgcatcctgggtaagctgtttaacgctgccaagaataagcatcagcagcagttccaggcgtcaggcaaggccatcaacgccaaggtacgtctgtacgggcgcatcggtcaggcgctgatcgacgccaagcaatcaggccgcgatgcgtttgccgccatcgaggccgtcatgtcctgggattcctttgccgagagcgtcaccgaggcgcagaagctcgcgcaacccgatgacttcgatttcctgcatcgcatcggcgagagctacgccaccctgcgccgctatgcaccggaattccttgccgtgctcaagctgcgggccgcgcccgccgccaaaaacgtgcttgatgccattgaggtgctgcgcggcatgaacaccgacaacgcccgcaagctgccagccgatgcaccgaccggcttcatcaagccgcgctggcagaaactggtgatgaccgacgccggcatcgaccggcgctactacgaactgtgcgcgctgtccgagttgaagaactccctgcgctcgggcgacatctgggtgcagggttcacgccagttcaaggacttcgaggactacctggtaccgcccgagaagttcaccagcctcaagcagtccagcgaattgccgctggccgtggccaccgactgcgaacaatatctgcatgagcggctgacgctgctggaagcacaacttgccaccgtcaaccgcatggcggcagccaacgacctgccggatgccatcatcaccgagtcgggcttgaagatcacgccgctggatgcggcggtgcccgacaccgcgcaggcgctgatagaccagacagccatggtcctgccgcacgtcaagatcaccgaactgctgctcgaagtcgatgagtggacgggcttcacccggcacttcacgcacttgaaatcgggcgatctggccaaggacaagaacctgttgttgaccacgatcctggccgacgcgatcaacctgggcctgaccaagatggccgagtcctgccccggcacgacctacgcgaagctcgcttggctgcaagcctggcatacccgcgacgaaacgtactcgacagcgttggctgaactggtcaacgctcagtttcggcatccctttgccgggcactggggcgatggcaccacatcatcatcggacggacagaatttccgaaccgctagcaaggcaaagagcacggggcacatcaacccaaaatatggcagcagcccaggacggactttctacacccacatctccgaccaatacgcgccattccacaccaaggtggtcaatgtcggcctgcgcgactcaacctacgtgctcgacggcctgctgtaccacgaatccgacctgcggatcgaggagcactacaccgacacggcgggcttcaccgatcacgtcttcgccctgatgcacctcttgggcttccgcttcgcgccgcgcatccgcgacctgggcgacaccaagctctacatcccgaagggcgatgccgcctatgacgcgctcaagccgatgatcggcggcacgctcaacatcaagcacgtccgcgcccattgggacgaaatcctgcggctggccacctcgatcaagcagggcacggtgacggcctcgctgatgctcaggaaactcggcagctacccgcgccagaacggcttggccgtcgcgctgcgcgagttgggccgcatcgagcgcacgctgttcatcctcgactggctgcaaagcgtcgagctacgccgccgcgtgcatgccgggctgaacaagggcgaggcgcgcaatgcgctggcccgtgccgtgttcttcaaccgccttggtgaaatccgtgaccgcagtttcgagcagcagcgctaccgggccagcggcctcaacctggtgacggcggccatcgtgctgtggaacacggtctacctggagcgtgcggcgcatgcgttgcgcggcaatggtcatgccgtcgatgactcgctattgcagtacctgtcgccactcggctgggagcacatcaacctgaccggtgattacctatggcgcagcagcgccaagatcggcgcggggaagttcaggccgctacggcctctgcaaccggcttagcgtgctttatttaatgagatggtcactccctccttcccagtactatgctgaggacaggctttcattcggagaaccatcatggaaaacattgcgcttattggtatcgatctgggtaagaactctttc

SEQ ID NO: 3753 - DNA, 5460 bp, Unknown
  R35_2m  MAG No. k141_175
tattccacggacttgagcgagctgaccgggtctacgcgatcgagcactgggttggtgaacagctgcaccagcagcgcgaacgccagcgtcgccaccacggcaatcgcatagctgtaccagtgcacttccacttcgaaatacagcgacggcatattcaacgcagcagtcagtaatccgcctatccacctgccaagcggcagaccaaccaccacacccataccggtcaatatcatcatctcgcggttcacgtagttgtgcacctcgcggtcatagaagcccagcaccttcagtgtggccatctcgcggatgcgttcggacacgttcgtattggccaacgtaaacagcaccaccagcgccaggccgccggcgagccccacaatcagcgccaccacggcacccatcaaatcgaacttaaacgtggcggccagatgcgcacagctcacggccttgagcaccgacgattcctcgcccaaccgatccgcatattcggcctgttcggtctcggaacctttcagcttggcgagcatcgcgttccacgtcaaggtcgaggcagtgccatctcccgaagccgaagacgtcacaccgccggccgcaaacttctggtcgtacagtcgctcactgatgtacacatcagagccaataagattgcgcgtcacggccgtgacctgcaccttggcccggctgctaccgccattgcccagcgtgacggtgtcgccggcatgaatattcagcgagttggcggcggactgcgatacaatcacgccactatcgtccagcgctacagtgccgccacccgctttgccgaagatattgggcagcccaaaccatccatcatcgccggcttgttccagcgtgaccatatcgttcaagatattcagcgaatcgttgggcacggtcatcagctgcacggtttcgctttcctgcgccgcgttgctcatctcgccactatccacgcgcagattcagcgtttcggtggtttggccatcttgtgccacctgcttgcgcatcgcggtggcgtcatcgtcattggccacgaccatcaggtcgtactggtagatctgctcatattgcttgacgccaatcgtgtcgacggtgtcgttaatcgcaaatccgcagataatcagcgctgtgcaaccggccacgccgcccacggtcataatcaagcgcgacttgaatcggaagatattgcgcgcggtgactttgccgaggaagttcagccggctccataccgggcgaatccgctccagcaatatgcgagcgcccgctttcggtgccttcggccgcatcagcgcggcgggcgtgtgccgtatctcctcgcgacaggcgagcgcggtggccacgcccacgccgaccacgaacagcacgatgccggccgagccgtacagccagtcgtattcaagtcgcacaccgggcaatatatacagtccttcaatcaccaccagcaggaatgccgggatgccaaggaatccgaccagcagaccgatgccgccgccgaccaagcaggcgagcaacgcgaacagcagataccggctggacacggcgagtccgccatagccgagtccaaggtaggtgccgataagtccgcggtcttcctcgaccatgcgggtcatggtggtcaggctcatgagcacggcgaccagcaggaacacaatcgggaatgcgcggccgatggattcgatggaactgacgtctgatttgagcgagctgaatccgtcgatcgaagcgcgcgtctgcacataccaacgtgcgttggccacatcgtcgatgcgccgttgctgcttggcgaattcgctttccgcttcgcttcgcttcgcatcgagttcagactgcgcatcatccagtttcgccttgccgtccgcgagctgttgttcgccttcttccagctgccgctcgccttcttcgagctgctgcttgccgctggccagttgggcggcctgcgcttcaagttgcgccgactgggtttcgagggttgcggcattcgcttcgagttccgcggatttggtattgagctgtgcctctcctgcagccgcttcctgttccttggcggtcagttgcgcgttctgctggtccaaggtggattgtgcgggggcaatggtttcgtttaatgtgcgctgcaaatcggctttctgctgggtcagactgtctcgctgcgtttgcagttccgtttgcttggcggccagctgttgccgcagctcactgattgacggcacttcaggcagggtaatgccaaggcgcgcgagcagttgcttgatggcctgccatgtgggtgagttgaagtcgatattcgggtcaagttgcgccagtagattgtcggcctgttgaatcatggacagcatctgatcaatttgtgccacgccttggtcgatttgggtaatgccctgttcgattttcgtgcgattggcagtcagttccgtttgcgccgcatcgagctgtttgcgagccgaggtgagctgcgctttgcccgattcgagctgggtgcgcgcttcggctatctgctggcgaccttgcgcgatctgttgacgggccgatgcaatctgcgcacgtccatcggcgagctgccgttcgccatcggtaatggttgtcctgttgttctccaattcggtacggctatcttgcaatgtcgttttgttggcttccagctcggcccagttgtcgtcgatctgcttctgggcttcgtccagctgctcgttggcctcgtctttggcatcatccagtttgcgctgcgcgctggagacgatctgttgacgacgggctttctggcgtgtggcctgtatctgatgttcgatacggtcggccacggttttgatggcttcatcgtaggcatcggaaaacgtgtcaaaatcggacgcaccagtgacggcaaccgatatcgcagtgtatatattgccggtcacgccgtcgctgggtgcaaagaacgcatagtcctcggatgaggtggaccggaaggaggtcatgcccgaatagccgtctggattgttgaggtcgcgcgggtcgagtacgacgccggtgatggtgagtttcgtggggaactgcggggattgctcggcgtcggcgtccgtattggcgtcggacttcgcatcggatgccgaggcattggcggcgacacctaccgtatcggcattattggaatcgtcagtctccgtggccgctaccgatatgacggatgaagaggtgtcttgtggcgtcacagtaatggtgccgccaatcttgagtccgctatcgttcaggaattgctgcgtaaccgccacttcgccggccttgttcggcagtttgccctgccgtatgtacggctgatcaagcccttcggtaccgatttcctgcatggtcacggttttcttggtgccgtccaccaacgtggtcaccgtctgagaacgttcgggctgcacggtttgcacaccgtcgattcggcgcagtgccgttgcatcatcatcggtcaggccgtatgtggatagcacctgcaggtcatgcagtccctgctgatcgtaaaaacgaccggccgccagaaaagcatcgcggcatccggcgtagatgccggtcagcacggccacgccaagcagcgtgatgacggcgatcgagacgaacctcttccagctgcgcagccagcaacgcaacgtatctttggcaaataccgcagaaacgcccgctcctcgaccgccgctatcgtcgaggttccgccgcttcacagaatgtttcacaggttgtttcacgaatcgcctcgcttgtttcacggggcgtttcacagagtgtcttgcagtgagcatcgccaatcacctaccattcgatatcggcgatgggccgcggcgttgcgttgacctcctcgctggtcaccttgccggagcggaagcgaatcactttgtgagccatcggtgcaagcgcggaattatgcgtgatgatcattacggtcatgccttgtgtttggcaaatatcctgcagcaactgcagcacttccttgccggtctcgtaatcgagcgcaccggtcggctcatcgcacaacaacagcttcggctttttggcaatcgcgcgggcgatggatacacgctgttgttcgccgccggacagttgcgcggggaagttgtccatcctctcccccagtccgactttgcgcagcgtttcctctggatcgaaatggtcagggcagatttgcgaggcgagctccacgttttcgagcgcggtaaggttaggcaccagattgtagaactggaagacgaagccgatatcgttgcgccggtaggtcaccagttcctttttccgcagacccgtaatatcgcgtccgccgaccactacgcggccggttgtggcggtatccatgccgcccagaatgttcaatgccgtggttttgccggcaccggactgccccagaatcacgcttaattcgccttgttcggcggtgaagctggcctcgtcgagcgcgcgaatcacactgctgccagaaggatattccttgaccacatggtcgaattcgatatacgccatcgcacacctccaacgcgctcgtggcagccacctagccccataggccccgccagaacttcctgctatactcaagtaaaacaacactgtgtcggttctgcaaccaacagttggattgtgggttgtcggaacttggggagaaggccatggccaaagaattgacggaaagccgccgcacccgctacacgagacgtgccatgcaggacgcgcttatcgagttgctgcgcgatcagccgctcggctccatcaccgttaaagcgttgtgcgagcgggccgatgtgaatcgttccacgttttacgcgcattatgcgagcatcgaggaactgctgcacgacattgaagacgaaaccatggcctgggtcaccaccgcactcgaacagctactcgcccagccagatcctgccggcatcgagcatgttattgagcgcatctgccagtacattgccgacaatcgcaatcatctccaagtgctgatgagcccgaaagcggatatcggtttccagcagcagctgctgggattgatttacagccagcgcggtgtaggcgaacagttgcaatcttcggcgggttacccagccgaggcgcagatgcgtatgcgattcgccgtgtccggcagcattgggcttttgcaatattggctcgccaccgatctcgcggcctctcccgaatcggtgtcccacaccatcttcaccatgtgtatgcctgccacgcagtgagcacagtgaattcggtgaactcagtgaactcagtgaagcgtgcggtttcataagcatcgctcgctatagcttcgcctgctcaccggccgcgcccacgcccgcgcttgcaatagcgcacaaatagacgattgaccatttctgagacgatacggcggcatagaataacgaacgttgcgcatcacggcaagccccgcgtgcgccaaacccaagaaatgtgagagaagagcacaatgagtactactgatgcgcctaagaagccgcgcgaaaccgacga

SEQ ID NO: 3754 - DNA, 35827 bp, Unknown
  R35_2m  MAG No. k141_184
accggttcaaatccggttgggggtacgacgaacaactcttcggagttgctacgccaagccaaattggggtgtggtgtaattggcaacacagctgattctggttcagccattcttggttcgagtccaggcaccccagccaataaccctcgcggattagcgagggttttttgtttttacacgtcctgctcctgagatacggccgagagggtaatcctgaatagacaactctggggcaaagactgggctatagtcccaatccgtgactcaaaaacggcagaaatcccgcgtccgaacgtaaggggcgcgggatttctgccgtttcgggccgtgcaggaccggccgacatcgcgcgttgccgcgacttgagcgctgtccgatcctgaaaacgtgagggagaccgccctcgtttacttcttgaccgcgttgacggcgtcaacagccttctgcagcgacgtggtgtgctcgtggtaccacgtgacctgctgttcgagtttcttggtcgcggcctggtagcccttggtgtcgtcggccacgcagccttcgtacgtcggcagttccacggtcagttccttggacagcgcgtcgagagcggaggcgtccgagacgtctgccttggtcagagcggcggcttctgcagcatcgccattgaccaagttgttgtagtcgttggtggtgttacgtacgtcttccgaggcggcggcgcaggcggccactgcgctatcgtactgagacgcgctgtatgcgcgggcgccgaacaccgcgaccgcggcgataatcgccaccgccacgatggcaatcactatagcgacccacttcgtcactcgcttgttgtgcggctgtgccgtcgcttctgcttggttctgggattctggctggttgccgttcgcctgctgtgcgtcagtcatatttacctctacttctcactgcccctgtttgtatcttgcggagggcctgtttcaaacaacgggtatccaacatatcgaggagagccgagattgccgggcgtttcctactggttgcgctgtggcgtggccgtttttgtctcatatggcgaaagtatgcgccagaggctattgccggccggtgacccacggcgcatccgaatggacgtgcggaatcatcatcgcgatgaccgccagcagacacccgagcatcaccatcaagatgatgttctcgtgtccgtgcgcctgcagaagcgcgccggtcagcgcgccagacgccagcgccagcattacgaccgcgcgccgcccgagcttcgactgctggtggccgtgtgccgaagcgtctgcgacgacgccggtcagcgtcatcgtgagcacggtggtgggcaggtccggcaccgacagcttgcgggcggtggagttctggatgcccattgccggggcgagcagcacgatcagcaggatgatgtgcaggtcgatgtgccgtgcggtggggaagttcaggctcggctgtgaggcctgtgaggcctgggtggtctgtgcaagccgtgcaatcgaggagacgccggacgcatcgtctgcggggccggtgatgagctggttcaaaagatagacgccgattagcgcggcgagtacgaacgacgcctgcacgcaggtagaaaccaacagatgcttggcccggttctcctcgaatcgccggatgatgcgcccgccgataagcgcgccgaccatgaaggagacgagcgtcagcgccgacgtccaccagacgaagccttgggcatgggcgatcgaaaacccaagaaacacgatgttgccggtcacgttggccacgaacacatgccccagcgacaggtagctcagcgcgtccaccagcccggcgacgaacgtcagcaccaccaaggcgggggagagcagaccgtatctgtcttccttgcggggaaccaacgtgcgtcctgcttcggcaagatgtgatgtcatggttgcgacgaggctccttttcgggattgaaattatggcgagaacatgcgtcggtcgacgccgccactctactccctactcccgtacggttcctccggtttccgctcgtgcgcagatcgtcgggacggagaagacgccggtgatgcagatcgatgtgccgaaatcccgcagcgtggtctcgaccaagtcgggcaaggtgttgcgacgtcgtatgaaggtggatggtacgccggagagcgtgccgatgtacccgtacgagatcgccacgcgcctgtccgatttgggacgtttggacttttccgcgcagccggtgccggatgcgacccgtgatgatttcgatccccttgaacgcgaccgtctgcgccggattatcggcacctaccaatccagtgaccgtaatttgttggaactgaccgatgaggagctggagaaatccctgcaattgacggtgaccgtcgatggcaagaccatgccgacgctgaccggtttgctgctgctgggcaagggggagtctctgaaacgcttcgttccgactcatcaggcgtctttccaagtcatgtctggtacggatatcaaagtcaaccaagactatgccggaccattgctgaagaccatcgagcaaatcaacgacatgttctctccttggaatccaagcgtcgagctatccgtcggtctgttctcaatgatggtgccggaattcgaccatcgggcgttccgagaggcgctggtgaacgccttcggccatcgtgactacaccctgctgggacgtgtgcgcgtgcagttggatgatgcggggcttaccatcgccaatcccggcgggttcgtggagggcatcaacatccataatctgcttaccgccgaaccgcatggtcgcaatccctgcctgatggatgcgttgaagcgaaccggattggccgagcgtacgggacgcggcatcgatcgcatctgcgaagggtcgctgcactatggacgtcccctgcccgattacacggcgtcgaatgagcgtaacgtgtccgtgtacctgcagcgcagcgcacccgacgtcgaattcgtgcggatgcttgccgaggaacaggagcgcaccggtaagactatgccggtcaacggtctgctgattctgaatatgctcaggaacgaacgacgctgcacgttcgagaccatgaacaagaaactcgatatgagtgagcagcgtctgcgcgctatgctggggcagcttacggaatccggcatgatcgaaggttctggcaacggttctcggcggacatacactttggggtctacggtctaccggcgcaccggcaagaccatcgagtacgtacgtcagacgggcatcgaccgggtgcgatggccggagctcattatgaaattggttgcagagcagaatgatgtcacgcgggcggatgtcatggaactgctgcatgccgatgcgaaccaggcgtactaccagctgtccaagctcgttaagggtgggaagctgagggtcattggccgtggcaagggggcgcgctatacgatcggtggctttaccgggcgaaagtgatgtgctggcagatgtgcctgtatgggtgctttgtgctgggcatcgtccgaacttgggaagtcgcttcggtacttaggaaggtacctaggaacctaggaagtggtgtgggtaaggttcctaggttcaggtatgcgttcgtgtggcgttcatcggagggggtcagggggaaccttcgcgctgggccgaccggtattcgctgcgatgcgcttgcgatacggaggctgggattgttgcgaaccaaaacgaaaaaactgcgcggagcacacacggggaacgacaccatgggcgctgcgtccgtccccgccagcccatcaccctccacccgcgacgaggttgcgcgaagcgaaagccttcccgaaccatatcgcggcccgaggcgcgccatagttgcaccataagtcagaccaccggcgcgaccggcccgcgaaaacggcggttttccaacgcccccacaagaaaaagataggcgggaagaatagaacaacatgatcgagcggctgaacagggagatccgccggcgcacgcgcgtggtgggcggcttccccgacgggaacagcgcgttgatactcatatgcgcccgcatccgtcacgtcaccgcgaacgaatggtcgacccgccgctatctcgacatgtcccggctcggtgacaacctcgtggaagcgaactgactatcgcgccatggacggccacgatccaaagtgcgcaacttttcgggcactaccagtgcattcattagggtgcatatgtctcaagcattatgccgtgagctggtttatagtcccatagccttagccatatggttgatctgagcgcgtccttttgcggggctgattggctccggcctcgtgtggagtatcttattggtacgaaaatcctcggggtgctggtcaaaatagtcaattgccatcttgcagattgactgtagtgcatttatcgtctcgatcagtttcgggcagtcttgataagacattgccgaataatcgtaccttttcgttaggcgatgtaggaagtcctgtgttttcagtttggcggtattccgcacgccggggctatcgacaaggatgaggaatccgcagatcgttgccgcaaaatcatgtgtcaaagggtaagtgcggaatgcgtcgaataattgtttggggttttctccatggttgagctctttgacgcagtttttcacatacaaggtcggtttaatctgtttttcgataccgatcattaggcagttgttgtgcgaagaggcattgcgcataatccggatggattggaacagattcgtcgcgttgtctttgtagctccgctggtttaagtatgccttgtagagtttgcatagtgtactgaagtcaatcacttcccaaagattccaaattgaaggatcttcgaaatacttgttcagcaagccttcggtgtaattggagtgatgataacgtgagttcacatagtctccatggaatgagaattcaccggcttcgtcgaagttgtgcacgatgttgtagccatcttcattagcgtcttccatgatgagttgattgaaacgcactttcaaggcgtgttcgaggttgagacaaaggtagcttagtagcgttcgcaggtggcagtcgatggtggatagatctgcgagatatgcgaaatccagtccacggtaccggccgttatctcgctcgaaattgttttcgaaggctttgagcttgaagaaatacgtacggctggttaggaactcttgcgcgtctgcttccgtgtacagattaaatgtgacgccatgcgatttcagagattcgatctgctgacttacgctgtatttcggacgccgcatagtacctcacaataaccaatggggcgcacgctacaagagcgccgccccacctggtaggacccctgacataaaatcaaggccttttgttcaatcagtcacaaatttacagtgcgaaatagcgcatgtcaagcatggagtgttgtcgctatgctcaatttgctgtgaacttatcacatccacggccatggtcttggaagccgctattatttgtacttccgccgagccatctcgcggcgggccttgcaggcccacaggcctcccttgccgatgagctcattcaattgcgtggcgttgagccgttggtagtgcaggtctgttgcgtagggagggagactcgccttccatccggcaatgtctgtgacggaaccgtcggcttcgcctgttgcgggatgatgagtggcgttctcgctcgcgccgtcttgccgtcttgccagttcagatgtcggttcgtttgccgtaaggccttgcaaatcttgcgttttctccgggatcgcccacggatcggcatcgtcggacaaggtgggaaacgccgtcttgtctggttcgtgcagaacgttgcaatagcttggttttgacgaaggcggcaagatggcagtagctcttgtgacagcgaccggatccggcacagttgcttctggagtctcagtttgttcaccgctgagggtgtccgtggcttccgcattcaaatcttcagagctctcctgattcggatgatccgcataatccggcgacagccaccaccacatgttgccgtacttcttgcttgccagcagtgactttgggcgtcgtctgccgtccagaacttgctgcttgctgaactcgcctttcgcttcgttgattactctgtacgacggcacaccccaatacaagccatccggtgtgagctccttgttgtggtcgaagtagtcttggatgatggcccggccacaaccacaatggtcgctccggttccacatcagctaaacgggtcagcgaataggcgcggggcgtcagttcagtcttaagctcagactcaggctggctgctttcgcttggcaaaatctcaaactccaagccgctcatcgccgcgtcggaagcgtcgtgagcctcaccagccgcctggataaacgtcaacgaccgcacgaacggtgtcagcgtctgcgccacttgctccttccagcgagtgccggtgtcgtccttatccataatggcaaccacatcagctccactaagggctaagcacgctgaatcaagatccagtttcgcggcgaagttgccgccgcctcccgatgcggttacagcggcatagccgagcgctcgcaatgtgccggcatctttttctccctctatcagatacactggcttgcccgatgccacggcacgtttcgcgtcggcggccatccacaacgggtgcttgccggcggtgttgccgctttgcgagattcgcttggtgggagagcgacgaacaatcagaccgtccgcatattcatatgctgtgccgcgctcgctgtcgtagatcattgcttcatagccattggaacgagccagcgtagcgggagcgttcagcgcgttgagcacatcgtcggcttggcaagtgctgcagcggagcaatgtggcgctttccagcggggaatacagcacagtgagcgagtcggctgtgccgcagtttgggcaagtgccgtgcagcaggccggtgtttggctgaactgcaatagctgcgcagatggcggcgaacataggggatcggcctagggccaatggttccaagtatggttcgggcatctcgtactgctgtctgatttccgcagagttttccgtgtgtgcaggtgtaatcgtcgttgtctcatttctgctgagaagcggagcgttcgtgacattcgcatgccgtatggccgccaaatcggcggcagtgagccggctatcgcagctgtaactgttgtagccgctgtaatcggcatggccttgaggtccgctttgttgatcgaacaggtcgatgattttcaatccaagtgcaccggcaatggaagcggcatcgcagtgttccgctccgaagcagtgcagcatggttttgccgttggactggtcgtaggtgatgtgcagcgaagtgccgccgtctccgtcatgggcggggcagctgcactgagcgtgttgtcttccggaggtgtcgcgcggaagctcttggagcctaggatctcgagaatagcgtctcgcggcttcgagcactcgctcgtatgaggttgccatgctcactcctcacctgcgaattcgcgcacgctggtgagaatcaccagaaacgtgttgcctaccttgcgagcgcgtatctttccggttctgatcaatccgtaaacgcttttcacgtccttgtagcccagcatctccgccacttgcgctggcctggcggtgaggcgcgggtagtcatttttcgttggaattgcagccatatgtttccttgctctcgtgcggaacagagcctgaggagcgaagtgcttccgtcgaattcggacgcacttcgccctatatggttctgttgtggttgttggctgcaccggtgcatgttccccaggtttttgccggcccctgggaagctggaattcagaatatgacgttattccaaggagcgcaaaggttgaaaacggctgaagcttgaactagatgtgtggtcgtgaaatcgttggaatttcaacgaaaacaagtgattctgcggtgaaataaggcgttcagaataagacgaataggctttgttggttgcaatgagattggcttatggcatgttgtctttgatgagcccgtttgtcttggttgagtccagtggccttggagtttgttggcttctggcagaaattggttgaatttgttaagtggatttctccgtatccgcgcttgtgatctcaagcattccttcatactcgtcgaggttggttacgcgggtgtccttcagcagttcccgcagggacgggatacccgtctgcggggttcgtgcctccgtgtttttgatggcccgcagcttgcggaagaatgattcgacgatgctgatgtattccttggccgtccgtatgcgcgacaccgttttgccggcggcccacgccgccgccgtcaattcgttccggatgtcgtgcgcctccttcttggtgggcggcccgatgatgcgcgacctgtccggggccttttccgggtcggttagggaatcgtatatcttggcgagtgttttcctgcctttgcggcggatgggttctgggcgcatgccttctccttggcggtcatggcggtgccggtgccgttcgctggcgaatacccgggggaggttgccggcggtagggtctgccggtttctcctcgggcccatccgaccgacgaacgttcctcggcttcctgtctatgcatcaaggagttgatcgacggttcgaatggaccttcatggcacccgtatgcgttcgtgtggcgttcatcggagggggtcagggggaaccttcgcgctgggccgaccggtattcgctgcgatgcgcttgcgatacggaggctgggattgttgcgaaccaaaacgaaaaaactgcgcggagaacatgaagggactcgaatcggcccactgacgggacacatgggacgcggtcgggcttcgatgacgaacacgcggcgggcgggggccagaaggcgttttcggaatcgtcggttccgatatgtgacacgcgcggcgggtcggggccaaaggtgtccaaacggagggtacctggagggaaccgacaatcggaaggaaccaaagcaaaaccccggaaaccgaatgatttcaacggtttccagggctccaatccgggcggaggatacgagattcgaactcgtgaggctgttacaccaacacgctttccaagcgtgcgccatagaccactaggcgaatcctccatgctttgcagtgcgcagttgaactgtgttccgcaggcaactcgaataagttaccacaggtttcggataagtgcacgcttcggcgtggcgcgtgtcgcgacgcggatgtgaagaatgatcactgcgagtgaaagactcactggaaagtcccgcgcaacacccgcacaaggaccgcatgcttgtgcagggcccacacacccgcgcgcacctacacaacccccggtaaagaaatcaccgtatccgggtgaattttcgatgttcgcccggcgcgcgcccgcaatcgcgcctaggctgttgagtcatgaacgaggggacggcggccgacgtaaccgcagcacatggcggccagtcgcgccaatcgaagaaacactcaaagacgtaccgcagcatatccgcgatccttagttggctcacggcccgccgcccgaccacgttatccacatcgctgcgcgcgcgattcctcccttacctgctcacgatcgctatcgcctggctgccgtggctcatactcacctggccgggttcgatgcgcgacgatacgcttgcccaatatctgcaatcgtccggtctgcaccactactacacccagcatccgctgtttgatacgctcacgttcggcctgttctggcatatcggcagcgcactcggctcccctctgatcgggcaggccctgtacaccgtgacccaagcggttctactcgccgccgggtgcgcgcttctgctgtgctacatccgcaaaatcggctcgccgcgctggctcatcggtctcggcctcgtctatcttgccgccaactatgtggtggtcggcgcaatcaccacgatgggcaaggactcgttgcacgccgtgttctatctgccgttggccgtgctgttcgtggaggcttgtctgacgcgcggctcggtactggctcgccgcccggtggcattcgcgttcgtcatcctgttgttcgccaccatcgtctccaagcggacggcgctcataatcgtgctatgcgccggctgctgtttgctcgccgtctgcacgcccaaaggcgcgcggcgtcgtgcgttcgcgtgtcttgcggttgccatcgttgtggcgcagggcgtgtggacgccattaagcgcggccgccacgcatgcgaatcggtcgcccggacgtgaggtgtggggcctggtcacccagccagtggcccggctcgcgcacgatgatcccagcgcgatagacaagattcagcggcagcggctgaacgcgatcatggacctcgactgggccgccgccggcatcaacccgcaccgcaccgatgagaccttccgcactctgcgcgagcaccctaggccaaccgcggcgcaacaactcgcggccctgcaggtctgggtgcagctcggcctcgcgcatccggttgaatatgccacggcctatgccggggtgactcgcggatggtgggacccgcgcgtcaatttcgcgtaccccactgattccgactacctgttcacgcctagctatctcaggcaatgggcgtctttcctgactgaaggtgcttggaagcatacttccgacggcgatgccgataccgtggcggccgaacgacttgccgccatcgaacatgaccttgcgccgctgaggggtacctccgacaagccgcaatggcagaaaaacatattgcgggcgattcatcggtgggtgcgttcggatggtcatgtcggtgttcgcaaaggcaatccgctgacttcgatggccctgtacgtcacgtggattccgctggctgctggtcttgcgctggcggtgcggcctgcgcgacgacgctacggccccgcactggccgcttacggcttgctggcattcacggtgctgtcgctgtatgcctcacccgtggcactattttggtatccgattccggtattcctcacgttgccgctttttgtggtgttgccgttcacattccgggaaagccatcctctctgagcatagttatctcagatagtgaaataattgcggggttgaaaagcactaaaacgccttctattacctcgcacccgtcaaaaaatcaagactgttgttcaagaatttttttctatagagttcatagttgtttttggaccattcgagtacttgaagtgagaggaattcagcatggttcgtcgcgcctgcgcgcagtccgctgaaatgaacacgatgcgggaacgtgatacgcgcgttgccgtttctcgcgtgcgcgcgaagtcgggcagcaccggtcgtctgcagtcggccacggtctcggctcgtgcatttgcggtcatcgtttttctgtttgcgatgatcgccgcgaccttcctcccctccgccatcattccgcagtccgcgttcgccgtgacgccggcaaccactgccactgctgccaccgtcaagagcgacgacaccaccagcgtcgattacgcgacctgggccgacgttgccaaggccgtcgaagcgcagttgcaggaaggccttaaggaatacaaggacggcaacccaatgggggccaagtccgatttcggggctgcatacaccaccgtctacgtgacgtccaacttcaacaaagtggtgagcgacaccatcggcgcagacaagcagaccgcgcagcagcaggccttccaggacctgcaaagccaggtgttcacgtcagaccaggccgatcagcttacccagaaggtcaacgacctgaccgccgacctcgacgccacggcccagcagctcgacgccaacaccagcctcgccaacccgaagcagtactccgaagacctccagaagcagatcgccaaggagcgcaaggagctcgacgccaagaagaagcgcaccgaggaaacggccaagacttggaaggaagtcgcggatgcgatgcttccgatcctggacaacgcctacaaggcctatgagggtggcgacgccgccaagggcgccacgctcgtgaacgacgcctactaccagcactacgagaagctcggcttcgagaagaccgtgctgagcgccatcagcggcaaccgcgtctcccaggtggaataccagttcaagctgtgccgctcctcgatgaacaccggcaagcctgcttccgaagtcaagaagtacatcgacgacctgaagaacatgctggccaccgatgccgccaagctcgacggcggcgcggccgatgaggagggtggcttcctcaagttcatcaccagctcggtcggccaggcgttcctgattctgatccgcgagggtctcgaggccctgctcgtggtcgccgctgtggtggcctacctcgtcaagtccggcaacaagcgcttcaccaagtggatctacgtgggcgtgctcgccggtctggccggcgcaggcatcgtggcggtcatcttcatgctcgcgttcggcggctccggcccgctgcaggagatcatggaaggcgtgtgcgcgctcgtcgccatgtgcatgctgctgtggaccagcaactggatgctcaacaagtcctcggtggaagcgtggaaccgctacatcagggaaaagaccgaagccgcggtggcctctgtctcctcgcaggtcgaatccggcgagaaggtggcttcccgcacggtgatttcgctcgccatgctgagcttcctcgccgtgttccgtgagggcgccgaaaccgtgatcttctaccagtccatctacacgatgagccaggatacgcatggcatggtggtcggcgcactcgccgccgccgtggtgctcgtgatcatcttcctggtgattcgcttcacctccgtgacgattccgattggcccgttcttcctggtcacctcgatcctcatgtccgtgctggtggttgtcttcgccggcggcggcgtgcacgcgctcatcgagggcgacctgctgcccgccaactacctgccgggcgttcccaccaacgactggctcggattctacccgtacgccgaatgcatcatcgcccaggtactggcagccatcgccgtcatcgcgctgttcgtggttggctttgccaaacagcgtaaggccaaggcccggcttgcggccggtgcgagcaagtcggacgcgaaggctgacgaggagagcgcgcaggcgtagcacaacgcccggtgcgaccatctcgcgcaacacaacttgcgacatggcaatggaagcgattccagcccacgccgccacaactaaaaacagataagtcgtgaataatccattcaccacaacagaaggaataagagaaatgatgaagaacaagaagcttgccgctctgctcggcgtgctgctcgccggctccatggctgtttcgatggctgcttgcggttccaccaacaacgcttccgataccaagtcctcgaccagctcctccgacaccgccaagaaagacgactccaagaaggccgacgccccgactgagacctccggcttcgaagaggtcccggtcggcccctccggcaccgccaaggagcaggacaaggccgctggtccgctgaccgtgggtgccgtctacttccagcccatcgacatgtaccctgcttccatgggtctgaaggctgctgacgcttccttccacctggaagccgacatccacgcctcccaggaaggcaccgactacggctacggcaagggcgacttcgtccctgaccttactgtgaactacaccatcatcgacaagtccaccggcaaggaagtcgagggcggccaggccacctccggtaccttcatgcagatgaacgcctccgacggcccgcactacggcgccaacgtcaagctcgacaaggccggcacctaccaactcaagctctccatcgagtcccctgagaagaacggctggatgctccacgttgacccggagaccggtgtcaagaaccacaagttctggaccgagcccatcgaggtcaccttcgacaactgggactacaccccgcgtcagtggtgattgactaagcagacagccccctcgtcagagggggctttacgccgctttagggagataattcttaggacggtctaaaaactcccctcagtccgctttgcggacagctcccctcagggaggggagcctaagatgaacagagaaaggacgcgaatgcttgaacaattcgtggcagtgatgccgggcaccttggcccccgcattgctggtgatgagcctgagcgtgatgctcacggtcggcgaggggcgagataagccgataagctcgcattggcgtctcatcggcctgaccgtcggcctgatcgccgctatcacattcgccggcctgcgcgcctcggccgtgatcaaccagcgcacgttcgtcaactatccggtgctgtggtgcgcgatcattgccgacatcctcaccatcgtcgtggtggtgttcgcacgccgcatcaccaccaattggcagcagcacaaggtgttcatgcacattgcgaacgccgtggccgccatcgacatcgcgctcaccctgttctacgcgctgccggacgtgatcctgcagctgaccatctgggtggagcccggcgacccgatcttcacgtccgacatgctgctgcgcgcgctcggcttcgcgctgggcctggccatgtcgatcatcgtggccgtgatcttccgcacgatgcgttcgaccgcggtgcgtgcctcgttcaccgccgccgttctcgcggtgctggtgattctgttcgtccggcacctgaccggtgtcatgcagatcctgcaggcacgcggtttcccgataggccacacgggattcgtggccctcgcctggtcgatcaaccacaacgactggatgatcatggcccaggcgttcgtgttcctgattccggccgtcgcctccgtggtggccggcttccgcatgccgctgaccggcgcgaacgaagccatcggccgcaagcacaaggcgttccgccgccgcgccgtggcctccgccgtctggagcctcgtggccatgatcggcgtcacgctgaccctcaccgtcggcgtcgccgcgacccatcagaccatcactctttcgccgccggaagcctactcgctcaaggacggcgtggccaccattcccttcagccaggtcgaggacggccacctgcaccgtttcgaatacaaggccaaggacggcaccgtcatgcgcttcatcatcatccgaaagaacggtggcgcgtacggcatcggcctggacgcctgcgagaactgcggcgacgccggctactacgagaaggacggcaagatcatctgcaagaagtgcgaggtggccatcaacctggcgaccatcggcttcaagggtggctgcaacccgataccattcccgtacaagaccggccacggcaagatcaccattcagactacggatctggacgcgctgagcgcccacttccagtgagtcaggcaggagacaagaatcatgttctttctgcgtatgattactcgctcgttcacccgacagctgcgccggcgcctgcttatcgcgctgaccgtatgcctgtcggcgaccgtgtccgtatcgatgctgggcgtcgtgttcgacgtgggcgacaagctcaacgccgagctgtccacctacggttcgaacatcaccgtgcagcccaaggcggacgcggtcgtttccgacctgtacaacaccgagtcgggcggcgcggcgtccaccagcgacccgaccgcttttctgaaggagtcggacgcggccaagatcaagacgatcttctggtcgttcaacatcaccaacttcgcgccgcagctcaacatccacgccacggtgaacggtgccaacgtgccggtcgtcggcacgtggttcaacaaggacctcaagatctccaccggcgagaccaccgtcgtgggcgtggaaggcatgcgctcgtggtggcagctggacggcaagtggcccaaggacgattccgaccagggcgtgatcggcaagacgctggcctccgaactcggtgtgaccaccggcgacaccatcaccctcaacaagaccaccgcctcgggcaagaagaacgagcagaaaatcaagctcaccggcgtctacgattccggcgacgaggacaacggctcgctctacatcgcctcctccacggcccaggtgctcgccgacctgcccgattcggtcgacaagatcgaggtcaaggccctgaccacgccggagaacgacctggcccgtaaggccgccgcgaacccggccgcgctgagccaagaggaatgggagacctggtactgcaccgcctacccgagctcgatcgcctaccagatcgaagaggtgattccgggcgcggtggccaagcaggtgcgtcaggtcgccgcgttgcagggcaatgtgctgcagaagacgcaggccgtgatgattctgatgaccgtgctgagcctgatcgccgcagccgtggccgtggccaacctgatggtcgcctcgatcggcgaacggtctggcgagctggcgctgctcaaggcgctcggtgccaccgatgccgcggtatcccgcctgatgctggccgaaacggcggcaatctcgctgctgggcgcgattgtgggcgcgttgcttggttccggcgtggcccagctgataggccgggtggtattcggttccggcatcacgatgcggccgatggtgttcgtgctggtgttcgtgctgctggctgtcaccgtgctgctggcgtccgcctcctcgattcgttcgattctgaatctcaagcccgcggaggtgctccatggccgctgagtttatctacgtaggtgtggaaggaggaaaccgatgaccaacaccggtatgttcttcagaatgctgttcagcgccgtgttccgccggcgttcgcgcgcggtgatggccgtggtggcgtcgctggtcggcgcggccacactgttctgcctggcgatgatctgcctcgccgtgccgcagcagatgaacgaggagatgcgtgcgtacggcgcgaacctgattgtcacacccaccgaatcgaccaatgccgacggcaaggccggcatcgacaaggcgatggtgcagcacaccactgaaatggtcaaggccaagggttccgcgaaatacgccacttaccgctacgagaacgtgcgcgtcaacgcctcgccgtacgtgatggccggcgtgaatgcggcgcaggtcaagaacctcaaccatcactgggtggtcgacggctcgtggccgaccgacggcaaggtgctggtcggacgtgacatcgccgacgccatcggtctgagaatcggctctgccatcaccatcggctaccgtgcatccgataacgccagcaccaacggcacttcgtcgaactcctcgatcgaccagcaaaccaaagacggccgtgtctccagtgacatcatggacacctccggcaccgaattccgcgtggccggcatcgtggacaccggcggcagcgaagactcgatcatctacgccaccaatgccgacgtcaacaagctcaccggcatcacgcgcggcgtggacgtcatcgagtattcggccggctccagcgacctcgcaggcctggtgtccagcatcaacgacatgacctccatgcacgtcaaggcgcagcaggtcaccaagatcaccgcctccgacacccgcatcatcaccatgctgcagacgctgttctggatcgtctcgttggtggtgctggtgctgacgctcgtcggcgtcggcaccacaatcagctcgatcgtctcgcagcgacgcaacgagatcggcctgcgcaaggccctcggtgccagctcgcgtgccatcggcaccgagttctacatcgaatcatcgctctacggcctgattggcggcctcatcggcaccgcaatcggctacggactcgccagttggctgtgcgtggcggtgttcgaacgctccatcggattcaactggtggctggcgctgatctccgtgctgttcagcgcgctggtcgccatcgtcgcctccatcccgcccgtccaccgcgccacccgcatcgaccccgccgtcgtgcttcgcgaagaataaagaaagagaaacgtcatgctacttgaactcgaccacatctcgaagatctacggcgacctgcatgccgtggacgacctcaacctgaccgtgccggaaggcgaatggctcgccatcgtcggctcctccggctcaggcaagaccacgctgatgaacatgatcggctgcatggacacgccctccaagggctccgtgaagctggaaggccgcaagctggaggacctgaacgccacgcagctggccgacgtgcgcaagaacctcatcggactggtgttccagaagttctatctggtgccgcacctgaccgccgtggaaaacgtgatggtggcccagtactaccattcggtggtcgatgagaagcaggccatggaggcgctggaaaaggtcggcctgaaggaccgcgcccaccacctgcccggccagctctccggcggcgagcagcagcgcgtgtgcgtggcccgcgcgctgatcaacgacccgaagctgattctggccgatgagcccaccggcaacctcgacgagaagaacgagaaaatcgtgctcgacctgttccgcaagctgcacgagcagggcaccacgattatcgtggtcacccacgatgcgcttgtcgccagctgcgcgcagcgcgagatcatgctcaaccatggcgtgctcgtcggtgagaagtggaatgacgaggatgcgcgcaaggcctacgaggcggccggcggcaagcccgcctccacgggtgcacaggtcgagggcgcgcagaacggcgagaccgccattggtttcgctgaccccaccaaggccgcgaaaaccggcggcgaggagtagggccgtcaggggcatcgagcagtatgtgaggaatacatggcaagctgatggtctctcccccagtcagcttcgctgacagccccctcgtcagagggggcttaaggagcgtgaatatgaccgaaaagaatacgttgaagaaatccgcgacattggcggcggccggactggtcgtggctggcgcgctgctggccgggtgcggcgaatccaaggccacgccgatggacgatgcgtacgccggcaactcgggcgagaccgagaagtcgcaggaagagcagtcgcaatcccagtcgaacggctccgatagctccgacggctccgattccggctcatcgcacaacgacccgtccaccaccacgtccgacaagaaggacaccggcaactacaaggacggcaactactcgatcaacggccagtacggcccggtcggcgaggattccatcgacgtccatctgaccatcaaggacggcaacgtcgagaccgtcaaaatcattgggcacccgttcaccacgatttccaagaaccatcaggacgacttcgccaaagccatcaacggcgtagtggacggcaagcccctgaagggactcaaagtggacaaggtcgccggtgccagctggacctccgacgccttcaacaaagccctcgaagtcgcccgccaggaggcttcgattcaggagtaagaccgctacttcagcaatgctggccacagcagatcggccatgcgcgaggcccaggcggtgtcgtcgtccatcgctttgccctcgatggcctcatacgccaccaaagacccgataatcgtggacaacagcaacttctcgtcaacgtcctcgcgaaacacgccctgcgcgactccctgcttgaggaacgcccccacatgctccagccacggggtcaccacctggtcgacgatgtgctggaagaactcggcctcgctggacaatacaatgcccacgcgcttgacgtcgatgtcgttgtcgcgcacccaatcgaccaatcgctgcaatagttgcgtgaaatgctcacgcgtggggctgggcactgggtcggaatccgggatggccagatacatcgcgctgatctcgcgcagcagctcgtcggcattatggtatcgacggtaaatcgtggttttggccacgccggagcgccgggccacctcctcgatggtcacgccgctgatgccgcggtccaccgcaatctgcagcgtggctcgcatgagcttgcgatccgtcgcctcgcgcgtgcgctcaccgcgcggtgtcgccgtcgtacctgtcatctccgtcatctcttctcttcgaaatatgctcccgtacgctcccgttggcgggagctgactggcaaagccagactgagggtggtaagtccatgccgtttgtaggcaacccccggataatacctactagcccagcactttagtgctctcgactttggccacataccactggttgaaccgcaccagtggcttcctgagcaacagcccaagcaacagcagcggcggcacgaatgccagcagcattccggcggcccgccagtaatccatgtcgtagatgccggcgatggccgcacgcatcatcgtcaccgcatgggtgagcggcaagaacggactgactttggcgatgaagtcgggcaacatctgcaccgggtaggcagcgttcgcacccgaaatctgcacgatgagcataagcacgccgattgccttacccacattgccgaaacttaccaccatcgtataggtgaagaacgagaacaccagcgaggccagccatccggacaacataaacagcagcggatgcacggcctgcacgcgcaggaacagcagatcgccgccgagcgacaccgtggattgcagcagcgcaatcagcgcgaacaccccgtaatgcccaaggaagagccgatgcggccgtggatcgcccaaggctttgcgcgtccggcgagacacggtggttttcagcgtcaccaccatcagcagcgcgcccacccacagcggcagcagcgtgtagaacggcgccatcgacgaaccgaaattcgccaccgggaatacggccttgcgcctgagctgcaccggcgcggccaacgtactggccagcgtttcgggatcattgcccagcacctctttggccatgctcatatcgccactgtttagtgcgtcgctcagtgtgctgttgaacgaagccagttcggcaccggcggaacgcagtttgccggacaccttgcccaaggtggtgcgagcgtcgccgagcatatcgctggcgtcgtcggaagtccttttcaggtcgccgagcgtggagtccaactgggtggcgccggaactcagtatgccggaggcgtcagagacggtggacgacagggagtcgatttgcggtttcaccgtggccgtgaaatccgacttgatattggcgatactgttctgcgcttgatcggccagatccttgacctgcgcatgctgatcctgcgcgtcctgattaccttggcgaatatcggtcgccgccgtattcagcgcttgccgcagcctgttctgccgtgcgattgaacggtcaatcgccgtgatgatggatgagtcgttgcccagtatgccggccaacgtgttgcgaatttcagtgtatttctccgtctgcttgccaatggccgtggcttgacggtccaattcgtcggcggccgtggtggcaccatcattcgcgtcggaatacagcttgtctatggaatcggacaccgcgccgaaactggaggcgctcgcgtccagtgagctgctcatcgcgtcagcggtggtgcccagggctccgaccacgtcggtgactccctgcttggcgctggcgagatccttgcctccttgtttggcggcagaggaaacctgagtgatcagcgagttcgaggtgtcaagcaaggcgccggccgtatcggtcaatgcgctgtatgtgccaagcaaatccgccgtatcgtcaagccgtgtggcgaaatcggcgatattggcgttgaaggtattcagttgctctttggcctcgggcttggacagctgatcggccagcgaagacgcgatttccagccctgccgaagtgatggtcttggcgaacgtggtgttgatttccgccgcaacctcatccgtgccctcgttgagcagattcggtgccagcgcgttcttcttctcgttgcggtaataggtcagttcggcatgctgcacatcgtcggagaagaaggtcatcatgtctttgctgaacgacttcggaattacgatggccgcgtagtatttgccggatcgtgcgccctcgacggcatcggctttggacgtgatcgtccaatcgagctgactgttggcgcgcagcgcgttcaccacctgatcaccgaccgtgactttcaccgggatcaggtcggaacgatacccctcatccacattcgccaccgcgaatttcaggttcttcatattcgagaacgggtcccagcatgcggccacgttgaaccaggtgaacaggccgggaatcatcaccaagccgatcacgatgatgatggagaccacgttgctggtcaggcgtttgatgtcgccggtaaacagtttccacatggtgttcatcgtgcgtgcctgccttccttggtcggcggaatagtggggatgattgcggtaacggcggcgctcgggtccgcttcttcgtggcgttcggcggaggtgtcgcgacgcttggccttatgcccgtacagcatggcgcggatcgactcgtcggagaggttgccgagctcggtttggcggcggatggaatcgcgcatgaattccacgaccatcaggaagcccatgatgatgagcacccatgccagccatgtgcccatgaccacgattttctcgctggtggtcagcacaaacacgataatgagcgcggccggcaccatgaatccggcgataagcgcacccagcagcagccggggataacggtaggcgaatttggcggcccgacgttcgatggcatgacggtattcgtcgcggtcggccagtgccgcaatggcctgagtgacacggtattcgctgccaggcaggtgcaccggctcgccgataatcatgtcgctttccttgatttcccgcgcgaacaggcggttgagattggccagtttcggccgggcgccgaggccaagcgcaaaggccagaaccgcgaaaaccagcaatttgccgatataggcgaaccagtggccgtcgtagaagccgccgatggtttcacgcattgcgtcaatcgaataggtgaacggcagcagcggatagatggcacggaagaacgcgggcatcatttcaatcgggtacaggccggaggcgcccggcacctgcagaatgaccagcgccacgcacacgcctttgcccacgtgcatgaacgtggtggagagggcgaaaatcaccgacatatacaccagtgaggtgatgacgcaggtgagcagaaacaccggggcgctcgcgcattgaatgccgatgacaagatcgccgatggccgtgaccaggccttggacggcggccagcgtggccagcagcaggaaacggccgagatagccttgggttggcgtgagatcgtcgatgccctcgtcgtcggtttcgagtttgggaatgaccacgagcacgaacgcgcccacccacaaagacagggtggtgaacagcggtgccatgccggaaccataggaggcgaccgggtagacggcccgttcgctgataacagtgggggagagcatgaagtcggcgattgtggcggcatccagtttgccgtcggtgccgatcagggaactgagtgaactggagatgctcagggctttgatgtcggtggtcagcgtttcgagcttggtttgcatgccggccagcgccttatcggtgtcgtgcagggcggtcaccgtggtggaggcggctttgtcgagttgatcgagggtgctcttcgactgatcgatgagtgagccttgcgacgtgatgccggtcgacagagtgttggcggtcgagctgagggtgttgaggccggtgttgagctgaggaatggcgccggaggtgatggtgccgcgagcggtattggcctcgcgcaccgtggtttgggtggcggtattgagatgctgcgccaatccggcggtgtctgtggaggcgttgccgatagtggtgttcaggctatcgaggttgcccagtgcgccggcaagctcgctattgtggctttccagtgtggcaatggcggattgcagcggttctcgatcggcgttcggcagccctttgagttggtcgatgatgtcggcgttcgcttggttgatgtcttccgccgtattgatcagtccgtctacctgctgattggcggcgctgatggttccggctaccgtgcccacgctttggttggcctgtgctgcggcctggctcagcaggcttgagccttggtcaagcgcttcggacgtggaggtgacgaagccgttcagactggcttgggtagtgccgatcagggtggagacgccggccaggccttccgcggtgtcgatgccaagtgcgcgcgcgtcgtccagcgcctgacgtgcggtgcgtgtctgctccggggtattggtgagtttggtggtgagcttggcgatggtgctgcgtgtgtgctgcacgtcgccggaggcctcggcaagggccgtgagggccttggctttggtggtgtcttcggtgctgatggctttgccgccaaccgtattgatgacttcggtaagtacttcggatacggtggagacgaatgtggaattgaccgtgcggtccacagtggacgcgcctacgtcggtgactttgggggcgatggcgctggctttttcgttgacgtaatactccagagtgggccgactcttgccgccggtcaccacgccggcgagatcgtcggaaaagtctttggggatgatgatggctgcgtatgccttgccggattccacctggtccatggcctcggcttcggtgacgaaggtccagccgagctggtcgttgcttttcagctgcttgacgatttgatcgccgaggttttgcttgccgatgagcgcgttgtcggtgccgtcgtcattgttggcgatggcgacggtgatgcctttggtattgccgtacgggtcccagaagccgacgatgttgtaccacgaatacagtggcgggataaacaccatgccgaacaggatcacccatgcggccggcaccttgaacaggcgcaggaagtcgcgtttgaggaccttgaagatattgcccactgatacctccggagcttggtgttgcttgattgctacgttttccgtagcgatacgttaatcgtagcgctacggttgtagtagcgtaatacggctgccggagattattggggtgattgatgatggttttggcggaatatcgccgctgcccagcggcttatcgtgtgtcgctgggcagtgtgcctaattttttgtggctggggtgctgtgtggccgggtgtgctgtgtgtgttggtgtgaggctgccctccatggggcggtaaaaccttcattgggtggtaagtggcccatggggcggtaaaattcccatggggcggtggcttaaaatggctttattccgcggaatgcggttttgggctaaccgccccatggggtaattaccgcctcatgagagagctaccgcaccatgggtaaaccgttgtatcagctttcgatggtgccggattgaccatcaatggccgactgctcgttctggctggatgactggtcggagttggagttaccggaagtatcagaacctgtgccggagctgctgccggtgccggactggccatcagtgccttggctggagcgaaaggcgttctggaacttattgacaagatttctggatggtttttggatgtttcctgaaagcgagcgggctcggtgtccggcaatgtagacagacatgtaccggctatccatcaagttcggcaaaactgcaatcgggtgatagtgtaaggggacgctatgtggggaggaaaccatggttgaattcaaggacgatggcacggccactacccctggcaagccgcgggagaaccgtgacgccgagtccgcagtcgtggctgatctggtggccgtcgaactggacgacgccggcttgaacccgaacgccaagcgattaccgattctggcgcgcatctatggcgcggtcgtgctgctggacggactcgccacattgccgattatggtgatttccatcctctatgccgtgcgcgagattctggatggtcatgtgcacgtcgatgcgatgagcctgactttcatcctgtccgcgattcatgcggtggtgctggtagtcagtgccgcatgcctgattgtgttcggcgtgatgctgctgcgcaatcatcgccggtatgccgcgcgctggacctacgtgctgatgccgttgacgttggccgacggcatgctgtcgctggccctgaccggccttggcttcaacctgctgctgccgctgattcagatgattattctcgtcgtgatttcggtgaccgccgatccctccctgagcgaggaacgccgtttgcagcgcgcgctcaaacgcatggacgatcgcgatgattatgaatcggcggtggcggccggcatgctgggccgcgaccaatccggcaagggctatattgcactggacttcttcaatatcttctggctgtttaccatcgcttcggtgggtggcctgattatggagacgatctaccatatggcgctgtataacggtgaacttcaggaccgcgcgggtttgctgtggggcccgttctcgccgatttacggctgtggtgcggtattggtaaccgtgtgcctgaatcgcctgtggaaggcgaatccgttcttgatcttctgcgcttcggcggtgatcggcggcgcgttcgaatactgcaccagctggttcatggaagtggcgttcggtattaccgcgtgggattacaccggccgttggctgtccatcgacggacgtacttcgggccaattcatgttcttctggggactgattggtgtggtgtgggtcaagtggctgttgccgcgactgctggctctgattaatcgcattccatggaaagtacggtattcgctgactgcggtatgcacggtgctgatggtgatcgacattgccttcacgctgatggccttggattgctggtatgggcgcatggccggccagccgcaggattcaccggtcgcgatgtggttcagcgaacgctacagcgacgcttacatggccaatcgcttccagaccatgcatatcgacccttccaaggccgggcgtatgtgaatggctggcaagtaattacgcttcgcgggcagaaggtgcgtagaacctaagacagccttcgcgtgtgggtggtaagtgggatacactttcaagcgttgaaggaatgattccctccgctgatgtgctgttttgtgacgcgcgtgatgacgatgggacaatcaaacgaaaggcaaggcgcatggccgaagctacagcaaacattggtgtgattggactggccacgatgggctccaatctggcgcgtaatctggcgcaccatggcaacacggtggcgttgttcaaccgtcactactcgcgtaccgagaagctcatgaacgagcatggcgccgaaggcaacttcgtgccggccgaaacgctcgaggaattcgccgcgtccctgaagcgtccgcgtaccgccatcatcatggtcaaggccggtgctccgaccgacgcaactatcgcgcagctggaagaggtgttcgaaccgggcgacatcatcgtcgacggtggcaactccttcttcaaggacaccatcaagcgtgagaaggaagtacgtgccaagggcttccacttcgtgggttgcggcgtgtccggtggtgaggaaggcgcgctcaacggcccgtctctgatgcctggtggcactgcggaatcctggaagaccttgggcccgattcttcagtccatcgccgccaaggtgaacggcgaatcgtgcgtgacccacatcggcaccgatggtgccggtcactttgtcaagatggtgcacaacggcatcgagtatgccgatatgcaggtgattggtgaggcgtatgacattctgcgccgtggactcggcatggataccgaggagattggcgacgtgttcgctgaatggaacaagggcgaccttgactcctacctgatcgagatcaccgctgagattctgcaccacaaggatgccgagaccggcaagccgttcgtggacgtggtcgtggatcatgccggcatgaagggtactggtacttggaccgtgcaggctggtctggaatttggttctcctgtggctgctatcggtgaagccgtgttcactcgtgcactgtcttcgcacggtgagctgcgtgaagacgctcagaaagaaggtctggctggcccgaacaagaccatcgatctggccggagaagacaaggccgcgttcgtcgaggacgtgcgcaaggccctgttcgcttccaaggtcgtggcctatgctcagggcctgaacgagattcaggacggtgctaaggaatacggctgggatatcaacctgtccgaagtggcccgcatttggcgtggcggctgcattattcgcgcccagttcctgctcgaccgcatcaccgaggccttcaagggcgataatttgccggcttccctgttgttcgatccgtacttcgagaagatcatcggcgaatcgcaggatgcatggcgtcgtgtaatcgtgcgtgccgtggaggccggtatcccgaccccggtgttctccagctccctggcgtactacgatggtctgcgctccaagcgtctgcccaccgccctgacccagtcccagcgtgacttcttcggtgcccacacctacggccgcgtcgacaagcccggcgtgttccacaccctctgggcgcaggaaggccagcccgaggaacagcaggcttgagcgtctgcgacaatctgtgggccgggcccctcattcagggtccggcccacaggaggcgccatcacaactcggtgacggtttcttcggtggagaaccaggtgaactcgtccactccgttggcgtaggaggacgggtaatccgggttgttgggccgctcgaagacatgggccagcgattcggctttgccggcaccggcggcgaagaaccatgtacggcgcgagcaggcaatcagcggcgcggtcaacgagacgcgcaacggcggcatcttgggggagtggttcacacccacggtgagcctatcggtaaccttgacctcatcatgacccgggaacagcgacgcatagtgaccgtccggtcccatgccgagaatcatcagatcgatgaccggttccggccccaattcattcaccaactcgcgctcatagtcgctcgcggcatcgtccagcagcgcatcattcgcggcatcggcggcggcgcgaacggaagcgtcatcactatcggcctgatccatcacatcggcgatgtcatcggctgaacgggtatcggccgccatctcatgaatattcgattcaggcagcttgccatccgccaccagctggtcaagcagcaggcgacgggcctccagagcattgcgatcggtgtcgtaagccggcacaaaacgttcgtcgctccaccagaaatgcacgcgcgaccaatcaaccgcatcagccagtggatcgttcagcgccaaacccaacggctgtgcggccgaaccgccagacagcgccacatccacacgtgtgcgatgcgtgccatcaggcaatcgttcggcgagcaaatcgagtagcgccaagacaaaacgttgcgcgccagcctgaatcatcagatctttattcggatacacaatgagttttcgagttgccatgtatggtccttatatggggtatgtgtcgtactttgcaatgtggattgtgttgtcagttgacaacgcataatacgggtggcatgccgggaatccagccatttgcagcaatgaaatgtgttgtcagttgacaacacaatgtacattgtgcgacatcgcatatgtcactttattactccgcggtcatgagcttcggcatcgcatgaggtaggaaacgatgagcaacggcgttggcatggctcgaccacaattgccgaactcatgccaacgccgctgtggcaacggttctaccgacttcagtgacgaatcagatcccagccttcgttgatgacctcggcgtagatctcatcgggatcgatgcggcgcagttcctcggtcagacagtcctcgatggtgcgcatcggcacggacacttcctgcggagtctggccgggcagcgagatcagcgcttggtcctcatacgggcgttccagtgagatcacaccgtcctcacgggtcaggtacacgccggtcacggcctgcgcgtcgggcacgaactcagtttcgactggtacgccgagtttcagacgcagccatgcgcacagcatttccagaggcaggaagtcggccttgccggtcaccttcacggcggtgatgggcaggtgcggcggctgatcgagcatcgaggcgagcattgcgcgccagacggtcagtcgtgtccaggacaagtcgatgtcttccggtgtccaattgcggcgcaaacgctcgatcgtggcctccggattattggagtgcagcgcgtcggtgatgcgactgcgggccatcgcacccatcagatccttggccgggctcgacggcggtgtggtcggccaccacgccactacaggcgcatccggcacaagcagcgggataaccagcgtatccgggtggttgataaggccaccgcgcggacgcaagatgataatctcaccggcaccggcgtccgcgccgaatcgcacttgggcgttcaggttggaatcgttcggatcgttcgggccgtcggtcaaatcgacggccggattatcgcgattcgcgctcacctcggcggccacttcggtctcgttcggttcgccttcgccggactgatcggcaggattggtatccggtactacggcaatcacgcggcacgggtgctcacggctggccgagttcgcgatttccagcgcatgctctaggtccgcgtcctcggtggcgatgagtagcgtcagcacgcggccggtcgccgattcgccgcgctcctcgtgcagctgttcgattttgtgcgcaatctcgcgggtgcgggtgttcggcatatcgatgatcatggcatcctccagtggcggccgtcgcgcgccagcatttcgtcggcctgtgccggaccccacgtaccggcgcggtaggcctgcggctggccaagcgtggaccagaattgttcaatcggatcgaggatctcccagctgaggttcacctcttcggtggtcgggaacaacggcggatcaccgagcagcacgtccagaatcagtcgctcataggcttccggcgagttctcggtgaaggagcggccgtagctgaagtccatgttcacgtcacggacctccatggtggagccgcccggcaccttggctccgaagcgcatggtaacgccctcgtcgggctgcacgcgaatcacgatggcgttcttgccgagttcgcgcacggcggtctgctcgaacggcagatgcggggcgcgcttgaacgccacggcgatttcggttacacgcttgccgaggcgcttgccgcaacgcaggtagaacggcacgccagcccagcggcgggtgtcgatatcgaggcggatggcggcgtacgtttcagtggtgctcttggggtcgatgcctttttcttccaagtagccgaccacttcgtgcgagccctgccagcccttggcgtactgaccgcgcgcggtgttggcggcgaggtccttgggcaggcgcacggcggaaagcaccttggtcttttcggcggtcaggtccttggcggtgaagctcaccggctcctccatggcggtcagagccatgagctgaagcaggtggttctggatgacgtcgcgtgcggcgccgatgccgtcgtaatagccggcgcggccgccgatgccgatgtcctcggccatcgtgatctgcacgtggtccacatagttggcgttccagatcggctcgtacatggcgttggcgaaacgcagggccagcaggttctgcacggtttccttgccgaggtagtggtcgatgcggaacacggagctcgggtcgaacacttcggataccacgctgtcgagttccttggcgctggccagatcatggccgaacggcttctcgatgatcacgcggcgccatgcgccctcggacgagcgcgacaggccggaggcggccaactgcttggcaacctgcgggaaggcgcgcggcggcaccgacatgtagaaggcatggttaccctgcgtgccgcggtcgcggtcaagctcctgcacggtggcgctcagacgctcgaaggcctccggatcgtcgaacgtaccctgcacgaagcggatgccggcggccagattgcgccaagtcgactccttgaacggcgtacggcaatgcgtccggacggcggccttgacgaattcgatgaaccgctcctgtgtccagtctcggcgggcgaagccggtcaggccgaagctcggcggcagtaggccacggttcgccaggtcgtagacggccggcagcagtttcttttgtgccagatcgcccgtgacaccgaaaatgacgaggctgcacgggccggcgatgcggggcagtctgaggtcgcgcgagtcgcgcaggggattgctccaattgggggattcactcataatgtacaagggtagccgccggcggctatctatcgctagaggcgatatgcgatttgggctgcgattcgggccacattgcgtgtgctgtgccgtgcgttgggccaatcgcgtacgcaaacgtgtacgcaacgccgtagttgaaatatcccaaaacggtgtgtattttagaagagttgcccctttagctcaacggttagagcagcgtccttttaagtcgtgggttgtgggttcgaatcccacagggggcacaacagatccttggaatcgcaatggttccaaggattttttgtttcgaccagcctggctcctagagtggtgccccatgtcatgcaccacgattcttgtcggcaaaaatgccagttacgacggttccaccatcatcgcccgcgatgacgattcgggctcgggccgttacgatcccaagcgcttcgtcgccgtcgcccccgacgaccagccgcgccactaccgcagcgtgctgagccatgtcgaaatcgaactaccggacaatccttgccggtacaccatcgcaccgaacgtgctgaataatcgtggcattctggccgaagccggtgccaacgaacacaacgtggcgatgagcgccaccgaaaccatcgctgtcaacgagcgcgtgctcggtgcggacccgatggtcgagttgcggccggctgtcggcgggccggacagcaccgattatcaggccgagcagcccggcggtatcggtgaggaagacatcatcacccttgtgctgccgtacgtcaccaccgcgcgcgagggcgtcgcgcggttgggcgaactgctcgaaacctacggcacctacgaatcgaacggcgtgattatttcggatgcggacgagatctggtacgtcgagaccatcggcggccatcattggatcgcccgccgagtgcccgacgactgctatgccacgatccccaaccagctcggcatcgacgacttcgacctcgccgatgcgttcggcgagcagcgcgaatatctatgcagcgccgacctgcgcgagttcatggccacgcatcaccttgaccgcacaatgggaacgtcggtctcttccaacggccgtcacgtgcatagcgccggattcggaacaaccgttgcccttccctcccgcttcaacccgcgcaaggccttcggcaccgcgacgccgaaggaccatatctacaacacgccgcgtgcctggtacatgcaacgccgcctcaaccccagcgaggactgggattcgccggccgcccgctacacgcccgaatccgacgacatcccgtggtgccgcgtgccggaagacaaggtgagcctcgaagacgttgatttcctgctgtcctcgcacttcgaaggcacgccgtacgacccgtacggcacgaccggcacggcggaatcgcgccaccgttaccgtccgatcggcgtgaaccgcaccggccatatggtggcgattcaggtccgcccgtatgtgccggcggccaatcgcacggtgatgtgggtatcgttcggctccggtccgttcaccgccgccgcgccgttctacgcgaacgtcaacgacacgcctgcctacctgcgcgacaccacgcccgaagtctccaccggcaacctgtattggacgaaccgcctgatcgccgtcgtggccgacgcgcattggtatgagacgaaccggttcatcgagggctatgcggaaggcgtgcgcgcgttcgggcaccggctcatcgagcgcacggatgagcagttgcttgctcgaagcgatgccgaatcgacgggtacgaatgcatggccgctcgatggcggccacggcgatgagaaggatgtgcagggcgtggcggatgtgctcgaagcggccaacgacgagatggccgactacctgcgcgagcatacaaccaagctgctgaacgacgtgctatacacctccagcaacctgatgcacaacagcttcgcaatgtccgaccgttgggccgagtagcaagacctcggctggggaggtaatagggatgccctgctgataacgcgtcagcagggcaaagccgcaatccgaatcagttgaagccgacgatgcgttcggcgatgagatagccgttgcgcacgatccagcggccggttttaccaggcagattgagcgcgcgggacatcagcttcgagcgcacatccttgccgatggccggagaataggcgtcaatcgcatcccacagctcggttttcttaacgtagttggccggatcgcgcgagagaatcaggaacgccgaggtaacgcatgattcgatcgtcaggaagtgaatcatgtaccggtacagcccctccggcaccgtaccacgttcgggcgtggcctcggtcatcagccgattgacgagccgcagctgatccacacgcttaatcatcacgtcggtctgcacgctctgaccctcgcgcccgatgaagtagtggtagaacggcacgtcgagatactggatgcgcttcacccacgggaacggctggtacgagtaatagaaatcgacgtagaacgtatgctccggcagcttcagcccggaatcgcgcaccacctgcgtgcggaaagtgagcgcatgcatgatgatgtactgcgccagaccgaacttgcccaggtcatcccagccgagcacgcggccggcctccatcacatgacggaagttcaccacgatcttgtggcgcttggtcactttgtcatacacatagttggtcaccagcatgtcgatcggctcgctggcctcacgttgcgcgcgcaacgtggccagaaccgtgtcgatggcctgcgggtcgacccaatcatccgcatccaccaccttgacatacatgccggtcgccgccgtgataccggtgttcactgcaccgccgtggcctttgttctcctggtgaatcgcgcgcacgacacctggattggtgcgttccagtttgcgcgcgtactccagcgtgccgtctttcgaaccgtcgtccacaatcagcacttcgaggtcgcgggtgtcgttcgccgaaagcagcgagttcacgcaacggtcgagataggactccatattgtatgcggggatcacaaaggtgagcgtctttgccgtgctggccatgaaagtcttacgtcctcacatatttagtcgttctgttcagtttcctgttcaaaccgtagcacttcgtctcccgactcggcagagtgttgcgcaacctgtgcccctgaactcacattctgcaaccctgaatcttccctgagcgtgtggtcgaggtccgtctgctctaagggcgatgatgccttgccgtccggggccggtgtttcggcatcgatcccgcgcttggcccggcgctcggcctccttccgggccttgacgccttcaaacaacagctgcggcttggaatcgagccggctcaggccatgccatgccaggtccacgatgta

SEQ ID NO: 3755 - DNA, 4506 bp, Unknown
  R35_2m  MAG No. k141_218
ggccgcgcgggagtcgggctgctcaccgacttggaagtgcttgacaagcgatatggtctgccaggtctgagcgaggatgtggattcggggcgttggatcgaaaccgatgtcaaaacgcctgagggctatacgatcaccgtggcatccgtgtacatacatgccggcaacaccgatgatccgaccaaaatggaacagaagtaccgttttctggacactatgctggcccgcatgggcgcgcttcgtgatgaagccgcacatggcggcaagcaggctgtattatgcggcgatttcaacatcgcgcacacgccgcttgatatcaagaacgccaaggccaatgagaagcacgccggatttctgcccgaagaacgtgcctacgtggacaaatggctggacgaatacgagttcgtggatgtgatgcgttcgttggccggcgacattcaggggccatacacctggtggagccagcgagggcgcgctttcgacaacaatgtcggctggagaatcgactaccagttcgccacgcccgagttggcggagaccgcacgcggattcgtcatcgacaaggctcccacgtatgacaaacgctggtccgatcacgccccactcacgatcacatacgaggtatgacgtattccgtgggacaacatccgaaaatcgacgattttcgcgggtcgtcccacgccccacagcatgagtaattatcgaccacactaaaaatggcgtaattccgggcttcgtgagaaatctgctgtgggacaacactcatgtctatcgattgatgttgatgttgtcccacaaattgtgggacaacatcgggaaaacaccgatttttgcgttttcgtcccacgcgaaccatcatgcaaacctgcacatacgaatattgggttctttccacggatggaaagaacccaatacaatgcgctcaaacgcagattatcagtccagaccaagctggagcttgccgccggggatggcgtcgagcaggtctcgggtgtactgcttctgcgggtggtcgaagacctcatcggtggtggcgtgctccacgagcttgccgtgctgcatcaccacgacctcatcggcgatctggcggaccacggccagatcatgggtgatgaacaggtagctcagacccttctcggcctgcaggtcgttgagcaggcgcagcacctgatcctgcaccagcacgtccaaggcggagacggcctcatcgcacacgatgacgtccggatccagagccatggctcgtgcgatggcgatgcgctgacgctggccgccggaaagctcgttcgggtaacgacccatcacggaagccggcatctcgaccatgtccagcagttccttgacacgattggcgcgcgacttcttatcgccaatcttgtggatgcgcagcggctcctcgatggaacggaagatggagtacatcgggtcgagcgaaccgtaggggttctggaacaccggctgcacgtggcggcggaaaccgagcagatccttggccttgaacgtggaggtgtcgcggccttcgtagaacaccttgccggaagtgggatccaggaggtgaagcaccatgttcgccacggtggacttgccggaaccggactcgcccacgatggccagggtggtgccgcgcttgacggagaaggacacgtcgtcgacggccttgaacatctccttcttgcggggcagcttgaattccttggtcaggtggtcgacggtgatgatgtgctcgcttttctcaagcgtgctttcgccggcgatgtggtggtcaagcagggcgtccgcgtcctcaccgcgctccttggcggagatgatgcgctgggaggccagcgacggggcggcggccacgagtcgcttggtgtacgggtgctgcgggtgctgcagcacctcgagggacggaccggattcgacgacctgacccttgtacatcacgacaatgtgctgggcgcgctcggcggcaaggcccagatcgtgggtgatgaacagcacggcggtgcccagtgagtcggtaagcatgtgcaggtggtcgaggatgcgcttctgcacggtcacgtccagagcggaggtcggctcgtcggcaatcagcaggtcagggcggcaagccagaccgatggcgatgagtgcacgctggcgcataccaccggagaactcgtgcgggaactgacgggcacgggtagcggcgtcgggcagaccggcctcggacagcaaacccgcgatacggtcatccattgtggagccgatgacgtacttcttggcgaggtaccaggcctgatcgtcggccacgccggccttgatgaggtcgtcggccacgcgccaacgggtttcggagcccggaacccattcgttggtgaagcgggcgacggccttgtcgaaggcctcgccggacacgccggcttcggtcaaagccttcttggcctcggtcatgagctcgggcagttccttggcgccgaggaaggtctcgtcgtcgttacccttgacttcgacctcgtcgccggccagggccttggcgagggcggagcgcttctcgtgggccacgtccatgttgttggccttcagtgcttccttgacctgggtgccgatgcgccacaccgggttgaggttgctcatcgggtcctgaggcacgagacccatcttggtgccgcgcagcttgtcgaactcgctctgcttggcgccggcgatttcctcgccgtcgagcttgatggagccgttgaccacgtgaccggtgccgggcagcaggcccagcacagccatggcggaggtggacttgccggagccggattcgcccacgatggccacccactggccggggtagacggtgaagttggcatcgcgcaccgcatgcaccggcttgccggtgtcagtggtgaagtcgatggccagatccttgacctcgagcagcggaccatgctctttctgcatagccagcatcttggcgttggtattgtcagtcataatgattctccactcccctcgctcaggccgtacggctcttcggatcgagggcgtccttgacggcgtcgcccatcatgatgaacgcgagcacggtgatggccagtgcggcggacgggtagaacagcaccatcggatcggtctgcaggttggtctgcgcgctggagatgtcgccgccccagctcaccgtggtggtgggcaggccgacgccgaggaagctcagcgtggcttcggccacgatgtaggaggccagcgaggtggtggcgatgacgatgatcggggccagggagttcggcaggatgtgacggaacaggtttctggcaggcgtggagccgagggccgtggaagcggtgttgaattcgaggttcttcgattccagcacggcgcttcgggcgatacggcatacgccgacccagccgaagagcgtcagcaccagcacgatcttccagatggacttggaggtcttgaacatctggagcaccacgatggcgccaagcagcataggcagcgcgaagaagatatcggtgatacggctcagcaccgcgtcgacccaaccgccgaagaagccggcgacggcaccgatcagggtaccgacgatcacgaccagtagcgtggagagcacgccgacggacagtgaggtacgggtgccgtagaccacgcgggtgtacacgtcacagccctgcaggtcgtagccgaaggggtgtccggtggaggcggggctcaaggagttgcccagatcgcaggcgttcggatcctgcttggtgaacagaccgggggcgatggccaccacgatgatgaacaggatcagcaagccggagatgatgaacagcgggttgcggcgcagggttcgccatgcgtcggcccacatgctggtggccggtgcggattcgtcgacggaatcgacgtcctgcaacggggtctcgtcgagaggagctacgtaacggtcctgaccgggcagggtttccatgaagtattcggttcctggctcgccggtctggttgagctcgttttcagtggtttcgtttgccatgtgactcactcctccctatcacgcgtaacggatacgcggatcgagggccgcgtacagcatgtcgacaacgaggttgcacactacgaaaatcagcatgagcaacgtgacgatggacaccaccaggtttgcctcgcccttcagaatggactggtaggtgaggaagccgatgccgtggatgttgaagatctgctcggtgatcatggcaccacccatcagggcgccgatgtcctggccgaggtaagtgacgactggaatcagggagttacgtaacacgtggcgcagcatgacctgaccgttcgacatgcccttggcacgtgcggtgcgcacgtaatcctcggcgatgttggaggagatttcggagcgggtcagtcggatgatataggccatcgacaccgaaccgagcaccatggccggcatgagcagatcaaggaagccggggtcggcgcctgccgtcaccggcaatatcgcccactgaataccaaagacatattgcatgacgaagccggtgacgaaggtcggcacggaaataagca

SEQ ID NO: 3756 - DNA, 2745 bp, Unknown
  R35_2m  MAG No. k141_240
cgagtcgaacgtggtgatcagcacgtatgacgccgcgcacgctgtggccgctcttgccggccgtgagcttgcaccatgggagggcgtcgtcgtcagcctataagtgttgctaggcggtatctccatttcaaggggctgattacgaacgggaattaccgtaaatgagcgctcgttagcgagataagccactgttttcggtgtccccgcgccatacaattaaaagctatggaacaaaaggatgttttgaaggcgctgcagcgtgatcatgcagccgaactgaagttggccgccggacgactcaaagggactgcccgtcatacggaaattatcccttcgccggtattgagcgagatgaccggtcatgagattctcctgaagccggaaaacctgcaggtcaccggttccttcaagattcgcggcgcgtacaacaagatcgcatcgctcaccgaagagcagatcgcccgtggcatcgtcaccgcatccgcaggcaaccatgcccagggcgtggcctatgcggcccgtgagcgtggtgcgaaggccaccatctgcatgccgcagatcaccccgccgctgaaggtcgatgccaccaaggcctacggcgccgatgtggtgctgtacggcgatgtgttcgacgaatccgccgcccacgctgctgagctcgccgacaaggaaggcatgatttacgtgccgccgttcgacgattacgaagtcatctgcggccaaggcaccatcggtctggagatcctcgaagacgtgccgaacgtcactgacgtggtcgtgccgctcggtggtggtggcctgggtgccggcgtggcgctcgccatcaagacattcaagcctgaagtgcgcgtaatcggtgcgattccggagggctccccggcctggaaggactcgctggccgcgggtcgtgtgtctccggctgaccatgtggtcacctccgccgagggcgtcgcggtcaagcatcccggcgatctgccgtttgcgctgatcaacgagttcctggacgatctggtcaccgtcaccgagcgcgacatcaacgaaatgattctgctcatgctcgagaagcacaagctggtggtcgaggcggccggcgccgtttcgctggccgcgctggaacacctgaacctgcgttcgcgcaagttcgccgccgccaccggcccgcacgtggtggtgccgattatgtccggcggcaatatcgacaccgtgaccatgggtgcggtgattcagaaaggtatgatcgcccgcggtcgcatcatgaacttcgaggtcgagctgccggatactccgggccagctcgtcaaggtggccaccctgcttgccgagcagcgcgccaacgtcattcagcttgaccacgaccagttcaaggcatccggccactacaccaacgcggtgtctctcggcgtcacggtcgagaccaacggccccgagcacatcgaccgcatcctcgtggcactcagggaagctggattccagcccaagcgcatctactgattccaataccgctggcgggaggccgcgcagaagtgtgctccaatatctcccgctagcgggaggtggcgcgaaagcgccggtgggtggttaaccaacaatcatcagttgcttaaccacccaccggcgctttcgttatgctgaggactacttgttctccgcaatcgtctcgtccaccaacttcggcagcgcgacggcgatatcctcatgaatcaagcggctcgcaagatggtcatattgcgtgtgacccatattcatgatggtgatgggcacgcccgcctgcgcggccaccggcacaatgctcgctgccgggtacacctcaagggtcgatccgattacccatagttcgtcggctttggtggccaagctgtacgacttctccatcgctccgtccggcagtgcctcaccgaaatacaccacatcggttttgataatgccattgcatggcatatcgccacgatacttcagtttgcgatggcaatgtggatcgggttcttcatccaaacgggccatgatgtccgccgtggcatattcctgatggcacttcatgcaatgcgaggtgccgatagtgccgtgcaggttcacgatgacgttgtcgctgttgccggccttctcatgcagcgcatcgaagttctgcgtggccagcagcgtcagcatgccggcttgttccagcttgaccagcgccttatgcgcagtgccaggctgcgcattccatactggcgattccttttgccagcgccaggagtactcgcggtcttctttgttacgcagaaacagatcgatgtcgtaaacgctcatttggtcaggatgcttggtccacacaccgtccggaccgcggaaatcagggatgccagcggacgtggaaatgcccgccccggttaatacagcaatcttcttggtcataaccacaggtatacccgcgattcatgaacgaaatccgatgacggagcgttgttgccatgcattgattgtgcgccggtggtgtggttgccgaacgatgaacatggagctgacagtccgaaaactcgtgcgacacgccagccgaataatggattcgatgttttccggaaacattcgaggggttacgctagccctatcagagcaaattgggctctgtgcgacacgccgaaggaaccgcgctgttatgccgattccttgggttcttgtgcgctttgatttgcgttgtggcgtggttgcgtgtaagttattcacctgttgccgctcagcgcggcgggttccttcttctggttggtttcc

SEQ ID NO: 3757 - DNA, 30869 bp, Unknown
  R35_2m  MAG No. k141_290
catcgaagaacggcaggaaacaaaaaactcccgacatgcatcgggagtttggtggcgaccccggccggacttgaaccggtgacctccgccgtgacagggcggcgctctaaccaactgagctacggggccgtgcgtgcctcgctgaggcacaagaggatatgttacagcatcatcggattacgacacgccgtctgatacatcgttccttccaccggcgaaccgaccgcaggtgtggtggacggtatgcggaccatatcgttcgaccgcgcacgaccgcactccccataagacagtagccgtcatgcgtcaacgcacgttgtgcgacaacgcggcacgacgcacggccaccgaggccagcaaaccgatgaacagcatgatgccggcgaccagaagcgtccactggccgccttcgacgaaccctgaagtcatcgcatcggcaatcttcggcgcctcgtcgccgaatcgggccgccggtccatcaccgctgcggaacacgccgatcactccacccgccgaaccactgaccgcttgggccagaccgtcgccgaccttggcgggcagtccgagggattcgagccgcgccggcaatgttccgttgacggccatggccaacgacgcgccggagatggccgaaccgacggcggtgccgagttgtcgaaccgtggactgggtggccgacccttcgccggactgcatgatcggcacttcggagagcaccacgctggtcagctgcgcggaggcgaagcccagacccagaccgtatgcggccatgggaacaagctgccaccacaccgacaatcccacaggcataaggaccgcgaccaaggcgacggcgatgatctcgatcacaagaccgagttgaatcacgccggccggggagagcctggcggccatgacatgggcctgcgcacctgcgacgatggaccccagacccatcacggccagcatcgcaccggcctgcagcgtgttgagcccgcgggcgttgatgaggtacagcggcagcatgaacaccagcgcgaattcgccggcggcgatggccgcagccgccagattaccccacgagaacgtcttgatgcggaacagggtcatgtccagcatgaccggccgaccggctttgccccgcgcggattcgaagacgatgaagacggccatcagaagcgcgccggcgatcaggcagatcggcaccggcgacaaccagtcacgattccagctcaacccgccgagcttcaactgcgttgaggtctgcttccaccagccgtaggtctcgccttcgataagaccgaacaccagcagggccgaggtcagggcagacagcaccacgcccggaatatccacaccgacacgatgggatcgggcatcccgtgcggcatccgcggtgccggcgaccgaggcgttcccaccggtttgcggcaccaggaagatggccgacacaaagaccgcgatacccaacggcaagttcaccaggaaaatccaacgccatcccagagtctcggtgaacacgccaccgagcagcgggccaagcgcggcggccgaactcatcaccgcaccccagacgccgaacgccgcggcacggtatttgccacggaacagggcggacaccgtggacagggtgttcggcatgatcatcgcgcctccgatgccctgcagcacacgggcggcaagcagcatccccgccccctgcgaggcggcggcgagcatcgaactcgccacgaagatcacggtaccgacttgaaacaccagtttgcgccctctggcgtcgcccaacttgccgaaaggcagcaacaacgcggcaagcacgatgttgtagagcgaggtgacccactgggcgtcggtcaggttaatgccgatgtcgtcgatgatggtggggatggagacgttgacgatcgagctgtcgagcacgatcatggccaatcccagggccatcacccacagcgcgccccacggcggcgcctgggtgggcagcggcgacgaggccgtcggattcgttgaagagatcgaagacgcatcggcctgagtctgatgctgagatcgggatgcatgatccataacggggtttcctctcattgccatgattgcggcgaccgacacgcctatgcgccattcacggtacatccgcggcctagaccgtctcaccggatttcgcgggacattccgggcgttcagccatgggcgtaacctcggcggatcactgaagagaggagcaccaaagacggccgcgctattccagatgcgtcatttcgaaatgaaagcccggcagaacgccggaatcgcaacgatcgacaaatcgccagacgatacagggccgggctctcgctcaggaaacagggcatgcccagcgcccatttaccggcgtcggcattgacggcatcgccgccgccttccacgtctcctcccgatgaccgaatcgctaattcccgcccgccagaaccccattgcatcgtgtagacgggatatgggataatccacaaggtgcttttgcttgggaccgaggcgccgcgatgacacggaaaatccagggacgggcggcatcaaacgggtcgttcggaacccccgaaaccggacgcatcgttccacagtgtgtcatcacggaatccaagcccggcaaaacgttgaaattgcaacgataagacaggataagacacttatatggcagaattcgtatttcagatgatcaaggcccgcaagtcttacggcgaccgcgtgattctcgatgacgtgaccctgagcttcctgcccggcgcgaagatcggcgtcgtgggcccgaacggcatgggtaagtccaccctgctgaagatcatggccggcctggagaccgtgagcaacggcgaggccacgctgaccccgggcttcacggtcggcatcctgcagcaggagccgccgctggatgacaccaagaccgtgggcgagaacatcaagatggcgttcggcccgattgccgagaaggtcgcccgattcaacgagatcggtgaagaaatggccaacccggacgccgacttcgacgcgctgatggaagaaatgggcaagctgcagaccgagatcgacgccgccgacggctgggacctcgactcccagcttgagcaggcgatggacgccctgcagtgccccgatccggacaccccggtcaacgtgtgctccggtggcgagcgccgccgtgtggccctgtgcaagctgctgcttgaggcccctgatctgctgctgctcgacgagcccaccaaccacctggacgccgagtccatcctgtggctggaacagttcctgcaccagtacaagggcgccgtcattgccgtcacccacgatcgttacttcatggacaatgtggccgaatggatctgcgaggtcgaccgcggccacctgtacccgtacaagggcaactactccacctacttggagaccaaggccaagcgtctggagatccagggcgccaaggatgccaagctcgccaagcgactgaagaacgagctcgactgggtgcgctcctcccccaaggcccgtcaggccaagaacaaggcccgtctggaacgttacgaccaaatggagaacgaggcacgcaacaacaagaagctcgacttctccgagattcagattccggccggcccgcgcctgggctccaccgtgctggaagccaaccacatccacaaggctttcggcgagcgcgtactcatcgacgacctgtccttcacgctgccgcgcaacggcatcgtcggcgtgatcggcccgaacggcgtgggtaagtccacgttgttcaagaccatcgtgggcctggagccgctgaccagcggcgagctgaagatcggcgacaccgtcaaaatcagctacgtggatcagaaccgtgagggcctggacccgaacaagaacctgtgggaagccgtgtccggcggcctcgacttcatcgaggtggccggcgtggaagtgccgacccgcgcctacgtggccagtttcggcttcaagggcgccgaccagcagaagctgaccggcgtgctgtccggtggtgaacgcaaccgtctgaacctggccctgaccctgaagcagggcggcaacctgctgctgctcgacgagcccaccaacgatctggacgtcgagaccctggaatccctcgaaaacgcattgctcgagttcccgggctgcgctgtggtgatctcccacgaccgttggttcctcgaccgcgtcgccacgcatatcctcgcgtgggaaggcgacgacgacaacccggccaagtggtactggttcgaaggcaacttccaggcctaccaggagaacaaggtggcccgactcggtgaggatgcggcccgcccgcaccgcctgcacaagaagcttgtgcgcggctgagatacgccggcattagtgccacaacgcgctttatacgtcgaaagccgtccctcaggggcggctttcccataattgcccccatgactgccccgccccgcatcccataaaatcccacagtcacctacggcaacgcaccggcaacacaccggcagtgcagcagcaacgtagcggcaacgcaccgcataaccaaccgtttaccttccaaacagtctcgttacatttcgctcccggaactcttaacccccaccggatagactgccaaccataggttggaatacgataaccgaatatcgaacacagtagaacaggaatcgaggaacgccatggctcaggcaaccaccgtaactccattggaccatctggtgaaggtgctgaagttgggcgagccttccgcttaccgcaatcacacatacatcaatggcgagagtatgtacttccccaccggccgcgtctacggtggccaggtcatcgcccagtcggtgatcgccgcgtctaaaaccgtgggcccttcacgcctgccgcattcggtgcatggctatttcattgccgccggcgatattcgtcaagacctgctgtttgacgtcgagaaccttcgcgacggccgctcgttctccgctcgtcgggtcaacgtcacccaagccgaggggtcgattctcacggccatcgcctccttccaggagaccggtcaggagggtgtggaatttgccgatccgatgccggaaaacctgcccgatcccgaaacgttgacttccgccaaggaactcatgcagccgttcgccgaaaagtcgccgttcgccaatttctatgtcgagaaatcgccattcgatatccgccacgtgacgccgaccgtgatgctgcgcgcagacaaggattccgccgagcatgattccggcaagcagatggtgtggatgaaggccgatggccatgtcgatgtgccgcaggtcatgcatcgtgcgatgctggcactcggctgcgatcaggtgatgatggagccggtgctgcgccgcgccggactgtcgatttccacaccgggcatttcctatgcgtccatcgaccattcgatgtggtggtatcaggatatcgatatcaacgaatggcatttatatgtgcaggatacgcctatcgccgcgcacggacgcggactcggcatcgccaaagtgtatgcgcagaatggcgacttggtggcggccatcgctcaggaagctatggttcgcgtgccgcaggaatagtgggaatcggcttggccgatggtgtggtttttcttcttctctccccagtcggctatgcctacggccccctcgtcagagggggcttatcacggattatcttttgtaggcctgggctatgtcgctacggcgcttggcttccttgattttcgggttttcggggccttcgttcggcggtaactggcacaaccattcgccgataatgccgatgatcatgtcggcgatgcacaccacggccacgattgcgcactcggtgacggcgtgtgcatagaaatccgcctcgatatggctcaggctcatcacaatctgaccgccataccagccggcgagcgttgcgcccgccaatcccagtgcctttgccagcaccagcgtatacaccgcgatagtgggattgatgaagctatgcggacgcttcttggggtcggtattcgcgtatttatgcacttgcagggccaagatcagcacgataacgcccagcacggccagcaatccggtcacaatccaaggcgcaccaatcagcgacagtcccgagctttcgccgtaggaggccagaccgatacccgccaacaggcccagcacggcaccgatcacatactgccaccatggtgttcgccgtgttttcatgtccggcctccttatcgttgcgttgctgtttgctgtttgcgaacggccctcgcgcctgggctgttcatcttgatttggttttcgtcactgccgtgcccggctgttcgaagccggagactggtccgtcaccgtctggtttctagcctaccgttcgtaactggttctgccatcagctcaactgttcgacagtatccagttgtccgatagcaatccgacctgtccggcatccggtgccatggccaaaaggaaggccaccgggtcgccgcccagagaagcattcgggtccatatccagccaaggtgccaataccgacgcatggttacgggccgacggccaaggaatgctgcagttgggctcgtcggaagtcacgccttccatgtcgacaaggtcaaggtcgactgccagatcatgaacactttcgatgctgcccaatacggcaatcaggtcggcgggcggcaacttggtttcgatttggatgaccgcgctcatcgcgtccgggccgtcgaaatggctgacatggtagagcggcgagatgccctgtacctgattgccaggaacactgtcgatggaaacgatggtttcgcggaacagccgttcggcatcctgcgaggtggaatccagcgaaataatcgccttgcgtgagacgggtgccgactccgacgcggattcttgcttgactgcatgcccgccgagcatccagtcttcgctctcgagctgcacggcgttacggtccggtgcggcggccagcaaatcggctacaggcccctcatgggctccggcgagtttggcgttcggattcagcgccgcccagggagccagcacaaacgcgcgctgccaagcacgcggatggggcaatgccagatccggatccgcgctggtgatgccatcaaagtcgataatgtccaagtccaacggcctggaatcccaatgattctcacgaattcgcccatggttcgcctcgatgctttgcaacgcggcgagcaattcgtggctgcccattgtggtttcaagctccaccacggcgttcaggaaatccggcgtaccgtcagccatgccccacgcggccgtgcggtaaagcggcgaaataccggtcacctgtgtgccgagcagcgcgtcaatctcccgaacggcggctcgcaaggtggatttcacctcgcccacattgccgcccaaggccaccaccgcgttatggatggcatgctcttcagcagtgcgtccattatcggtggcacgcacgcgcgagatagagaccgatacatctgcaaaagccacgacgatgggcgcatgaggcttgtgcacggtgacgtcgatggaggcgacggccggcgcatcggcaaggatcttatccgcgatacgttgggccagacgctcgatcaggtccacatgagggccttcgatgacagccgcgatatccttggccacacggccgtaatcgatggtgtcgttgagatcgtcggattgaccggcggcggccagatcaaggtgcagggtgacgtccacgacgaaggtttgtggccgttcgtgttcgaaggcgagcacaccgtgggtgccgttggcatgtacgccggtaagagtgatggtgtccattggtaaggctttctgctcaaatgctcccctcagtcgccttcggcgccagctcccctcgtccgaggggagccaagacctagaagcaaccaaaacagggagccaggggaatcatgcgtattcgcgccaggtgttgccggcgatgacggcggcgcggcttttggccacgtcgtgtacgcgcacggcccatgcgccatgttcggcggacagggcggacaaggctgcggtcacgtcatcgcgctgggccatgatcggcccatcagcaccggcagcgcccgcctcggtaagcatcgccgagatgaagcgtttgcgggactggccgatcagcaccggatatccggtggcgcggaaggtctcgagtccggtcagcagcggcaggttgtgctcgatgccaggcttggagaagcccaggcccgggtcgatgataatgcgctcaggctttacgccggcggccagcacaccgtcgacttggcgcatgagttcgtcgtgtacgtcggtcaatacaccgtgctcgtagacggaggtgtcttgatcggggttcgcgcccttggagccggcgagccaaccgcgccaatgctgcacgatgtacaggcagtcgtggtcggcgaccacgtgcggcagttcggcatccagcgtgccaccggagacgtcgttgatgatctgggcgccctcgctcagcgcagcggcggccacggatgcgcgcgtggtgtcgatggacaatatggcaccggccggaatcaatgtcttgacggcaccggtgatgcggaccaattcgtcggcctcggacacgcgcttggcgccggggcgcgtggattcggcgccgatgtcgatgatgtccgcgccggcggccatcatgtcgcgcccgtgctgtgccgccttggccgggtccagccacaggccgccgtccgaggacgaatcctcggtgatgttgagcacacccatcaccatggtgtgcgtagtgtcatgcaacgcctgcaaatcagtcattatgtttccccttctatgtaggtcccaagtgagctccctatgatgagggagcttagtagacactatttatccaaaatgaggctcatggcttcggctcgggtggccggattgcgcagcatgccgcgcaccgcagaggtcaccgtgcgggcggaagacttcttgatgccgcgcatagacatgcacaggtgctcgcattcggtcaccacaatcacaccacgtgcgcccgcatactcgaccagcgcgtcggcgatctgctgggtcagtcgctcctgcacctgcggccggcgagcatacacctcgaccagtcgggcgagcttgctcagccccatcaccccgtccttggcgggaatatagcccacatgggccacgccgtggaacggcagcaggtgatgctcgcacaccgaatacagttcgatgtccttgaccagcaccagttcgtcggtatccacgtcgaagtgcttctccagcacatcggccggggaagcctgcagaccggcgaacagctcgcggcacgcgcgggcgatacggtcaggtgtttccaccagcccctcgcgctcgggatcctcgccaatcgacttcaggaacagacgtacggcctcgcgcacgccttcctcgtcgtatgtgcgtttctcccgctggcaagactctatatattcgttcatctcatctctcccttgtcattgtccacaacgacgtcggcccggcctgcgtacgtgagaaaccacatgaacaggtcgggccgaatcgtcatcgtgtctactcttccggcttcatgccgaccgagcgcttaaggctttcgggaatctccaccggcggcttgtccgagtcggggcgacggtcgttggacagccacaccgggcggaccggagccttcttgatcggcgcgaagatcgccgcaagttccttctcgttcagggtctccttgaccaacagctggcggaccagctcgtcaaggatctcgcggttgtcgttgatgatggtccacgcctcggtgtgcgcggtctccaccagcttgagcacctcgtcatcaatcacttcggcggtgcgatcggagtacttgcgcggctgcagaccgtccatcacagtggtctggtcatcgtcggaaccccacttgatggcaccgagcttgtcggagaagccgtattcgatcaccatcgtacgggcgatgttcgtagccttctcgatatcgttcgaggcaccggtggtcgggtcgtggaagacgatttcctcggcggtgcgaccgcccatcgcgtaggccatctggtcgagcagttggttgcgcgactgcgagtagcggtcggaggtcggcatgacggcggtgtagccgagggcgcggcctcgcggcagaatcgtcaccttggtcaccgggtcggtgttgttcagggcggcggctaccagcgcatggccaccctcgtggtatgcggtgttgcgcagctcttccagagccatgcccttggacttgcgcttcggtccggcctgaacgcggtcgatggcctcgtcgatggcgcggttgtcgatcaactgggcaccggcacgggcgcacagcaacgcggcttcgttgagcacgttggccagatcggcaccggtgaagcccggcgtgcgcacggcgaccatgtgcaggtcgacgtccggtacgaacggcttgcccttggcatgcaccctcagaattgcctcacggccttccagatcaggggcggccacgcccacctgacggtcgaatcgacccggacgcagcagagcggggtcaagcacgtcagggcggttggtggcggcgatgatgatgaggttggtgtcgttgtcgaaaccatccatctcgacgagcagctggttcagcgtctgctcgcgctcgtcgtggccaccgcccatgccggagccacgcttgcggcccacagcatcgatttcatcgatgaagatgatggcgggggcgttcttcttggcctcatcgaacaggtcacgcacacgggaggcaccgagacccacgaacatttcgacgaagtcggagccggccatcgagtagaacggcacgccggcctcgcctgcgatggctcgggccagcaacgtcttaccggtgccgggaggaccgtacagcagcacgccacgcggaatacgagcgcccagcgccttgtacttggacggatccttgaggaagtccttgatctcctcgacttcggccacggcctcgtcttcaccggccacatcggcgaacttggtggtgggggtctggccatcgagtagcttgccgctgttcttcttgccacccatgccgagcatgccgccggcaccacccatgcggctcatcaggaaccagaacagggcgaagaagatgatgaacggcaggatcgaggtgacgaggtagctcagcatgctggtctgctcgatattcgaggtccagcccttttcgagatcaccgttctccacggccttggccacctgtgcgccctgcgcgaaggtgtagtagaactgcacgttcttgccgtagttggtcaccttgccggtgtcggcgtttttcttggtgtagtcgttcttcagcttaaggcggacgacctgcttgttgtccgtgatctcggcgtaggtggccttgccctgattgatcagcgcgaaaccatctttggtgtcaatggtcttcgtgccaccgccggcgaacatctggaacatcagcacgaccatgaccacgagcacggcaccccatagccaaggggactgccatatcgggcggttctcgttgttgttgcctttgccattggtcccgttattgccacggttgaacgggttagtgaacgggttgccgttgttacggttgttgttcgggttcggattattgccgttacccggcccttgcgggaagctcatgcttgcactccttggtagacggacggcttgaggaccgcgatcgaatcgaggttgcggtagcgttcatcaaagtcgaggccgaagccgacgacgaactcgtccggaatctcatagccggcgtacttcacatcaacgtccacttctcggcgggaaggcttgctcagcaaagcgaagacctccacggaagcggcaccacgacgtttcagttctgcgaccagccacgcgagcgtgcgtcctgaatcaacaatatcctccacaatcaaaatgtgccgtccgcgaacatcggcggacaaatcctgcctgactgtgacctcaccgctcgacactgtgcccgagccatagctcgaaaggctcatgaagtcgatctgcacaggaatgctcatggcctgggtgaacgcgaccagcgtattcacggcccctttcagcaccgcaacgagcagcggattcttatcgcggtaatcctcgctcgcgagagcggccatctcgtggatcttggcatcgatctgttctttgctgaccagctcgtggtcaatatcttcctcaacgtcagcgattcgcatgcgctccatcttggcacacgcgaatgacgtgtttcttgcgattggctgaataacctctgggaagtgagacgccgccttggccatgccaatcgacgaccagccggtcgatggcggcaatctgggcggcactggcgttcacaccggcctggctcagcgcgtgagcgatgacccgcaaccgaatcgcctctggctcacgtgcaatacgtttgacgccgatcatcaggccgatgccatggcccgaatcgttggtatcgtctgcagcacaggctcgtggcgtatcggtcgataccgctgccgacgatgccggccggtcaactgccgtaaccgcctcccccatcacctcgtcggatcgctgatccagatactccttgtccattctggccagctgtgcgctttcggcgaaatggcgggtgacattgaatccagcgaatcgttcgatggccggcagcaggtcgtggcgcacccgcgagcgcaacggatagtcgtccggcaactcgccgtctaccgcatcgccattggtggggtcatcccaatattccacacccaagtcttcacagaggccggtggtttcgtctcgagtaagggtcagcagcggccgcgcaaaagtcacgccactgcgtgtgaagacctgcggcatgccggccaacgcatccacgccacggctgcgcagcagtccgatcaatacggtttccgcctgatcgtccatagtgtgggccaacagcacggcaatggcacctgattcacgcgccgcggtgcacagctcgttgtaccgggcctgccgtgcggccgcttcgaggccctcaccgcgtgcctgcacggttgtgttgcgcacgatgaccgggcccagtcccaacgcacggcaacgatccgcggcctcgccggcgacctgttcggaaccctcctgcaagccgtgatccacaatcacgacaccgcaacgcacgcccatggacgtgcatacgatatggctcaccgcggccagtgccatcgaatcgcgcccgcctgaacaggccacgagcacgagcggcgcatcggcggcaacggcatggtccccatgctgcgcgaattcgggagcctgcacatcgcatagttccacggcgctcagcgttgttcggaccgcgcctacggccttgcgcaatcgtgcggaatatgccatgtactcaccacccttttctggttataggcactcgtgcgtttatggacgtttacggcctttgtagcccttgatggcccttgatgcctcttttacagccccgcgagcttggtgatgaacgagtcgatggcgctacgcgcggcggcataatcctcaggattgttgaccaccacggcaaacgacaacgctcccccattggtacgggacacattgccggccatcgacgtgaccgtgccgaggctgccggttttgacgcgcaacagaccggccacggcatcatccgtataccgatcctgcgccgtgcccaccaaccccgcgatggatagaccttccgcaccagcagcaccgctctcggtggtcagattacgttgttggacggccgccagcgtgcgtacggtgagccgggagccgggagacaggccggagcaatcggccatggtcagaccggatgtgtcgagaccgagatcgttcagagtggatttgaccgcttccgtgccgccttcaggactgtttgtcgctgatttcgtcaaggcggtgagtctaccgaactcctcggccagcgtattgtccgaatgccgcaacgtgtatgccatgatttcggacagtgttgccgaactcaccgaggccaaaggcgtttcgccggatggagcggtgtttgccgtcacgtctccggtaacggccacaccgttcgattggagcagttcggcgaatttcgtggccacgtcgctggcggtgtgctggaacagttccgggtatccggccggatcatcagggtcggccggcgcaggcgtatcggcggtgtattggcggcctccatcaatcgccattgatgagaccggcgtgaagtagacggtgtagtcgcttaagaccgcgccgccttccgacagacctgcgggaatgcgtgagtcgccgaatagggtgtcgtcgtactcgagattgacggaagtgatgcctcgctgggcgagcgcggccacggtggccttggccaaggtgttcagaccggcacgtccgttggtatggtttgcgtcggaatcgcctgcagacagcagcatgtcgccattgcctttgagggtcaacgtattggtgccgtcatcggattgggtcaggaacacttgggtatccaaggtggatgccatgttcagggtggatgaggcggcgagcgcggtcagcgttttcagtgtggatgcaggctcgcgtggagtgttcgactcatgttcggcagcgacggcgccttgggcgtcttcaatgatcaccgacgtatcgtttcccacgccttgcgtggacagcaattcgttgaccagtgcagaagcggccgtggaatcaatggccttgttcgcgttcagggcaccggcgatggtgccgcctgatttggcggtggccggattggcgaaaacaggtgcggtgacaggttttaacgtcaacaatccgggggccacgtcggtgatgtcggcggcgcagtaccccgcgaacagggcgatggtggtcagtgcggaaatgatgacggtcagtgttcggcgatgcgatcgttgggtccgccgttgcgcttcacgtcgctgacggcgtgataccgctgtagataccatcgtgctccttatgccaaggcaatcatttctgcaatgaggcgaacgagtcgagtgttgccacaatcgagagcattcgcgcatccatcagcttaccgcccagccatgtcccgagtgccagaatgccgatgccattggccagcgcgaccggaataatcgccagccacatgccgccttcggctcctgtcagcagcatgaccagcgccacgatgccagtgggcagcatgagcagcaggctgccaagcatgtagacgaacgggaagaagccttgggccatggcgcggccttgaggcgcggagaacggcttgtccattgaggcgaccgggtacatcagtacacaggaggtgacttcggccacgcccagtccgctcaaggcgatgcccatgcccgtggcgaggaagatcaggccggtagcgaggtcatcgggctgcgcccagcgtccggtcagtgcgccgaccagcacgatgccggcgagatagagcagcaccatgtagacgaccatgatgccgacgtagacgcgtacgcggccgattctgtcggtccggccacgcacgccggcgatgacttccatggtgaagccgcggccgtcatatgcgagcccgttgctttccacgacggacatgaaccagccgcaccagatcagcgactgccagacgaccgcgctgatgccgtgtgcctggaaggcgaagatgatcaggaacaggaccggcatggcgaaggtcatggcttggcgggggtctcgtttgagataggtgatcaggcgtgcggaaaccgcgccggatgccgaatcgggcatccatgcgaatgcgccgatgcctttggcggtctcggacggactgtttgcgccgatggtgagccgttcatgtctcagacaccaggtgcagacggcgaagcagacaatccatgtgacggcaaggatggcgatgcgggcgagcagcaccgcccaggctccggtaagcgcgtcgaacggtagttggaaggccgcgccgaacggcgtccatgcgacgatggtggtcgccgcgccccaggtttcggtgttgaggctgaaggccacgccggagttgaccagaatgttcggcaactgacagatgataacgaacgtcagcacgatgaagatatagaacgcgcctttgccgcgtttgctggtcaccagcgtggtggatagggcgatgagcagtttggagatgctcatcatggtgatgacggccagcactgcggcgaggagggaactgatgattacggctggtcccatatgccgataggccagtgtccagagcatcagtgaggccacgccggtaagggcggggatgccggacaggccggaaagcagcaagccgaattgcaggttgcggtcggcgatgccgtagagcgcgaatttgcgtgggttcatggtggagccttcgccaagcatcatgagctggatgaagccgatgaagatggtcatggtcgcgccgaccagcacgacgactatgttgacgatgcctccggaaccaaggatgttcaacggaaagccatccgcgttcacggtgaagggcggcagtatgccgatgaaccatgcgagcacgccggtgccgatgatggtgccggccgcgagtacggcggaaaagacataggcgacggtctgccacgccgattttcgcagggtggcgagcgtgagcgtccagcgcaggcggaccagggtgatggcgctgctgatcatcggcgggcctcatcggtgggtgtggcgggcgtggcggttgtaagcggaatgggctggaccggctggaccgaagttggtgcttgggcttgggcttgcccgccgtcgagccatgcgagatgggcggcttcgtggcggccgccgaccagttgcaggaagcggtcttcgagttcttcgccggcggcgacctcgtccaccgtgccggccgcgcacaccagaccgttgttgattacggccacatgcgtgcacatcttttcgaccaatgccatcacgtgcgaagagataatcaccgtgccgccggtcttcgcgtattcgatgaggatgtctttgaggttggcgctggacaccgggtccacggattcaaacggctcgtccaggaccagaatgcgcgggctatgaatcatcgcggaggccaggcagatcttcttggtcatgccggccgaataatcggtgaccatcgtgttggcggccccggccaagtcgaaagcattgagcaggtcctgggcgcgacgcgtggtctcatcgcggctcatgccgcgcagcatgccggagtagacgagcaattgcaaaccggtcagtcggtctaagatctggtcgggctggggcatgacgccgatcatgcgcttggccgtgttcacgtcgctccacacgtcatggcccaaaatcatggcggtgccggcgtccggtaccaatagaccggtcaccatattgagcgtggtggttttgccggcgccgttggggcctacaagtccatagaacgagccgaccggaatatcgagcgcgagtccgttgacggcgatcttccggtcgaagtgcttgaacaggccacgaatggacaccgccgcattcggattcggcggccatgcttgtggctgcggttgcgacggctgtgcaggcacgggggcggcagctggcatcatcggcggctgaaatccgacattcctttgagtattgtctaagctcatacatccactctaccccaccagccaaccctcagcgaagcaaacgcccgggttgctgttggattgccccgctgagcggctccggactagcggactcggtcaacccttatgcgcgatgggcttccactgggctttggagaagagggcctggaaggagatcggcacgtagctgagaatgtaaatcgggaagctgagcacataggcgagcagctccttgttcgtggcaccgatctggtcgcgctcgacaatgatggtcaatgcagccaatgccatcaggcccaacaccgatatgatgatgccactggaccaactggccagcgattgcagctggctcggccaactcacgaagccacacgcggcgaacagcaagcccattaccgcgcgaatcacgcccaacacggtaaacggacacagcatcaaggtgaagtcgatgcaggagaaatcacgttcgcgaaccgcgcgtttcagcaatgccgagccataataacggaatacctgcaggaatcccttgctccaacgcaaacgctgacgccaactttgcgagaaggtaaccggctgctcgtcgtagagaatcgcagtaccgcaatagccgatgcggtcgccatgcagaatcgaatccatagtgaattcaagatcttcagtgagcagatggaacttccatcccttgttccgcttcatcacctcgcgggagaacatgaatcccgtaccgcccacatggcaagaggaaccgagaatcatacgcgagttagacaggaatcgcgattcacggatgaaccacagcgcagaaccagaagacacccagttatccgccagattcaccgaattacggtagctggtcagaatcttgaatccggagcagaacgccttgttcatttcctcgaagtagtgcttgtccagcttgttatcggcatcgaacacgaagtaggcctcataatcatcggccacaccgatgtcgagcatatgccccaacagatacgtcagcgcatatcccttgccaaccagctcaagattgtggcgttccaccacatggcagcccaaagaccgcaccacgtcggcggtgttgtcggtgcagttgtcggccaccagccagatgtcgatgaggttggacgggtaggtctgatcgcgaatcgacccaataaggttgccgatcactttttcttcgttgcgcgcggagatcagcacggcataccggttggtcatcggggcgtcggggaagcgcacgggcttggcgaacagggacatcacgatgcacagtccctgatatatcatgccggcaccgccgacgatcatcagaagaatatcgagtacggaaagcagagtcatcagcgccaccctgccctaggattgctggaggcagattgatcagactgcttggtttgcttgcgttgctcgggctgctcaggctgttcggcggaccgctcaggctgctcgggctgctcagactgctgcgtatccgcggcaccacgctgcggaatcgccgccgtatccggctcatcaaagcttgcatccgcaccgactgtattatcggcgttatcggtatcatcggcatccgactccggctcagtgccgcgtaatcccttgcgagcgctggaggatagcacgttcttcggaatcgccacggtggcggaatcgtccaaatcggattctttcgtctcgtgcgacggaatcgcataaatctgttcctgcagcaaacgcagttcctcattcatcggcacgcggttggtggatcccctggccgcacgcggcatgtgctcgccgattggctgcaatacgtgctcgccgaacgcctcggacgcctcgacgatcttggacttcttctccggagtcggatcgttcatcagcggtgagtcaatcagctcatagcgcttggtgtacgcacggaagatggcctgcagcgatgcggtgaccggcagcgccaggaacgcgccgaatgcgccgaacagcgagccgaacgccagcaccgagaggaaggcgacggccgcgttgatatccatcgtgcgctgcgaaatcctcggcgagagaatcaggttctcgatctgctggtagacgatgatgaacaccagcaccgccacggcgtacgtccacccgcggttgccccaagcgaacagcaccggcagcgcaccgccgatataggtgccgaccgtggggatgaactgggataccacgccgcagaacagggccaacggcagccagtagggcacatgcaggatctccaagaagatggcggtgcaggtggcgttgatcagcgccagaatcgaacgggagaacaggaaggacgaaatctggccttgggccacggtccacaccagcaggaatcgacgctgcgtgttgggggccagccactggcagaaggagcggcgcagctttgggccggcggcggagatgtaatacgtggtcattaccacggtcatgaggttcagcaggaaggagaacaggccacccaccgtactcatggcggtgccggcgaaatcggtgacccacgaggtctggatattgttgaagatttccatgccaagattgctgatttccggcatcttgaacgtggcgtgctggtccacgaactcacgaatctgcccatacattgccggcaaaccgcggaccatggcaatcatctgctgtacaaacatattgccgaacagcgtgagcagcacacccacgaccacggccacgcccaccagactgacggcggaagccacgccacgcttccagccatgagccaccagcgccaccaccagcggttcgacggccagcgccaggaacagcgagatgatgatgtcgaacaccagataggagatgtcgccccacgagcgccagcagaacatgaatacgatgacggcgagggccacatacagcagcgcgcggccgaaccattccggtggcctgcgggaatctcccttggcggggaacaaagtaccaaagtcgatacgattctcgtcgtccgggtctgccccggcttctgcggcaccgcttctcgacgtgtcggtgctgtttatgtttcgcgcgcgttcgctcatggctccccattgtagcgaggggtttgaagctcggatacgccggcggcgtacacccgcttttctattgttgatgtcatgctcaacgtttcgatcatcatcccagcgtggaacgaagccgaacgcatccgcgactgtctgctgaacgccactcgccagaccatcatgccgcatgaggtgctggtggtggacaatcgttctacggacaacacctgcgcgattgtcgaacagttcatcgccgaacatcccgaggccccggtcaaactgttgcaccagaacgatgaacaggggctgattcccacccgcaactttggcctgaacgccgcgaccggcgatgtgctgggccgttttgacgccgactgtatgatccggcctgactgggtggaggtggtctccggcatcttcaccgaagacccggccgcgatgggtgccactggtccggtgatgtattacgacatgccctcacgtcatttcgggttgaaaggcgacaattccttacgcaagcgaatctaccgtgccgatggcggccagccgctgctgttcggctcgaatatggccttgcgcgcttcggcctggcatcaaatcgcgaatgaggtctgccgagataaggccgatgtgatgcacgaggatatcgatatttccctgcatctgatgggcaagaatctgaaaaccgtgtactcgccgcgcatgatcgccgcgatgagcgcgcgacggatggacacgtcgctgagttcattcctgaactacatgcgacgttttaagaatacgtttgatgcgcatccgcaacatacgcgcacgcataagccggaggtgttgttcaccgccatgtatccggcgatgcatatgttctacccggtgtggcagaaagtgctgaattccgcggatatcaatcctgctgaagccgcgtggatcaacgagcagatgaaactggcggaggcgcaaggcaagcagctgtacgacgagacccccaccgacgaagtctacgacgaaaagcacgaaaagtagctggatatacgagccccctctgcttatgcaagctccctctgatgagggagctgtcgaacgaagtgagactgagggagagactgcgacgcagccgctaaaacatcgaatcggccgcaggccgatacctattattcagcggctacgccgcaacttctctcccagtcagctacgctgacagctccctcatcagagggagctaatgtttaccgtcatcgactgatcacatcagcgacttgtaaatcgcgagaatgtcctcttcggtggcctgacgcgggttgccgggggtgcacacgtcgttgaaggcgtcgtgggccagcggttccagatcagcctcggtggcgccgacctcgctgatcgtggtcgggttcttcagatccacggtcagcttgtggacggcctgcacggcctcttcgcgcaccttctccaggtcgccggtgtaggcgtcctcgacgccgaacgcgtcggcgatgtcgcggtacttctcgcccgtgtagtccttgttgtattccatgaccggggccagcagaatgccgttggccacaccgtgggccacgcccagacggccgcccagcgggtgagccatgccgtgcaccaggccgaggcccacgttggagtaggccataccggtgatgtaggaggcgtacgccatctgctcgccagccggaatgtcgccgtcggcggacttggctaggttcttggcaatcatgcgaatagtctgcatggacaggcagtcggacaggctccaggcacccggggtaatgtaaccctcgatggcgtgggtcagggcgtcaagtccggtggcaaccttcaggccgcgcggcatggagtcggtcagatccgggtccacgaaggcgacgatcgggatatcgtgcgggtcgacagccacgaacttacgcttgttggcggtatcggtgaccacgtagttgatggtcgtctcggaagcggtaccggcggtggtcggcacgccgaagatcgggacggacgggttcttggtatccgcgacgccttccagggacagcacgtcggcgaactccgggttggcggtgatgatgccgatgcccttgcaggtgtcttgcggggaaccgccgcccaggccgatcaggaagtccgcaccggactcggcgaacttggcgacgccgtccttgatgcactcgaccggcgggttcggcttgacgttggagaacacctcgtacggcaggccggcctcatccagaaccttggtgaccttctcggcggtgccggtctccagcagtaccggatcagtgacgataaatgccttggtgaagccgtgctgcttggcgacggccgggatttccttgatcgcgccacgtccgaagtatgcagtctggttgaaaatcatgcggtataccatagggactctccttttgagctagtgtcttaactggtggtccactcactctttgagtggtccaacggttccccagtctactccgcgcatgagcattcacctgaaaacacgctgaaagaacaacactgaaaataatggcaagaaatggcggaattccgcacttgtcgaattattgtccattgaccaaaccagttcaatcgcccgagatctcaacgataagaccattttccggagtcgcttggtgctctccgagaaactcgtctctcatccgcttacttcgcgcgtacacaatcaatatgcgagatgcctaattccattcgtgtttcatcagccgaacgcgaactggttcaccagatggtgtattcaacggtttcagtctcttgaagaggactaagatacctcgacaattggggtgatcatcataagagaatgaggcagataatggcaaatggcaaggctatgacggtcggcgagatggcgtccctgtttctcgaccccgacactcccgttcgtatcgacgcttttgacggctcgcatttcggcccggcagacgcggatttgaaggtcaaaatcgccgcgccgaactgcatgtaccagctgctcgcgcacccgaatgaaatcggcatcgtgcgcgcatacattctgggcgatttcgacgtggacgacattgactacgccgacccgtatccggcgatgcgcaagctggtgtcgctggccaaatacgttcgcccgctcgctcccgcatccattgcccgcgtatccgccggcattctgagtcacggcttcaagaagccgccggtgcccgccaccgagggcccaagcaagttcgcccgcatcaagcgtggcctgatgccgcacaccgaaaaggccgattcggaaaacgtcagcttccactacgacatgtccaacgagttctacgccgacttcctcggcccctccatgacgtacacctgcgcggtattcgacaacgagcacatgagtcttgaagacgcacaggccaacaaactgcgcctgattctcgacaaactggacttgcaacccggccagcgcttactggacatcggctgtggctggggttcgatggtcatcaccgccgcccgtcgcggcatcaaggcgctcggcgtcaccctctccaaggaacaggccgcgtacgccaacgaatggatcgcccgtgaggggctgcaggatctggccgaagtgcgcgtacaggactaccgcgaggtgcccgagcatgacttcgacggtatctgctcgatcggcatgatggagcacgtaggcgtcaagaactaccagagctacttcgaagagatgttccgtctcctgaagccgatgggccgactgctgaaccaccagatcaccatcagccatgacaagcctcacggcaagcccggcaccgacgaattcctcgaccgttacatcttcccggacggcgacctcggcgcgcccggcttcatcgaatcgtgcatccatgacgccggcttcaacgtggtgcatcaggagaacctgcgccagcactatgcgctcaccctgcatcactggaaccagaacctctccgagcattgggacgacgcggtcaagcaggtcggctttgaacgcgccaaggtatggggtatgtacatggccgcctgcgctctgaacttcgagctcgacggcatccagattcaccagttcctggctgtcaagccggatcgcgtgggccacccggacggcaagtggtaccctctgcgccaatggtggcaggcctgactccgtttctgtgggacggcacgcggtttttaccattgttcatctgccgtcccacagaagtgtgggatagcagatacatcaatcgtttgacgtatctgctatcccgcatgacataagccgagaaccgcagaatagagccgttctttgccctcagctctgagggcgttcttcgaacgctgtgggacggcacatcgaaaatcggcaaaatcacgtgccgtcccacacgattcccttcgcacgcgcatttcgcaggtgctttttctgcaatactgactctatgagcgccacagccccagaaacggctggggcggacgatcgcaccgaccatgacacgcgcggataagacccacgtttctttatttaaccctaacccgatgttcgcattggtgctgttggcgtgcgtagttgcggcgaggaggacagttgttggcgaacgcgagcctttgcattgactggccagcccgccggagtaggtacgtgacggatatgcaaaagccccgcacaagacggggcttcattgtggtggctccgaacggcgtcgatccgttgacctagcgattttcagtcgctcgctctaccaactgagctacagagccatgaacagtcaaaaacccggataatccgggtttcataaccattccagcgaccccggccggacttgaaccggtgacctccgccgtgacagggcggcgctctaaccaactgagctacggggccattgttctcacttgcgtgaggcaacagatgtatatattactgaaattcgccggtcgtgcaaatttcggcgtgttccgcgtaatttcaaggtttttgctatcaccagcacacggacacgtctgccataaacatccacaaacgacgaagggcgcgaccggaaccccggtcacgcccttatgaacagaagcacttcacggcatccaccgcaaagcaatcgtcaatctcagtcagcctgcttccaggtgtcgacgtcgatatggtgttcggggttggcctgccaggcatcccacgcggacttgacgatgtcttccacgtcgtacttggcgtgccagcccatctcctcgttgatgcgcttcggggagccgatcaggtgcggcgggtcgccggcgcggcgggccatgacagcctcggtgaacggcagaccggtgaccttcttgacttcgtcgacgatctggcgcacggaggtgccttcaccggtgccgacgttgaaggcgtcgtacttgcgctcgtcacggtcgaggtacttgagggcggcgatgtgggcgtcggccaagtcggagacgtggatgtagtcgcgcacgcaggtgccgtccggggtcgggtagtcgtcgccgaagatggcgggggccttgccctgcttgaggcggttgaacagcatcgggatgaggttcagaatagccgggtcttcgagttcgaccgggccgcagccggccacgttgaagtagcgcagcgcgcagaagcggatgccgaacggctgctcgcaggcgcgagccatccactcgccgaacagcttggtctggccgtaggggttgatcggcagcatcgggacgacgtcctcgggcaccacatcgaccggcggcacaccgtaggtggcggcggaagaggagaagacgagcttcttggcgttcttggactgggtcatgccggtgagcacgttgagcatgccgttgatgttctgctggtagtaccacagcggcttctccacggattcgccgacctgcttgcgggcagcgaagtggatcacggagtcgacgccttcggcatcgaggatttcagccagacgctcgccggcacccggagcggcgatatccatgccgtacagacgggagccttcgatgcgggtgggcttgccgtagctcagatcgtcgacgacgacgaccttttcgccggcctgatgaagtgcgtgaacgacatgcgcgccgatgtagccgcagcctccggtgacgagaactgtcatagttgacctttccttatgcgggttgcaagtgtcggccgtgtggagttcagcggctgttcacttttggtccgctttgttaccttttgaaacaatttgagtatatcacacgaacataatcgcacaaaacggtggtgtcgtccggcaatatctgcattcattaggtcgatctggcgttcattaggtaggtcgtcccggagccggcccgcacgaacaccgggtaaatggcttgatatggtggttggtatcgcacaccacctacctaatgaacgccaaatcgacctaatgaatgaacagcggtgcggcgcacaaggaaaatccgaggaatatatgaccgatcccgaatccacagcaatcgattccgtcaccgcgatggccgcggaccacaccgaggcaccggcgcaccccctgcacaaggtgctttccttcgtgcgccgctccggacgtttggacgatcgcctgcagcgcgcctgggacaactatgccgacacatatctgttggacattgcggccggcaacctgctggacgtgcgcgaaggcgtcacgctcgaccgcgcgttcgtggagtcctcatggggcaacgacaatccgctcattgtggaaatcggcaccgggcagggagaaaacgtggcggccgcagccgcggcccatccggagacgaacttcctagccttggaggtctatgaccccggtgtggcccacacgctgctgctcgccggcaagcaggggctgaccaacattcgtgtggcccaggtcaatgcgcccgagctgttcaaggtgaccgcgcccggcaccgtggccgaggtatggaccttcttccccgatccatggcccaagaagaagcaccacaagcgccgcatcgtgcaggaggccatggccggcgacattcatcgcgcgctggtcacagacggcgtctggcgcatcgccaccgacatcgaggactacgccctgcacgtgcacgaggtgatggacggcctcgatggctggaagaacctgggcagcataaccgtcagcctcccgctggagcacgtgggcaagggcaatgccgacatggccgccgacatgccgcacgccgacttcaccgaatccgagcggttcgagggccgcgtgctcaccaacttcgagaagaagggcctggccgccggccgcgtgattcacgacttcacctatcaggccgtcgccctgaactgattgcgacacgccgaaatgccgtcgatttgcataaccgaacaacctcccgtaaagtaactcgagttgttcgcccccatcgtctaacggttaggacaccagactttcaatctgacaacgagagttcgactctctctgggggtaccggtttgctcctgtcgccatcattgtgattcggcaggagctttttgttttcaacgggtcgcacctgccggcgatgtggcgtgccaagagcgtcgaggtcatcgctgccaccaacgatgcacctttgccttcgtttgtgttcgtgtcgtcgctgttgacgatgtcgtacagcgtgtcgtcgagcagttcggccggtggcatgccgagggtgacggccgcggctgcgatggcgttgaggtcccatgcggcgtcgaggttcattctggccgatatggtggccttggtcacgccggccgcctcgcacagggcctgctgttcgagttcttccttggccaggtgcaggcgcacgttccatgcggcgacttcccgcaggcgttccgccagttcgatggcctgtgttcttgccgtagtgttgccggtcatgtccgttcctttcgtttgcgtgcccttgggggtttgtgcgcaccatgctatgggcggcgcgcttggttgcgcaatacgaccgcctccccggttcggtctggtcgaactgggccgggaaaaacatggaaaacgaaagcgctccgcaccgtgttggcgcttggtgcggggctgatcgacaaccttgggcgggattccgggcgattcaagtgacaagagtccccggattcgccctccattgaaagagagttatcgcaatgaccaatcctatcatcgcttccgccccgcgtgcggcgggagccatgaaaaccatcccgtcgctgcgtgtgcggattgctcgcgcacacttgctggcggtgctgctgcatcccgcgcgctcgtcgcgccgtcgccgccggggcgtctgagatggtccgggctgtggcggcggtggccgtcgtcgcaatcgttgtgtgtctgctggtggtgtgggcgttgtgccgtgcggccgcgctgggcgaccgcatcggcgaacggctccatgacgctaggggtcgcggggaggatgcgcgatgagcgggccggcggagcagtgggcgtggcagttgcaggacgagcagctgagcctgtcggagaagttcgtgttggtgcatctggcgcgaagggcgtattacgacgacgggtgcggcgcgtggccgtcggtcaacaccatcgcggcgcattgccattgcacgcgccgttccgtgctgcgcgcgttgaaacgcttgcaggagctgggctacttgcgcgagggcgaccaagagctggccgcgcgcaatccccgcagccacgaacccatccccaggggccatcgctccaaggtatgggacgtggtgatgaagggcgcgcggaccgagccggaggacatcaccgatcccggcgagaccagcgcgggcaagggtgttccggcgaagcctagtgcggccggaccatcgcggagcaaggagtgcgcgcggggtgacattgtgtcacctgacgcagtgtcacctgacacaatgtcactccagggcgattccgacggtggggtgacatcctgtccgaagagaggtgacgtcatgtcacccaatagacaagtgataaccaatgctccccttgtcccctacggggacattcccctcgccggggaacaacccgaagaggaacgaagcgagcatgatgccccggattggcgtctggcgctgccacctcggggagtgcgcgacccattgtggacgccaggggcggaggatgcggacgagcgggtgcgttcccgggccttgcaggaggttcgcgtgctgacgctgatccatgaccgcgtggcggccatcgacccgaaggcagccaggccggcgtcgatgcgagaccgacgcaaggtccacgagctgctgatggaacgctctctgacggaggtcgagacgatccttgattgggcgtatggcaatccgcgctggatctcatggctggtggacggcacgatggtcgaacgctacttcgcgcaggtcagcctcgacatgcgcaccaagcgggcacgaggtccgcagcattccggcagccatgccgctgctgccgagctcacgtcggtccatgatccagaccggccggtggcggttagttcgggcttggcctggcgggtgccggtctacggcggcggcatcctgtcgatcgcattatgccaggcgcacctcgacggcgaaaccaagcaggcagagtgtccggtgtgcgcctacgaccggcgcaaccaagccacccacgccatcggcctggagaaaaccggccgtgccgaagacaaggaatcccacggggaggccaggccatgaccgatatggcggatgccgcgccccgttcgccggaggcgtggaagagcatgggatgctgcgcggatttcccgcagccgtgggccgacctgatgtggggcctggagttcgaggacacgcatcccctggcccgcgtgttccggcaggcgggcgcgtcggtatgcgagcacgactgcccggtgagggccgaatgcctggcctacgccggtgccgccggcttggaatggggcttgtacggcggccgttcgtgcaccgaccggcgccagatcgcccgcctggcggaagccgccggcgtgccctgccgcgaccgcacggtgccctgggcccggcgctggggcctgttcgtcgattggctccaagcccatcccgaggtcttcgacacggcccggggcaaggccagcatggaacgcgggcaacgccgatggcgcgccgcaggccgcgcccaacccaagaatgagccgcatgaccgtcaagtcatcatgcaagcaggaaaccaagcaatccgacaatcaagcaatcaaacaaccgaccatgccggcgatccggcgaatggtcccgaatccaaggaggaagcatcatgcgagtagcgttggcgaacgcaaagggcggggtggccaaaaccaccagctgcatctatctggccgccgtgctggcccggcgcggcatcgaggtggcagtc

SEQ ID NO: 3758 - DNA, 3818 bp, Unknown
  R35_2m  MAG No. k141_291
ctcaggcaggttgagcggacccatcgggccggtttcgccgcccttggagcccttgccgttgtatgcgagcatttcggacggccagatctgggagtggaaggtgatgttgtccttgcccatgaagtagtaggccgggcactttgggtcgttccaccattcgcgccacttctccgggtcgccctggcggcgggcccattcgatggaggccgacaggtagccgatcacggcgtcgaaccacacgtacagcttcttgttcgggttgtcgatccagcccttcaccggcaccgggataccccagtcgatgtcacgggtgatggcgcgcggcttgacttccttgaacaggccgagcgagaagttgatgacgttggtgcgccagcccttgcgggtctccagccatgccttgttggcttcggcgagcgccggcaggtcgaggaagtagtgctcggtctgctcgaagcgcggggtttcgccgttaatcttggagacggggttgatgagctcgtccgggtcgagctcgttgccgcaggcgtcgcactggtcgccacgcgcaccttcggcgtggcaaatcgggcactcgccctcgatgtagcggtcgggcagggtacggccggtggacgggctaatcgccacctgctgggtgcccttgtagatgtagccgttctccaagcactgcttgaacatctcctgcaccacgtgctcgtggttaccggtggtggtgcgggtgaacaggtcgtagctcaggccgaggtcgcacagatccttggcgatcacgcggttgtaacggttggccagttcctgggcggtgaggccttccttctccgcctcgacgagaatcggggtgccgtgctcgtcggtgccggacaccatgagcacgtcattgcccttcatgcgctcgtagcgcgcgtagacgtcggagggcacaccaaatcctgcaacgtgaccgatatgacgggggccgtttgcatacggccaagcaacattcaccaaaacatgactcataaggcttgattatccggcgcggcggggacacgcccggatagctgccgcgccgccatcctcatcccactcacctatccgcccgtaacttcccccacatacttatccgtacaccgcttgcgcgcttatccgcatacgcattcgcacacgtatccgtacatgcatccgtacacacgtccacgcacccatccgtacgcacgtccacgcacatccgcacacacttccgcctgtcgatatccaccgagttatccacatcattcgcgcacctagtgaagttatgcacttatccaccgttttcgcttatccggtggcgcgcaagccgtacttctgcatattgttcggtcatggatatcacagcaggtccgatgacggacatcacaacagtcacctcgccggcaaccgcgcagcccgcggtgccgccgatactgtttaccaaggatctgccgggaccgctcagccttaaccgtctggccgccttcggcgcgttacgtaagctcgacgattccgccggctactggattgagcattcgggcacactgtatggtcgcgcaaaaatcgtcgcggaggtcgccccgtttggcactgtggtgtgttcgatgaccgccgcttgggtatggctgggaggccccgactttccgagcaccatagacgtgatctccacatcgcacttccgctcggcatccgtcagccgccgcatccgcgtattcaaaagattgacgttgccggagcaaatcatcaagctcggcgggctgcctgtcaccacgccagcccgtacggcttgcgacctggtgatgagtcctgaagacatccccgatccttccaccgtcaacgcactggtgtgtcagctgatgtccgcgtaccagtttcggccaaacgactgtctgcaaatcgtcaaggagcatcggcatcacaagtatgccggacgcgcacgcatgttttttgaatcggtgcagaaggagattgacgaaccggctttggagcaatgcgcatgacgaggggattcatcgccaaaggacatcgcagaggccgccatgccgctcaccgtttacggcatttgcggcaggcgcaacggttgcctcgccacgcggcggcggcacactcatccgaatccgcatcgcgcgcaatctcggatatgaccgcgccgcctgaaccacccatcagacttacgcccgcggtggcatgttcgcccgatacggatgttgccgtgctctggcacatcgcatatcacgtgcccgaactgcgtaaatggctggttgccaatcccaaagccgacgcgcctttgctggaattggtctcgcagcgtggtgggcctggggtccggcaggcgttggaaatattgttcgagtcgatggaagcgtaacggggagataatcgccggctgctgcgctatcccttgattttcagcacagccgcatacacctgcttgcgattggccaacgatccgtcagccagtggatgctcctgcaccacttgcgcgatggcgtccttgatacgcaggccttcctccaaagcacggtcgatggagagcacggccatgtcatccacgctcaacgtactgggcgcggccgcttcggcctcctcgttggacgcgccgccgatgaccagcaccatctcgccacggggcggatcatcaatcacactttggcgaatctcgccaatcgggccgcgacgaatctgctcataatccttggtgagttcgcggcacagggccatcgggcgattcgggccgaacgcgtccagcagatcgtccatcgaatcggcaatgcgatgaggcgtctcgtagaacacgatggtgcggcgttcgggcaacagcgtgcgcagatactgcacgcgctcggaatgctttcgcggcaggaagccttcgtagcagaagcggtcggtgggcaggccggagagggcgagcgcgtcgagcacagcggagggaccgggcgcgcaggtgacgggcaggccgcgttcgatggcacggcgcacgatggccaagccggggtcgttgatggtgggcatgccggcatcggacacgacgagcacggtggcgccggtttcgacctggtcgagcaggccgtcggccttgtcgcgctcgttgtggtcgtgataggcgatgacgcgaccgttcacatagacgccgaggcgacgggcgagatcgtagaggcggcgcgtgtcttcggcggccacgatatcggcccgctccaagagggccaccagacgggcggaggcgtcgccgacgttgccgatcggggttgcggcgagcaccacggtgccggcggggatggtcacggccgattcgcgggattgggtggcggcggattcgccggcatgaacttcatcattgcgttcaggcacttgcgtcacgctaccgtcagcgtcatactgctcattcaactcatctgcgcttgtcatactcccagtattgcccataccacagagcaatccacgacaatccatggcggaatcgaggcattttccctttgcaggggctgatttcacatgttccggaagtctacttccgtttcaaggggctcctcatccggtgaagcaccagtacaaacggctttgacgcaacgctattccgccattttggcggcatatctacttgaccatcagcccctcgaaacgcaagtagacctccggtaaaccccaaatcagccccttgaaacgcgagatggcacaataccaacgaagacaaatgaaaagaccctctgcggtggaatgaatgcagagggtctcgtggagctgacggtagtcgaaaccgcgacctcttcgatgcgaacgaagcgctctaccaactgagctacagccccttggatgttactttgctccgcaaa

SEQ ID NO: 3759 - DNA, 4711 bp, Unknown
  R35_2m  MAG No. k141_310
gggcaccacggcgcgcgcgatctgctcggtgcgctgcatggcgatgcgcttgggcaccatctcggagatcacgatggagcagtaggagatgatgagggtcaggatgatgttcaccaggccgccggcgatgccggggtgcacgccccagctttcgaccaccggaatcaggtagggggcgatggaggaggcaccgaacgaggcggacaggaagccggagagcgtcacgccgatttgcacggtggagaggaaggtgttcgggtcacgtgcgattttggcgactttggcgccgcgagcgtcctcctgctccatttgctcgatctgcgagccgcgcagagagaccaatgccaactcggtgccggagaacacggaaccgataacgagaaatacaaaaatcaggaggatattcaaaccaagtgacatggcttcaactctaggggagcggcacgtcaaattggggtgtgctggctgggcagtaagaaactcggcaaggggaagggcattctcatcactatcgatgagacgcaagcggcctcgcatgatgatttggtggctattgctacagccgtgcagcacgtcattacggatgccgatgaaagtgatacgcctgatgaggataagaagggcgttgccatcgtgttcgctggcttgccatatatgatcaacgatttgctggataacgaggtaaccacattcctgcgccgtgcgctacgccgcgaattggataacgtgccgcttccagacgtcaagaatgcgttcctgaaaacagttgcggattccggcaagaccatcagtggggaagatgcgcttgaagccgctcgccagtctgaaggatacccgtacatggtgcagcttgttggctactacatgtggcaatccgcacaacgtcgaggttcaaatgtcattaccgcggacgacgtgtcgaccggtgtttccgatgcgctgctcgccttcgacgattcaaggacaaactcatccgcccggcaggtcatgggcagctggaatttgcggtgccgcatttggggcagtatttgcagtcgttgtagcatcaaatatagggctgggttcattcatttggtaggttgcgcgttcatttggtgggttgtcggcatggtgaggcgttggaatggcggcatttcaatggtcagtgttggagtgcagtgaccaaatgaacgcataattgacctaatgaatgaagtaagccggttgcgggctagtttcgatccagttctatgagcgccgacgcatcttggccacggcattgctgacgcaaatacgcagcacaatggtgaagacgactaccataatccccagaatgccaatgttgaaccagaactgatccgtggtgtgctcccacagatcatcctttttgaacatcggcaccttggtggggccatacagcagatcgttgagcccgatatccgaggcggcggcggagaagccccaacgtccggggaagatcatgctgaccagctcgaggctgtcgcggccggtgaccggaatcatgccgccggagaacaccaactgggccatgaccagcaccaccagcaatggcatcgtctgttctcccgacttcaccaacgccgagccgacttcgcccaacaatgcggaagtccacgcagtcagccaaatcgccaacaccagttcgggtatgccggaatcagtgaccacaccatggtccgggccgggcttgccgaggctgaccgcagtggtcagaatcgccgcctgcaacaaggtctgcaaacccatcacgatgagtttcgaggcggtgtatgacgtgggcgacaaacccaccgcgcgctcgcggccgtaaatcgctcgctcggagacgatgtctcgcacggacaaagccgatcccataaaacaggcacccagtatgacgagcacaagcagctggttcggctcggtggcggcgtctttgaaatcgggctcacccaagccatgagaaccgggcacaaccagcgacagcagtcctaggagcaatggcagcaacagcaggaagatcagcaatccggggtcggcgatgatcaaatgcagctgacgaatcaccagagtgatggtctgtttgatgcggaatggctttgccggtttctcatgctcggtgtgccgcgtgatggtggactcggcctgcatggtgcgctggcgtgaatcagtaatcgaatacacccgttccggagattcggcgacatcgttgaagatgtcggcccattccttgccgttgaacgcctggctcatctcctgcacggtgccgaagaatgccggatggccgccgggagcgagcatgagcacgttatcgcacaacttgttgatatacgacagtgaatgggtgaccacgataaccacgcggccggcatccgccagttggcgcaacatggtcatcaccgtaagatccagcgccgggtcgaggcccgaggtcggttcgtcgagaatcagcagttcgggttcggtgagtagctcgatagcggtggacacgcgcttgcgttggccgccggacagtctgtcaatgcgattcttacggcgagacgtgagttccagctcattgagcacgttgtcgatgatttcggcgcgctcggccttggttgagccgggcaggcgcagcttggcggcgtattcgagcgccgcgtccacagagagcttgcggtgcaccacgtcgtcctgcggcacgaatccgatacggctgcgcaacagttcgatgttctgatgcacgtcgtatccatcaaacagcacgcgcccgtccgtggggctgttgagcccggcgacgatggaggtgaatgttgatttgccggcgccggaaggtccgattacggcggtgagcgtgcccttggcgaatacggcgttgatgccgtcaagcagccgggtgcctttgcccacggtcagtccgatgttttcggcgataaccgcgtcgttgctgacaaacggcgtgcggtcgcacagcacgccttcatgcacgatcaggtcggtgttgccgacggtgacgacgtcgtcttcccgcagccagatcttcgcgacgcggcggccgttgacgtaagtgccgttggcggagttcaggtcagtgagcaggatgccgctgctggtggtttccagcgagcagtgtttgcgggagaccagataatcgttgatgcgaatcaggcaggcggtatcgcggccgatgacgcctgtggtgtcgtgctcggggctgaaggacccgtgcacgcggttggtggtgagttgggattcgagccttaccgcttgcgtgctgcctgccagaacggtgccggcggcattcgatggggaaggggatgcgcagggagacggagatggtgatgcgggtgataccggcactggcgatactgccgtcggtgccactgctgttgggcggggttgctgttgcaggtgcgcgagggccggggatacgcggtgcggggccagcggggctggcgttggttgcggttgtaccggttgtgccggttgcggtgctggtggtgtgggttgcactactgggcgtgcctgttgcggcgcgagttgcgtgggttgtgccggttgcgctgatggtgccggcggtagcgcaggctgggccacgtttgccgcagggcgtcgcgggggctgtgccggcgtggacggcccgctggttccgacgatgcagacgatggtggcaccttgtgccagcgtcactttggtgctgttcagcagcagtacggaagtggtgtgaatgccgttgatggacagtccgtttgcactacccgtgtcttccaagagccaaccatcgtcggtaaaggtgacgcgagcatgatggtgagatacgtacgggttgtgaatcaccagatcgcaatccggcgcacgcccgatggtcgtggcacgtgcaggattgggggtataggtggcggatccgtagtgaatagtaagggcaggtggcattggttcagacttccgtgttcttcgatctctctgcacacagatgtaccacgaccgcattacccccggtgaacggggtctgactgatggtcagaaactcagcacctcgaccttgccggtgtcgagctggtaacgggcgccgacgatcatcagctggtcggcagccaatgcctgctgaatgatgggggattgttccaccagcgtctcgatggtgtgggccacgtgtacgcgctcgatgtcttcatgcgcgtcgagctcggcttcgcgcgcctgccagacggacatgccggcctggcgcagaataatcgattcggcggcggcgatgtgctcgtcgaggtcgtccatcgcatccgcggcctccagtgagccgtcggcttcggaagtgatggtgtgcatcaggtcgtccagctcctgctcggcggcctcgattgcgccgcagtgctcgtgaccgagcacacagatcaggctgacttgcagtttcttgaccgcgtactccagcgaggcgataaccgcgctatcgatgagttgcccggcggtgcgcacggtgaacaggtcgcccaggccctgatcaaaaatgatttccggaggcacgcgcgagtccgagcaggagagcaccgcggcatccgggttctggccatcaagcagcgtctggcgggtctcctgatcctgccatggatggtcgggcttgccttcggcgaatcggcgattgccttggagcatacggctccacgtcgcatttgcggtcgattcctgttcaacgtctgcctgagccatgaaaacctccattatcagcggactgctggtacccatagtagcgattgga

SEQ ID NO: 3760 - DNA, 6383 bp, Unknown
  R35_2m  MAG No. k141_430
ctacttcatgggcaaggacaacatcaccttccactcccagatctggccgtccgaaatgctcgcatacaacggcaagggctccaagggcggcgaaaccggcccgatgggtccgctcaacctgcctgagcaggtggtggccagtgagttcatgactatggaaggcaagaagttcagttcctcccgcggcatcgtgatctacgtcaaggacatcctcgcccgctaccccgtggacgccgtgcgctactacatttccgtggccggccccgaatcctctgattccgacttcacctgggccgagttcgtgcgccacaacaacgaggagctcgcctcctcgtggggcaacctggtgaaccgcgtggccaacctcatcaacaagaacttcggcgagattccgccgctggacgaggattcgatgaccaacgaagaccgtggccttctggaagaggcttccgccgcgttcgacgtggtcggctcctccatcgaaacccaccaccagaagcacgccctgtccgaggcgatgcgtgtggtcggcgacatcaacaagtatatttccgccaccgaaccatggaagattaaggacgaccaggctcgtctcggcaccgtgctgcacgtggccgcccaggccgtgtctgacgcgaaccacctgctcgcgccgttcctgccgcactccgcacagaaggtgtgggaggcgctcggcggcaccggcaccttctcgccgctgcctgagctcaaggaagtcgaggatctcgacaagcccggcttcacgtatccgatcatcaccggcgattacgagctcggtgtgaacgtgcacccgtggaagagcgaggcaatcgaggtcggcgccgtggtgcccaagcccgcaccgatcttcgccaagattccgaccgaggccgtggaagaggagctggctcgcttcgatgaagcgctggctgctcgccgtgccgccgaagccgagcgtctggccgccgagaaggccaagctcgccgccgagtgattcggcattgctagctcgtagctgacgggccacctcgcacatgaagtgttgcgaggtggcccgttgccgtatgtgcggtcaagccccgacaatgcgaggccggttgtcggcgggcgtcacaaattcgtcacactccgccaagacttttcccagacaagcacatcaattcgccaagcatggggcggttatatagaagatgtcaacggaatgaagttcataccggtggcgaggttcttcgaaccccataactgaacccttcttctctcttctctctcacccggcggccccctccgccgggtttcttttttttttaatgctgggaatgccatgggccgcatattgaaaaaaggattatggcagagtgctgtctgtttacaataaggcattgctgttctagaaaataacaaagaaggggggactgatgatgtataccgtcacattttcgggcaacctgactcaagcggaatcggccttggtcaagcgaggcgccatacagatcgccgcgttgctggccgcaaaaatcactggccgcggactcatcatcaacgacggtgacaccgaatactcatgggatttcatcctggtcgatgccagcagcgatgagcggcacacctttgacgagaggctattgcggatgctgtccgactacatccacgccggtttccccgatgccgtgatccgccacgccaagcacgaggctccaaagctcggcaaataatattggtcgcgtggtgagtcccatacttccgtcggaatatcgctatcgcgatatggtcgcatgcctgttgcgcattgaagcgttcgacctatgcgcagttgatgttccggtgatgacggcaaccgattgacgcgattaccgggacagatttcgctgtcccggttcgtgatttcggcttctttttgggaaccgggacagccccccttgtaaacgcccattatccgtaatcccaaaaccccggaattccgccgatgtacgatggcgaatattgcacggtggggtgataggtgaatgaaattttgtcttggttgctcaaaaaggggcgaaatggagaaccgggacagcgaaatctggcccggtccacacataaatcgattgacatcgctaccgggacatcggacacggacaccgagtcgcgcagcgtcggcgcaacatggatactgtacgactttcgcgataaacgttatattcttcgtcgcctccgccgggcgatctcatcgagtggcgttgccgtcaaagtgaaatcgaatacggcacctcgcaatgccaactgccgcccgacccggtaggcgagttcggcttgggatggctcatcggccatgttcgcggcagtggcgatgatgacgatccaatgatgatgtcgcagcagttcgcgcttgtcgttgtcccgccgccactggtttttgtcggtgcgatgatgatcgccgtcatattcgatggcgacgcgaaattcgggccaagcgagatcgagcgttatcggcgcgccgttgctgaatgtcgcgccgggcaccgtgtaatttgtcacggctggcggaagcccgtatttcgtcgtcgcgatgcgggtctttgattccatcggagagtccacgcggggcgtaatgaatgcaagagcgatcatgcacttggattttgcgttgaatttcgggagtccagtgacttgccgcacgaagtcctgataaatgccgtcagcagtgcggccgttcgccagacccggcttgcgggcgattgccgtaaggattgcgtcgccaagtatgaccagcgattcgagcgatatatgagcggcgagttgtgcccaagtgtgtatcagatccagtgcgtacacatgtttgttgatacgcacattgtgcgcatcgctcagcggcttccagatgtgtggtgtcgttggcggcacgatggcacgtattcgtgtgcggtgtgagtcggagacggtatggagctcggcggggtcgatatcgcaatccttgggaagcggcacggattgcagtatcagcgatgtggacatgccgaagagcaccggttgcccgagctgttgcgcggcgtctgtgcatcgtttaagcatttcccgcttacgttgggtgagggtttcgctcattgctggcgacacagggcctgtaatcacagttggcgcggaactcgccatacgtggtgatgaacgtagctcaggattgatggtgcgcgcagacgcaacgcccggtgtgtggggccggggccagccggacggttcgtcgtcgaatacgccgggcggtggagtgggcaatatgtcgttcatgacgccaccgtagcgcagcggtcacatgctcgctatgaaaaccggggtatgtggctctagcttgcgggagatgtggataactctgtggataactagttcggaacaattagcgaggccggaacctaccggcaattggccgatgatgacggcacttttgctcagctcagccgcgatagtctcgaataggtgcggccgggcgtactcgcataacgtaatgccccttctctctgaacagagagaaggggcattcgaatatatgctcccgccggcggaacgtcagcggcagcggcgggtgaggggctgccaggggtcgagctcgaccggttcggcggcgagcagggcgcgggtggcgtcgtcgaggtattccttgcggatgatgagctcggtaacgtagcggtcgaaccaggcgtcggacatgacgtagtagccgtccttgccggcgtccttgccccagctgttctccaccttccagcggttcggcttgccgtcctcgccgaggttcacgccggtgaaagtcatggcgtggttgctcgggctgtcgccgtattcgaggccgtgggccttgtcgccagtgaattcagtgccgaacagctggtcgacgcgcaccacggactggtcgaagaagccatccttgcgcagcgcgaactgcgtgcagtcgcaggcgaaccagatcgggtgaccggcggtgagctggtcaagcgcggccttcttgaacacgtccagcggcacgttgacgaactccatatcgcccgcctcggccacgttcgcgctgaagcggatgcggtagcgccggttgaacgggcggttcttgagtggggcgttggccagcgtcgcgaaatcgttgacgtccaccggcacgtacttcttgtagaactcaagcggggtgatgccgatctcgcgaatctgcgggcgctcgtccttaccggttttcggcttgtcggacttgttcttatcgcacttgcaggccttggcgtcggatttgccctcgcatttgcaggagtcgccgcacttgcaggattcggtcttgccgtctgcgtcgacctcggccttgcacttgcaagcctcgcccttcttatcctcatcatcatccttggtgcgcgcgaagaagtcgaacttctccggcggctcgccaagcgacacggcgcagatgcggtacacggtgcccatgtactcgtccttcagcgcgcgcagctcgtcctcgccagcgcccgcagccgaacggcggcgcagctcggctgcgaactcgcgcagcttggagttgaggtactgcttgaaatcatcggaattacgggagttctcggactccgggtaggcgctcttgggcaccagaccgtacttgttcaccagcgcggcgaacatctgccaccagccgccgtcatcggacgggccccagttgatggcctcgaacaggcgcgagtcggtgggctcgtcgagcgtgcgcagcacattctccaggtaggtgttcgacttctccatcgcatcccagaagaagaggtaggtctcggagaactcgaagtcctcaaggttccagcgatgcataagctcgtagcgcagcgtgttcagggaggcgaacatccagcagcggccggaacgctcctgattggtgatcgaaccctgcttgagttcgatggagaagtcgcgcggcagcgcacgcacgccgcgatagtcggtggccgccttgagtacgccggccgaaaccgccgcgtccgccgcgatcaggttggcgcggtccttgttgaagtcttcggtgtacgtacgtagaagttcgggtttgatggcccgtgcgctggcgtctgtcgtcatgatgcccctgtctgatgctgatgatgctgatggataatccgttgccggcggcggggactgtcaccatccgggccggcggactgctgacacgaaagtataaggcatgtccagcaaaggctcaggaaatacaaaattaacaaacggatgtttgcccaatatacagtaagtgttttcgcggttttccgtacaggaaaaagtcggaaaagtcaatacccatattccatatattgaactcaatttgtggttttgagcgggggggggtatcacttccctagttatttgggaggtggttgggtgttcaagtacatcatcaagcgcattgtgaactacgtgatcatgctgttcgtggcagtatcgatgacgtatttcctggccagcgcattcatggatccgcgttcgaactacatgtcgcgcaatccgcatccgccgatcgcgtcgattaaccggtcgctcgatctggccaacatcaacgaccagacgccggtcgtcatccgctatttccgctggctcaagggcatcctcacccagtggaactggggcctgagcccggaccagtcgccggtggcgccggccatcgcctcccgtatctccgcttcgctgcagctggtgacgctcgccaccgtgctctccatcctcttcggcgtgagcatcggcgtgtacacggccattcgccagtacaagtggcaggaccgcgtgctcaacaccaccgcaacgttcttcctggtggtcccggccgccgtcatgggcctgatggtggtgctgctggccatcaacttcaacaacatcgtgggcagccgcgcgttctacgtgaccggcctgcactcctaccaaggctccaacccggtgctttgggtgtttgactatctgcagcacctgatcctgcccaccatcgtgatgacgattccgggcatggtgggctaccacctcacccagcgtacgtatctgctcgacaccatgaacgccgactacgtacgcaccgcccgcgccaagggcctgacgctcaacgcggccattcgacgccacgcactgcgcacctcgctgattccgaccgccgtggatgtggccttctccatcgccggcgtgttcaccggcgcggtgatcaccgaaaacgtgttcgccatcaacggcctgggcatgtacttcacccagaccatcgccaacaacgacatcaacggtgccgtggccgtggccgcgttcggtggcgtgtgcacgctgtccggcgcgctgctggcggatatcttctccgcctggcttgacccgcgtatccgactgagctgagccccgcgcaaaggacgatctaacatgatgaacgacaacga

SEQ ID NO: 3761 - DNA, 19265 bp, Unknown
  R35_2m  MAG No. k141_465
gaaactgtcgcgcctgccgataatctgtccgcgcagcatacgacgatcatcaagcacatcgtggtacaggtcacgcaggaacgcaagtcgctctctcaacaagctgttttcgtcacgcatgaatcgcaggttttcgcgattgcgcagctgcacgtatccacatactgcgccggcaacgaaatacactacgaacgcaagccagttcgacgtgtcgtaaaacagcggagcgaacgacgcacccttcgacgcatacgacaacgccatgccggcacatgcgagcgcggccgcgaacacgcctgcgttcagtccgtacatcgtgccaacgatcaccacgaaaaacaggcgcaaatccacggttcccaactggctgttgccttgtaccgcggtgcgaagcagttcttccaatatgaacgtgatgaagatttcgattgcgatccatggttttgaatggttgcgtagaaaatcccagatcgggtgctttccggattgttcctgcgcacgcgcctctttccagcgttgaagtacagggggaagatcctgtttgagcgaatatcgcggcgaccagccatagcgcaatcgcagcacatgatcgtctgctgggtaacattgggacctgtcttcgccaaaagtcaccgataatccgggaaatgccgcgctaatcacatcagccaaatcaccgtatgtgaagtcaaacgcgttgggcacgtggaatacttcgctttcggcggtccaatcgtcgaacatgcggtagatcagttcggcaagatcgtcggcgcagagaaagcatgtctgctggttcttttgctcgcagaacgacaatgtgcccgattccgcctgttcaaatagatgattgaaatatgcggtgacgccgttgcgatccgacgcatacaggtacgggcttcgaatgattttcgcttccagacggtaggtacgcgcataatacaggcagagttcttccgacgctcgagacatcagacttttgctggtatcacgtacgtcggcgttttccggataggtaaattcggattcggggccgctgaccatcagtatttgcgtttgcctgttgcgaatggcatgcagaagtcttcgcaatgctcccagatcgccgtctctatcgctgcgtggggtcagattttcggaaaagaatacgatgcgatcaaattcgtatgtggtgatggtgtcgacaagggtgttggcgtcagacatgttgacgattctgagacggtcattgccgtctacggtgccttctcgttccgctatcaccacatggtctcggggaaaagcatgctgaatccactgtttggtaatgaaatcggtattaccgaccaaaagcacttcatgctgccaccccattaccatgtttggtaggccgcctcgatggtcggggccgggtcgccggtcctggtatgactttcctgccctgtcgttgatgatccgggggtgttgtcgccgggaacgcacccccccccgtgaatacttcccttaaacgggggtatggcatagttctgtccataaaccctccattgtccctgccttacggtattccagtgtaatccgttaacagacaaaatccccctcaacgggggtttcttacgccgtgcgattgcctcgcttcagcccttacttcgcgagcttggcgtactcgtcgaccatgaacttggcgatcttcttgccgccttcgcccagcagggtggacagcgagttgatcggcatggagttgaggaatatgcgcatcatggcgttgtcgggcagcttcgtcagctcgccggcggcggccacggcggccacgatcttggcaccgaacggatagtccacagacttgccgtaggtgtcgtagtagcggtagccgacgaacacgccctcgccgtaatcgacgtggccttcctcgcccggccagttcagcatgctcgggtcatcgttgatgtccagcggaatcgactgggcgagcttgccggacaggctgacctggctgaagatcacatcggcgagcgccgggccaccggactggccgagcagccaggattcgaggatacccttggcgttcttggcccacggggccacggagaccacggagccgttggacagcacgaccacgacgttctggttcgtggcggcgacctgttcgagcagggcgatctgcttggcgggcatgtcgagggtgtcgcggtcgaagccctcggattccgcggcttccggcaggcccaggaacaaaaggcccacgttggtgcatatgttctccacgctgagcgccgaggcgctcgacccggcccaccccgcgcacgattatttcgccgaccgcgagcgccgcacggccaccatggcgctcaacatcaactgggccgtgccggaagatgtgaatatcgagcacctgctgcagtccggcttcgccatgatggacggcattcagctgcgttggctgcgctcccccggccaaaatctcaataccatgtgggccgactgtgaggatgcgctgatgcctctgcccctttgggagggatatcgctgattggtgcggttgcacgccatccaaccggcgtgccagacgtgggtgaggtcccatgggtcgagacgtgatgtgtcggattgcgggtcgatggcaggcaagaaatcacgattaccacgtaattggtagctccaataaatctgcccggcggatgcgctccacgctttgcgctgcatggcggcgacctcgcgatagacggcattcctcgctgaaggggttcggttcaccagattgttggccacgcaccactcccctacgatcaccggcgtatagcgcgcggcccggcggatgcggcgttcgttccagcgcacgaacaagcgataccagtccatcagccaccgatccggaatcagacggaacagcgagaattgctcggccatgaccagatagatatgcgtatcgagcatgacgccctgcatgccctcccgcacaaaccagtcccgccaacggcccagtcggaagccgtcatggaacacgatgatttgattccctgccagaatcgggcgcaaccggtggtatgtctcgcggtagaaacgcttgaggaacgccatcggaataggcccgcttcctcgcgcttcggaccggtctttcgcctgcctgctcgatggtgacatggcatacgtcagccggtcaatcggctcattcagcacttcgataccgaacagcgccgcgtggtcgcgataccggcgagccagacggaccagcacatccagcgcatagacgaccgctcgcgggctacgatgccagcgcgcccgatgccatacctgtcacgctaatcgttcaatgcttcaccgtagcgagcgaccaacccctgatttgcacgctcaaactcggggatgtaatcagcgatgatggcgtccacaagacgccgagctcgttcttcatcatagatatgagcagaatcattgcgatcgcgcagcatgcgcagccacaacgattcgtccatgaaatcatagtattgaaaagcggttttgagcacatctcgcggagagccggaagcggaaacagggtctccctcataagccagcagcgccttgaacagtttccaaccaagctcgaactgcaacccgaacttgtcaataatgccgctctggatgaaatcattgccgagatcctgttcgggagccttgcgcagcgaattcaatgcggaaacgtaattctcatactttttcatacagcacctttccgctacgctcaatctccgccctcagcgatgaagaaatcggctcatccagattgatgacatcaactttaagcagtgaccacagattgtcctgaaggttctgctccaagcgattgaaatcgggacaaccggccacggcaagatcgatatcgcttttaggccggttcacgccctttgcgcgagaaccgaacagcacgaccttgcgagcgccggcatcagcggcaaacgcgcgaatctggtcgtacacgtgctcgataggaaccatgacacctcccgccgcatccaacagtcccggaccaatcccggaccacccgcgcttccatcatacggccgcggcccactcaccgcacggagcccgaaccacccgaacgcggcgacgtagttgcgggaggcgggctggcgctgtagggcgtgcgggaagttcctgacgtctacttttcaggaggtgaatcctcatgttcaccacgttttctctggccatcattctcgactgcaccgtacgcattgtgctcggcacggcattgggcgcgctgatagggctcgaacgccagttgcgcgcccgaagtgctcggcgtgcgctgggatgtggagcacatcaccacgtccgactgaaacgtccgactgacgctgaccagcaacatcgcaacagtacaacaagccaacaagtgggatggggcatcgagcctcatcccactttgttattatccggcgattgtcagactcactcacgccacggtgaacgtggtgcgcttcaggtcctcacggcgcgaggagtggccgatgagcagttcgaattcgccgggctcgacgatgcggttggcgtccgggtccacgatcgtgcagttcgccaccgggatctcgaaggtgacggtcttggtctcgccgggttccagtgcgacgcgctggaacgccttcaattcgcggtcggtccagctgtaggaggtcacgatgtcgccgatgtaggcctgcacgatctccacgccggcgcgctcgccggtgttggtgagggtgatttcggcacgtacggtgtcggtttcggcgaatgtgccgtcggcgttgcttgcgccgcccgtaatggtcggttcgccgtatgcgaacgtcgtgtagctcaggccttcgccgaacgcgaacgccggatcctgggtgaggtcagcgtaccggtcgccgtgctggccgcgaatctggttgtagtagactggcagctggcccgcgtggcgcgggaaggtgatcggcagtcggcccgacgggctggtcaggcccaggattatttcggcgatggcctgaccgccacgcatgcccgggttcggcgcccacaggatggagccggtgccggtttcagggtcgctgacgcgcttggcgaacacgccgtactcccccacgatggaggcgggcaacacctgcggcttggagctgatgagcacggtgaccatcggcttgccggtttcgcgcgagacggcagcgagcgcgtcgagcagggcgttctggccgccgagcagttcgagcgtggcagtggagcaggtttcgccgaccagctggaccacgtcgccgaccacggccacgatcagatcggactggcgagcgttggccacggcttcgtcgatcatcgcttgatcgacggcggcggaaacgccgattttcgggcgaggctggccgtccgggtagaattcgccggcagggtcaggcacgaggtcgatgacgttcgcgccgcgcgagtagaccacttcgcaatcgtcggcggtgagctgggtcaggccgtcgagcacggtggtaatcatgtctcgaggctggccatccggcatccaggaaacctgaccggagttgccggtccagtcgccgagctggttctgggcgtcgtcggcgagcggacctaccacggcgatgcgcttggccttgtttgcggcaaacggcaaagcaccgtcgttgcgcagcagtgcgatggattcgcgggcgagctccaggttgatttgctggtgttcggccgaaccgatgaccgccttgatacgttcggcgtccggcagacgcgggtcttcgaacaagccgaggcggaatttcagagctaggatgcgagctactgcgtcatcgatcagggattcgtcgagcagaccggtttttacggcttcgatggctccctcatagaactgtggggtggtcatgaccaggtcgttgccggccttgaccgcgtcggctgcggcgtgcacgtaatcgggcttgacatgctgctcccataccgagcggccgacgttgtcccaatcggtgatcagcgtgccgttgtattgccatgcgccgcgcagcttgtcggtcagcagccatttgttgaacgtgaccggcacgccttcgatggactcgtagccgagcatgaacgtgccgcaaccttctttggccacgcgctcgaacggcggcaggaaccaggattcgagcttgcggtgggagaggtcggcttcggaggcgtcacggccgccttgggtttcggaatagccggcgaaatgtttggcgcaggccaggatcgcgttcttcggcagggcctcgccggccttggcgccgccttgatagcccttgaccatggcggaggcgagttcgccgatcagcatcgggtcttcgccgaaagtctcatccacacgcccccaacgggtgtcgcgggcgatgcacagcaccggggagaacgtccagtgcacgccggtgcaggagacctcttcggcggtggcgcggccagcggcttcgactttggcggcgtcccagctgacggccatgccgagctgggaggggaagatcgtggcgccgggccagaaggaatagccgtggatgcagtcgtcgccgatgaccagcgggatgttcaggcgggtctgctcgttgaccatcttcaccgcgcgcggcaggtcggccgggctggtgtgcaggatggagccgacgtgcttgttgacgatgaggtcttcgaggtcgccgctgcgtgcgtcgagctgcatcatctggccgaccttctcttcgagggtcatgcggccgaccaggtcggcgatgcgctcctcggcgggcagggcggggttcttgtacggcatggtttcggcgtttgcggaggttgcggtgttgtcggtcatgcggtgtcgctttcttcggtgaaatcgaacggttctttagttaccgattggtagtttagcatgcctaatgacgaaacacgctgcgaatacacggttttctgacaatctaatttctgttagatatcctgcaagcaccagaacgcccacctatcgcaagaaagctcagcggtacccgtcccagagcggcgaggggaagatcatgggctccagatcagcccattcgtcgttgagatcgatggccggcacccgcaaccagcgcaactgcaccccgtccatgatctccagggcgcggcgcaacgtggggcggatctcctcgaacgagtcgaattcgggaggcaggttccagtcgtgtatcgaatagtagtgccatatcgaatcccgacggcccgcgaattcgtcatgcagcgggtggtcggggttgaacgattcgacctgcaggatggagaacagctgcaccagcatggggcgtttggaattgtgccacactaggaaccgcaggtaggcgggaagccgcaggtcgccgggtgtggagccgggcagaccggtagtcatgaagtcctcgatgtcgccggacatgttgtagttctcgtggtacaccgcggcgagcagattgtccttgctggggaagtaccgcagcacgccctgcttggtgacacccaccgcatcggccacgtcctgtatggaggtgccgttgtacccgcgttcggagatgaggcgtacggcggcatcgaggatttcctgccgacgctcttccggcaacttgcggattcgcttgggccgggttgtggcttgtgtggacatacccgccagtctatccgcagcccgccctcccgcacgccggcccacacactccagcacggccgaacatacgaaagcggtgcgcagacagggcgttgtgccctgcctgcgcaccgatacgggcgtgggcgctagtcgatcacgaaggtgttgaaggagcgcggggcgagggtggctttgatgccgcgggaggcgtcagccgggtcggcgaactcgaacggcattgcggtttcgagcgcgttctggaccacgacggcaatcgtgccgtccgggttgcggaacgcgatggccatggagttgaagtggccggtggtgccgagcactttagcgccggggcgcacgtactgggagaagtggcgcatcacgtagtattcggggttgcggcgcacctcatgcgtgtcggcggtaatggtgaacagcgagttctgccaccagccccacgtggaatcccggtcgtcgagaatcatgttccagtaggtgtaggcggtcgcgccgttcttgaggtagtggttgatgaggtggaacacgtattccgcgtattcccacgtgttctggccgtcgccgcattcggattcggactggatgagttcgatttccggccaggattcgtgcgtgcgggcgatgcagttctggcccgcccactggtaggcgatgcccttgatgtacttgcgggcaccgtcgtcgaagaggatgttgtccacgaaacggctgtagttgttgagcctcatgccgtagccgccaccggtccacgccatatcttccggaccgttgagcgtgccgagccagatgtcggtgtcgagcccggcggcttcgaattcggggcccagatagtcgcggatgaacactttcagggcttcggcgtcccacagggcgctcgggaacttctggtcggcgaacacctcgttctgcacgtgcagctgggtgacctcgatgccgtgcttggcgtactcccgcacgtaacgggccagatacttggcgtaggccttgaggttttccggggtctgcacgagccggccgtagttgtaggccttcgggcgcttcatccaagtgggcggggaccacgggctggagaacagcttcatgtccggctgccattcctgggcgcggtggatgtacgggatgagcgtctcctcgtcgcgttccacggagaagtgctccatgtcgtagtcaccgtcgacctcgtcatagctgtaccagtggtcggcgaagtcgttggcacccacgggagcacggttgaacgcgaagttcatctcttcggggtcgaaaagctccttgatgatctggtcgcgttccgcctcggtgacggtctgcaacggcagccagccgagttcgttgaagcagccgccgaagccgcgcagcgcctggtattcgttgccgtcgagttgcaaatcaggtgcggtggttgcgccagtggcagttacctcgcccgaacgatcgacgagcctattgtcttgagtggtggcaatccatgtggtcatggtgaaccccttatcatgttttccataggctggtcatccgttctgccatcacagcagacaaccagcctatacacagcacattcgtcaggcgaggcgaatgcgattcgaaccgggcttcagagactcaaccggcccaggcacgggatgcgcacctcgtgcgataccggtcacatcgcgattgataacaatcggcgtaccgtcatggttctcataatgttgccagacaatacgcggaacaccgagtttcgccgtatcgatatatgaggtatcaacctcgaatactccagaaggaatctctccttccagccacacagaaccatccgcgtcttcagtcacgacaatatgggcatcaccattgtcagagaatcgatgttcttcgcgatcaaaagattgcgcaccgttaaggtatacgttaccgtccacatacaccggttgcggcacctgttcgaacagctcaagatcgccaatgccctgcgcatgtacgcgcttcatgtattcgttttcactagtaggtgcaccatcataagtctcagtaccgcgagaggtgacacccggcagataggcatcgccacccacaaaaatgttctggtagatgcgatcgtcaccgctgtatacgcaggcataaccagcgacctcagtggagtgaggcagatgatagggcgtaaaccgattgagcgtggcacgacgttgcgtcgagccacagaataggttatggaccaaagcggtgccttgggccacattgtcgaagttgtaatcagacccgaacacattgttgtccacgaggcacgggccggaggtcacttcaatcatcaaatcacgaatattggaatggaatacattcgaagacacgcgtgtgccttgagcctcccaatccaaccaaatgcccaatgagcagtcatggaaatgattgttgcgaatctgcgtgtcaatggcagcgtgcagtttgacaccggcgatttcatgaccgaagaattcatggcgctcaccgatgttgtagatggtattgttctcgataatcgaattaacgcatcccaaatgaccgaccacaccattttgcccgcaatcgtgcaaagtgttgttgcgtactatatgcgacccaatcgttcccatgtcccatccgttgtgccgcgccctgaacacagtttccaattgggtctgataccctggcttgcgcccccatcgagttgcttcgttatctccagtggagtcttcctttcccaagctaatggcactgcatcgagcatcgtggatatcgttgttttcgatgatccagccttttgcccagtgcgggccaatcagaccaatctgatcaccagtcggaggggcccaaggacaagcggcctgcgccatttcgaaaccacggaccgtaatataattcagcccagttcgatcagggaagaaacatgtgcgacgtacattaatctccaccaattccgcattcggatcatagtcatggaagttaacccagaattcggtagtgcaatcccctacttcagcatgccactgataaatggtctcctccgggcgtgccaccggttcagtgatattgacccaatcggggccgaatccggtatcgcgccgctccgccgccttcacagcttccacgctgggagcttcataaagggctttgccgttgagatacacattgcccaaactgagtttccaatcggacggacgttccaaccaatcaccttcgagaggcaaggcataaggattgcagccatgaaaaacgtcattggctacgctggcatgccatatggtgccgtcgaccagatcccaattacccagtatctccgaccctttgatgatggcatgctcaccttcagcaaccgtgtaagtgatacgtgaatattcatcgtatccaccacgcttgggattcacgttctcgcgatatacacccccatgcacgatgacgacatctcccggctgggcaatatcggctgctgcttggatggtattcaccggcgtgtcgcgagcgccatctcctccttgcaaggcattgcaatcgacgtggatttccttgatttttgcggcgtccgtcatattggttcctttcagcactcaccattgatattcggcatagtatgtcaccaagcgacttgcacttagcaactactaagtatatagtataaccatcttccgaaaaagggagacacacaattccaatgacggaagatgcaccttaagcaaaaaggaaatggactcaaggaggagatccttatgaagtcaatgacaaaagccattgcagcactggccgccacttcgatgttggtatcgcttcccgcatgcggcaataagcctggccagaccggcaacactcaggccacgggcgccaatgtcaccacttgggcaatgaccgattccccatgggatccgatcaaaaatgcattcaaggaatggaacaaagctaaccccgatgctcagatcagtgaggaaagcttcgccaatgatgcttacaaggagaagattcgtaccgccgtcggctcaggcaatgcaccgaccttcttccccagctggggtggctctcctctcaccgactatgtcagttccaaggccgttaccgacctaactagcgatcttaaggacactattgatagcaaggtgttcgattccgtttccgccgaaggctaccgagacggcaaactgtatgcagtgcccactggtcaggcgcagccggtgcttttcttctacaacaagcaagtgctcaaggatgctggagtcgacgaagctccccagacttgggacgacctactcgatgcagtggccaagctaaaggctgccggcaaaacgccgattgccctagccggtggtagcaagtggccgtatctgatgtgggccgcatatcttgtggaccgcatcggtgggcctgaagtcttccaaggtgtactcgacggcaataaagatgcttggagcgatccagccgtaacccaggcgatgtccatgattcaagatctcatcgatgccggtgccttcggcaacaactaccagtcgttgactgctgacgaccgcaaagataccgcgatgattgcgaccggcgaagcaggtatggaattgatgggctcttgggtgtacgccgacctcatctccatcaatgacagcttcaccgcagacgaccttggtttcgcaccgttcccctccgtcgatggaggcaagggcgatatgggcgatctgaccggaaatctgtcaagctactggcagctttcttccaaagcgacagataagcagaaggataccttcgtcaacttcatcaaggaaaagaattactctgacaccatggtggatgccatgttggaacagggacaagttcctccggtcaagggcattgaagacaagattgccgcagctgacgatggttccggctattacacctggatctacgattccgtcaagaatgcaccgaactaccagctttcttgggatgttgctcttccgagcgaccaaggacaggccgtgctgaacaacctcgagcaggtgttcctcaagaccatgaccccggaacaattcgtcgatgccatgaactctacgctcaagtgattcacgcaatgaagcaatagataggacgataaggaggatgtcatgagttccaaggtttcgaaaccagctaacaataagccaaccgtattgcataaaggaccgtcagtctggtatgcggctcccgcactggttctgttcggaatatttgcaattattccgctgatcggtgtggtggtactgtccttcatgaactgggatggtctcggcgcagttaccttcaacggtatcggcaactggaccagaatgcttaccgaccccttggtcctcaacggtcttcgactgacgattatcctgacgattgtcagctgggccgtacaaacccccatctgcatcctccttggcgtttttatggcggggaaacagaagtatcgtgcattcttgtccgtcttctacttcattcccctgctcttcagctccaccgcagtggccattgcctttaagaacttgttggacccacaattcggcatcggcaaggcattcggcgttgactggctggcccataactggttgggcgacccaaataccgcgctgtgggtacttatcatggtggtctcctggtgctttattccgttgcactctctgctgtatcaaggcgcagtccgccagattccgcaaaacctgtatgaggccgcgatgatcgacggcgcaggccctatgcgccagttcttttccattacgctgccgcaaatcaagtacacattcgctactgattccacgttgatgatcgttggttctctgacctacttcgatctggtctacgtcatgacgcagggaggaccaggcaacgccactcgtattctgccgctcgacatgtatttgaagggcttcaaaagctacgacatgggcggagccagtgtggtcggtgtcatcatcctcgcgatgggcattatcatctcgttgctactgaacaagctctcaggatcagacaaaatggaaagtcagatggaaggcgtgtgattcgaccatgattcgtatcaagaacaagcaatataacattctcggcggcttccttggctgggtatggctcgccaccgtcatcgtaccggtgtattacattctgattacttcggtcaggcaacagaatgatattttcactgagaatccgctctcgctcccctcaaaccccacttttgatgcttataagcgcgtgtttgagaacgatttcctgttgtatgtgggaaattcggtattcgttaccgtcatgaccgtgcttattatcctgatcgtctcgttcatggtctcctacatgattgttcgtcgcaatgacgcatggtcgcgcggcatatacaaagtcatcatcaccggcttggccatcccgatgcaggccacgattattcccgtgtactacatcattattcagattgggctctatgacaccttatgggcactgattctaccttcggcggcattcgctattccaatcagcgtactgatcatgaccaatttcctacgcgatgtgccactgtccctgtttgaagccatggctgtcgatggtgccagcgagttcaccactatggttcgactcgccatcccgatggtgaagcctgccattatcaccgtggcaatctatgacgcactgaacgtgtggaacggattccttttcccgctcatccttacccaaagcgcatccaaccgcgtcatcccgctgagcctatggcttttccagggccagttcaccgttgacgtgccgggcatccttgctgcagtcgtcatcagcgtactacccattctgacggcatatatcttcggtcgccgtcaaatggtcgcaggcctgaccgccggctttggcaagtaatcacgccccctcaaaacctgatccacaaacctcttccgaaatcaggccatgagcgtccgagcggagtcccgcccagacgctcatgtaatctcagaggatgttttcgctcgaatgcgcgttcctgccatatcgttaagttcctactaggacgtaacatatcgaagaataacggcttatccacgccaccctaatatcgcctctatgtgctgtccaaagaaaggaacgtcatgcgtcgtcgtaccggaacagacgcccccaaaaaaatgagcgcagagaatcgtcgaaaaagcatcctcgaaaccacgatgacgtttatctcccaattcggcttctggggattcactattcgcgacgtggcccaagcccaaggcattaccgaagctggcttgctgtactacttcaagaataaagaagatcttatggtcgaagcgttaaagtacgccgatcacgtcaatcagattgccattgccaaatatttgggggtagaaggcgtttctggtgatatcaatgacggcattacttatcactgcgattatggtctcagaaccatttccacggctacagcagaaaccaacgccaatcgtcgtcagttagtgagtctttatgtgctattacagggtgaagcattaagtgaagaccaccctgcacacgagtactttcagcttcgcgagaagaacgtcttgaaagaatatgccgtcgccgctgcacgagaccatgtgtccaatccggaacgcactgcgattcaggtgctgggagccatggacgggttgcaactgcgctggctcagcagcggctgcgcactcgacttcgcagaggaatggcggcagcttatcgagctaataattcccgacccgacacattgaagtgtgagtacgtcaaataaaaacaatgcaacgaggtggtgacgttttcttggactccctgaccgggaggagaaccccctcatggcgacgtacggcagggagcagcgcgacagggccgtggacctgtacatcaaatacgaacgctgcgccgccgacgtgatccgcgagctcggccatcccggcaagggcgcgttgctgtcgtggtacgcggaccagtgtgttttgatgctcctatacattgtcaagcgtttgggtgtgttgttttgggttggttgtcgagtgtatccattggatggcccgttgctcgagttcgggaaggtcgcgtgcgccgcattcgatctcgctgtggattggctataatgtattagacggtccgatgagggacgattgacatgaggttggaggccgacgatggccggcccgaagcatccccgccactacgatgaggcgttcaaacggtagatcgtgcagtcgtaacgggagcggcaagccatcccgggagatcagggccgagtacgacatcgcgcgatcgaccctgcagcgctgggtccagggcatccgcagcagcggctccacccgggccgcggacaaccgcacgcccgagcagaacgagccggccgggccggggaggcgtggccggcggttggagatgggggtgggcgtttcagaacaaacggcgccggtattcgcacgaaggcaggcgtgatacgggccaacgccgcccgctgcccgatatcggcgcgatgcgggatgcggggcgttccccgctccacctactactggatgaccgggcatcccgagacggagcgtgcggatccgatcgccggcgacgtgcgcgcggtccggcgcgacggcctcgaacgctacggcgccaggaagatcaaggccgctctggaaaggaggggcgtcaccgcgtccaggagacgcatcggcaacatcatgcgcgaacagggcatgacgagcgcgtacgcgcgcagacggtccgaaccgcacaagacgcgggccgacgaggccaggctcgcgaacctgttggaccgcgagttcgacggctacgccccgcacacgcacctggcgagcgaccttacctacgtgagggtcggcaacgggtgggcgtacgtgtgcctgctggccggcctggcgaacaggggcatcgccggccattccgtcgggcggacccgggacgcgagcctggtattgggcgcgttcgccacgctcgacttcccgctgacggacgtccaggtgttccacacggaccgtggaagcgagttcgacaacacaaggatcgacgagctgctcgacgtgttcggcatcaaaagatcgctgtcacgcaagggtaacccctatgacaacgccgtggtcgagtcgacgaacaggctgttgaagaaggagctcgtgtaccggaacagctacgccacgatcgagcagccggggcgcgaccccgacgactacgtgtggcggtccgacaaccagcggctccactccacccccggataccggagcccgaaggaattcaccgaacaagggctcgtcctctaaggaactgtccaacacaccgttgccaatccaatcatgaggctcatgaccaggcacggcctagtgcccctgttcaagagcgcgaagcggtacagctcgtacaagggcgagctgaccaaggcgccgaagaacctggcgaaccgcgacttccacgccgagcggccgaacatgccgtgggccatggacctcacggagttctccatccccgcgggaaaggcctacctgccgcccgtgatcgactgccatgacggcatgccggtcgccgcaccagcccggactcggcattggccaacggcatgctcgccgacgcctgctccacgctcaaggatggagagaaaccaatcatccattccgaccgcggccgccactaccggtggcccgagcggatccgcatccgcacggacaacaacctgacgcgttcgacgggcgcgaaaggctgttctccggacaacgcggccgcggaggggttcttcggccgtcccaggcaggagttcttccgcaagcgcagcttcgcgggcgtctcgatggacgggttcatcgacatgctcgacgactacatggtccggtaccgggacaggcggatcaagacggagcccggacacgggcatcatggatcgtcgacgcgagctcggtcttgtggcatgatcggtggtgatggaatcaatgacgagtccaacaaaacgtcaccagcccccaatggcagattagttgtacatccacaagcaatctgccattgcgcaacatagtaaccgacttctttcctcgatcgccccaactactcctggaacacgtcggggtgcttcagatcgccggggatgtcggacagaaggccctccagccccaggaattccttccagaaatcgagcggctggccgtatggcgaagcctcgcgaccgtgggcctgaatgttggccttggcctcgaacacctcttcctcgctgatgccctcgaagtagctttccaagcggtcgcgatgctcgggcacgtagaacagagaggacacaatctccgtcagacgttcggcacgctcgatcggcaaggaatcccagtggcgaagctcgatgaagttcttcaggcgtacgtcattgaagtgcgtggagatgatgtggttgatctcgtacgggttgagttcgcggtccgggtacacctcccccgcgttctcgcggaaggccgggcgatgcagttccttgggacttgctccagaagccacagcttcaggggtatgggtcaggtcagcgaacatgagcggcgtggacagcacgtcgatggcgtaatcctcccacccatagcgcgggtcgaacaggcccggcagcacattcgtgcgctggaagtcgagataatcccacatgcgctggcgcagcaacggccatgggttcgtctcaccttcgaaatacggggtgttgcggaagaagtacgccagaatcggaccgatgacggtgcccaaccgcagtttttcgatggaatcgcgctcgtccacgtagtcgatgctgacctgggtggaggcggagcaacgcatcatgcatgggccgaactgacccacgcggccgaggtagtcggtcattgcatcgtagcgatccttggggttgaccggcacatccgcaaagctggatttgggctggtaaccgtagttgaccagtcggaagtcgagatcgtcaagaatcggggcgagctcgcgacggaacttggaatacaacgtattcaggtcggacggcttcttcagaatgccgattgaagtctccacctggccgccgggttcgagcgagacggcgacgccggggcgcgcgagccccaccagatggccgttctcccagtattccttctcctcgtcatagtagggtacgagacgtttgagcagcgtttcgatgccgttcggctcgtagtaggtcacggcggtgtcgtcgctgttgtgcacgggcaggtgctcgatctccacgccgaagccgccggcgccccgctgggagcgtccattctcaaagaacttgagcaggctttcgacgtgcttggggttcggcttggcgagcaggtgcgcgtaactgattcggggagtaaccatgctttgtatcgtattcgagccggccggtgcgcgtgcccgaaagcccgtaatacgctatacgaaaaaccgatagcaggctccggcccggtttctcgctctagagactcccctcagtcgctgcgcgacagctcccctcacagaggccgagccgtaaagcggacagcccagtggactgtccgtaggcgagggtgagccgataggcgaaccagcatgtcgcgagcgaagctcgtccttaattgcggacgagccagagcataaatcagtccgcggaggtgaagccctgcggctcgccggcctcggcgaacttggcgttgtgggccttcttggcagcggcaatcatcagcttgatacggttgagctgattggcctcggaggcacccggatcgtaatcgatggagacgatgttggcttccggatgcagacgacgaatcttgcc

SEQ ID NO: 3762 - DNA, 3542 bp, Unknown
  R35_2m  MAG No. k141_537
atccttgtcggaggcacgatgatgctcaagaacgtcagcgagttgaagaacccaaagctcaacatcctgtccgtgatcctttcgaccatcgcgttcggtggcctgctctatggcttctcgtccgcttccacgatgggatggagcagtccggtcgtcattatctcaatcgtcgttggtcttgtggccttcgtcgcattcgtatacaagcaagtcaagctcgatgagccattgttgcgcgttgatacccttgccacccgcaacttccgcaactccgtgattctggtcactctgatcaacgccgcagtcgccgcaaccaacgtgacgttgcctatcttcatccagaatgtgctcggccaatccgccaccgtcaccggcatggtcatgctgcccgccgcggcagtcggcatcatcctgagtccggtcgccggcgccgcattcgacaaattcggccctcgcggcgtgggcatcggcggccttgcgctcatgaccatctctcttggtcttctcggcaccatcaacaccaggacatcagtgctgtttgtcgccgtgttctgcgcattgcaggcatccggtcaggctatcgccaacatgccgatcaacacttggggcgtcaacgctttgccgaacgacatgatcgcccatggaaacgccatcgccaacacaggccgccagatcgcggcagccattgcgacctcgcttctggtcaccgcagaaacatccatgaccgcctcgcacatgtcccagggtgtgaagtccgccacggccagcggcatcgcgttctcctacctgctgtgcgccgccatctcgctggtcgctctgatcatctgcatcttcaccgtcaccagccgtgccaaggagaaggccgcacgcaacgccaaggcctccgaggcgcaagcctccgccgaagtcgcggccgaaaccactgaaggccagcccgccgagcatcactacgccggcgcatacgtggcccccgccgcctccctgttcaagcaggcccaggaacagtccatcggcggaatcatggacgatcagccctacagctgcctggacagcgatgacatcacgcatgtggtgcgcgagttcatccgcctcaacgtctccagccttcccgtggtgaacggcgatggcaggctcgtcggcttcgtcagcgacggcgatgtcatgaaatcgattgccacctatgaatcccgtacggtttccaccggcaccggttcgacgatggtggtgttcgacgacgaaaccgtggcctccaaggtgcaggcgctctccggcaagaaggtgatggatatcgccacgcgcaaggtcgttgccgccacgcccgaccagcatgtcggagaggtggcccgaatcctcgccaagaagcagttcaagaaactgccggtggtggatggtgatggcagactcgtcggtgtgatccgccgtaagtccgtgatggaacatgccttcgatgcgctgttcccaaaggatgatcggtgattaggcgccatcatcgctgaatagaatgaatggaatatgaggcttcccttctcgcgggggaagcctcattgctttgtccgcggagtcttacggcacctgcgcaagggcaacgtcacgccttcatgattatactatcgaatagtggttcctatcgttgcatggtgacgctaacgcatggcgtcacgatactgaagcctgccatctaacggcgggtatggctcgttgctggagtcgtgcacgcatacgcgcgtcggcgtgcgtatgccgtgatgtgccctttgtagtggaattgaagaattgagaacactcgtatgtcttctagtagtacaacaactgaaccaactgtgcgcgaaacacccgaggtttccggcgatgacaatgcgaatgcgcgcgcagcggtccatagcgcgaacaaacccggtgccgcctatgccgcagcagtggccaacggggaatccgagcgtgcgtggatccgccgtgtagtgcttctactcaccggccaggcgttctcgctgctgggctccaatattgtgcaatatgccatctggtggtggatcgtattgcagactaaaaccggttcggccatgctgctggccacgttgtttggcgtggtgccgcaggccatcgtctcgatttgcggcggctcctgggccgaccgtcacagtcgcaagttgctgattatgctgccggatatggtgattgctgtggtcaccgtcgtgctgtcgctgagcttcgcgatgggatgggcgagtctgaccatgattttcgtggtgctgttcattcgttcggcgggaggcggggtgcagacgcccgctgtgcagtcgttcataccggatgttgttccctcgggcaaactattgcgcgtcaactcaatatacggcgtgattaattcggtgaatatgattgtggcacctgcggtggctgctgtgcttatcaacacagtgccgctgtggtcgattctgttagtcgatgtgaccacggccattatcggcgtcggctttgtggcgttgatcaaagcgccgaagaagagcgcggaacatgttgcgaggcgtatggctgaagcggagaatagcgggcaacccacactcgaaccgatgtcggatgccaatgctgatcgttcgctgattgccagcgtccgtcgtgtgtttgctgacttgaaagatggtttcagctacacatggcgccgggcgaacctgcgcaacgtggtgctcggtgacgccttggtgtgcttcgtggccgtggcgccgatgaaccttacgctgttgctcatgacccgcgaatatgagggcatcgatttgaatctcggattcatcaacctgaccaccgcctccgataaactcgccgccaacgagctgggatggagcatcggtatgctgctcggcggcgcgctgatgtctaccatcggtgccaagctcatccgcaacaacatgcgcgtggtcgccttcggcatcgctctggtgggcgtctccgtcgttggtcttggcgtggttcacaatctgctggcgtatttgctgattgatgtggtgaacggtttggcttcggccatctgcatgggcccgatgcgcaccatcatccagaccgaggccgatgagaagatggtgggccgtgtattcggccttgacaccaccctgagcacgctcggaatgccgctcggcatgttgatcttcgcgccactggccgacgtgatcccgatttcgctggtgttcatcatcggcggtgttctgaccctgcccatcggcatctatctgttcggccaggcgcgccgtaacgtcagtgcgcaggtgacgcgaatagcggcctgacaggcacctgacggccacctgccagacgtaaagtcaactaccagatttgcgcatacagatcgtaagacacatacttcggcagatcatagacggtaatcgagaatggcgtggatcggccattgcccggccaatccacgaatgcgatatctccatagatgattgcgttctgtgcgttacgcagtactagggaaatcttgatttgctgtccatcagatggcttgaatccatctgccacggcgcggacctcgccattgaacgtcgtgc

SEQ ID NO: 3763 - DNA, 14259 bp, Unknown
  R35_2m  MAG No. k141_564
cggaggccgatgaggtcgattccttcggcaggccgtatcatccgcgcgcctatacgctgggcgtcaacagctatcaccatcaggcgattcgcacgctgggccagggactggaaccgatggccaccgcgccggacggcatcgtggaggcggtctggatgccggccaaacgtttcgtctgggccgtccaatggcatcctgagttctcccaccgagccgatagcaaccaacgccgcatcctcagcgccttcatcgacgcctgctgacgcaagctcccgccaatctcgacgaaacgccttccaggaaagcagaacggcgtgattccgctcatccagtctccgggaaaacgcccgcgccccggaacgcgagaaccccgcgtcccttgcgggagcggggtccaagcggtatgtccttgattctgatgtttcagataagggggcccggatcagcgggcgtagaattcgaccacgtactggatgttgacctgcaccgggatctcttcgacctccggcttacgggtcacagtggccttcagggacggcaggttcacgtcgaggtagccggggaccgcaggcagcacgtcacggtgcacgccttcggcggcgatctggaacggaaccatggtctggctcttggccttcacctgaatggtctggccgggcttgacgcggtaggacgggcggtccacgatgttgccgtcaacgaggatgtgacggtgcaccacgaactgacgggcctgggcggtggtgcgggcgaagccggcacgcagcaccaggttgtcgagacgggtctcgaggtcggtcagcatggcgttaccggtctggccggcagtacgggtggccttctcgtaagcggcgcgaagctgcttctcggagatgccgtactgagcgcgcagacgctgcttttcgcgcatacgcaccgcgtaatcggactcggtgcggcggcggtcacggccgtgctcgccaggagcgtacggacgcttttcgaagatgcgctgagccttgggggtcagtgcgatgccgagggcgcgagacagacgcacctgacggcgagaacgctgaacgttcgtcattggattaatccttctgtcgttatctgaacggaacgctcgccttgcatatgcctggcaagcgctgagccgggcctccccagcgcttcgtcgtgaacgaacacgaacgggttggttttcttgcgatcacctaccgccgacccgctgatgggctatgactccagacggtatctacctgttggcagacaccagcagaccatattacaccgaggctatggacagcactccggcgtccatgcgatacacccggtctgcgtattcgagtgcatcgggatcatgggtgaccatgagaatcgccgtgccgttgttggcttggtctctgagcagacgcattacgatgtcggtgctctcctggtcgaggtcgccggtcggctcgtcggcgatgagcaggctcggctggttcatcagcgcgcgggcgatggagacgcgccgcatttcaccgccggacagctcgcgcgggtagctgtctgccagatcggcgacaccaagctgggtgagcagcatgcgagctcgggtggcgaacaggtccggacggctcgcagccgtgtttgacggcgtgttttcccggtctgtgattggcgcaatgacatccggcatgaacaggtcggcggctgcttcatcattggtggcagcggcttgtgccacggcatcggtcgacgcaacagcgtccacctgagcaacggcatccgttgcttctgcgttttgggcgaacggcagcggctccggaaacatcgttgcgggcagaatcacgttgtcgagcacggtcaggttgccgagcagggtctggctttgggtcacgaatccgatggtgcgattcctcagcacggacagtgctttatcgcccaagtcggccacattgcgtccagccacgctcacggttcccgaggtcgggcgaatcagcccggcgaccatgttgatcagcgtgcttttgccgttgcccgaccggccgacgatggcgatgaattcgccggcatcgacggtgaggttcacgtggctgacggcgtcgaacggcgtgccgcggcggacgaactggcgggtcaggtccgtcaaggtcagcagatggtccggggagggcgtctcggttacgtgcggcgaatccggcgcagtcggcgcgttcggctgagctggcgtggtcggctggagcttggtcggctcaaccgtggtcagctgagtcggcgtggttgtctcagtcatatcactccccctctcgcagggtcaggtaggcttcgggccggccgagacgccacatggtggccagcgaaccgatgatgccgatgaccgtagagcccacaatggtcacggcaatgaatccgatcaccgcaaccgggctggcttgcagatacggcaattgaagttgtttgccgatcagcgaactgaatgggaaaatcaccaggctggccgcgccgacgccgattacgccaccgatcagaccgatgatggcggattccttcagaatgatggcattcaacatgccgcgcgtggcgcccatgatgcgcagggacgcgaattcgcgtttgcgttcgttcaccgacgaggcgaatacggcgagcagcacaatcacgcccattacccagatcaccgccacgaaaatcttgaggtaggtgacaagcgcggtcagcgaagttctggtgttggcggtgatgccgccggggtatacgtaccccaaatcggcgaaccgggagtcaagacgcttgatgttttcagccacggtctgcgcttcgtaaccccgctgcgtcttgatcatcacggtggagacggcttcgcctgcatattcggcgggcatgacctgcttggagaccttggccgaggcggcgaccatatcaggcacggtgttttggttgatgaacaccgaattgtcgaggctggtgccggtgttggcgagctgggcgacgaccggccacttatggccgtagagttcgatggtgccgtcggtggacacgttgacgtttgcgccggcaatcatctgaccgtcttcaagggggccttcgaactgggatgcgacccatggttcgatgacgaagtcagtgtccgggtcgtaaccgatgatctgcagcttttcggcacagcaggcggcggccagcgatgatatataggtctgttcggtggcctgtgcgatgccgtcggcctgcatgacctcgtcggcgatgtctttggtgaaatagaaagtgctgggattgccgctggtgagcagcgcttcagccttctgcgcggtgttttgcggcacgaccataaggtcggcgcccaggcgcttctccatactggtcatgccggtgttgaggttcatggtcagcttggtgccgccgaagaacgtcagcgcgaggatggtgacgacggcgagcagtgcgccggtgcggaacggcttgcgtttgaggttttcaatcggaaggccgcgcaatgcgatatgggatggcacgatgagtccttatgttgcttatagtgcggttgcaataagcgagaccggagtccagcgttcggaatggctgggctccggccgtctgctcgatcagttgcgcttggcggcgcgagagtcgagccagatggcgatggccgcgaacacgatggtgagcacgccgagcacgatgagcgtgggcagcataaccatgcggcagtgcatcatcgcgcccttgcagatgccgatcaggaaggtgggtacggcgagtagtagcagggcgttggctgcggcggcgatattgaggccgatgcgaatctgcggggcgacgaacaaagccacgacgccaaacacgaggatgacgacgccgatgccggtggccgcctgctgcgagtagtggcaggcacccggcatgtcatggccggtgcaggcgtgcgcaaaggtctggggcgcgatggtgatcagcgcgccgaacagaatattgggtacggatgcaaacagcttgttcttcataactactttttcctctcccctgttcccagggctcgtaggcgcaacctccgcattatgcccagatagtgatgaagaacacaagtcttgttttttgtgaatttatttggtatataactcagcccctcgtcagaggggccaatctatctacaacttctcaataggtgctacgcggagcatgaggcgtttgacgccggcggagccgaagtccacggtgattaccgaattgcggcccttgtcttgcgcgtcggtgaccttgccgagaccgtactggtcgtggctgatcatgtcgcccacggcgaagtcggcgatattcaggccattgtccttggtgagcttcgagctgggcacggcagagccggtcgaaccggatttcggtgtggtgcggcgcgtgatgaccttgccgccacgggtgccgccatatgaaccggatgaagaaccggaacgggaacgcgacccgtaagacgaccccgaacgggagcgagacccgtaggaggacgagccggagcgggaatcatatgatgatgaacgggaaccgtacgaagaacctgaacgggaaccatacgacgaggagccggaacccgagccatacgacgacccataccgcgaccgcgacccataggacgaacccgaaccggacgaaccacgcgagccgaacgtcgacgacccgccaaacgtggcaccgccgaaatcgtcatcatcccagccgcccaaatcgtcggcgaatccatcggtctcccagttggcgcgcatacgctccacgccggcttcacggcgtttccaatcaatcagcgaatccggaatttcgtcgaggaattgactgggcatcatatcggcggcctggccccactgggagcggacggcggcgcgcgtgacatacagtctctgcttggcacgcgtgatgcccacataggcgagtcggcgttcctcctgcagttcagtggtgtcttccatcgaacgcgaatgcgggaaggtgccctgttccatgccggtcaggaacaccaccgggtattcgaggcccttggcggtgtgcaaggtcatgagcgtcaccttgccggagtcctccgcctcaccgggcagctggtcggagtcggccacgagcgcagtggtctccagaaatgcggacaacgtggcgtcaggcgtgttctgttcgaattcggctgcggtggactgcagctgggagaggttctccagacgggaggcgtcctgcggatccacggatttctcaagttcggcccttaagcccgacttctccaatacttcggccacgatctcgctgggcttggagtcgtgcgcgtgcgtgaactgcgagagcgcgcccatcagatcgcggaatgctcgtagcgaggtggcggtgcgggtcggcacctcgatctcatccaagtgcatgagtgcgtagaagaagctggtgccatgctcgcgcgcgtaggcgagcagcacgccttcggcgcggtcgccaagcccgcgcttgggcacgttgagaatacgacgtagattcacatcgtcgtccggattgacgagcgcctgcaaataggccagcgcatccttgatttcgcgacgttcgtagaacttggtgccgccgacgagctgatacggctgattcgtgttgatcagcgcctcttcgagcgagcgggattgggcgttggcgcggtacatgatcgccatgtcggagtaggagatgccctcttcggcgtgcaggcgcgcgatttcggtggccacccactgggcctcctgctgggcgttgtccgccgcgtagccgacgatcggctcgcccttgccgagcgcggtccacagtttcttgggcttgcggccctcgttgttgctgatcaccgcgttggccgcgtccagaatggtctgcgtcgaacgatagttctgttcgagcatgatggtcttggcgttcgggaagtcctgctcgaagtcctggatgttgcggatgtcggcgccacggaacgcgtagatggactggtcggaatcgcccaccacggtgatccaggcggggccggacttgccggcgttcggcgcgcccgggatggccttctcccccgtgtccacgccggccagctcgcgcacaagcacgtactgggcgtggttggtgtcctgatactcgtcgacgagaatgtaacggaagcggtgatggtagtaatcggcgacggccgggtcggtgcgcagcaactcgaccgtgcggccgatcagatcgtcgaagtcgacggcgttggccagggccaagcgatgctcgtattcggcgtagatcaccgcatagatggcttcaaggtcgcccaccgtgccgaactggtagccgcgctggccaggcgtgaagtcgggcgcgtgaacggcgaggttttccttccaaccggtcagattgttcttgaggtcggagatatggccgaggatcgagcgtggagtgtagcgcttgatgtcgaggttgaattcggtggcgatgattttgacgagtcgctcggagtcggcggaatcataaatggagaagccggacttcagaccgatggacttgccgtcgcgcctcagaatgcgcacgcaggcggaatggaaggtggagacccacatgcgctgggccaccgggccgatcagcgagccgagtcgttcgcgcatttcggcggcggccttgttggtgaaggtgatggccagaatctggctcggccatgcgccgaactggctcaagatccaggcgatgcggcgggtcagcacacgggttttgccggagccggcaccggcgccgatcagtagcgcctgaccgcggtattgcacggcttccgcctgctgcgggttcagatcgcctacgagttcctgcgcgctgcgtgcgatgacttccgactcgtcgtacactgttgcctccctttgaatcgcgacattcatgtttaccacatgcacgggtcagcgcaggacaacgtacacttacaagtatccatatcattcactgacatacagcaatgggaggtctaatgcaggaacttgaggagcgaatccagagcgagggaacggtgaaggcgggtgatgtgctcaaggtggacgcgtttctgaaccaccagtgcgacgtgcgtctgttcgaccgcatgggttcggcatgggccgctcatttcgccggcaagcacatcaccaagattctgaccatcgaggcgtccggcatcggcattgcgtgtgtggcggcccagcatttcggcaatgtgccggtggtgttcgccaagaaggcgcagtccatcaaccttgacggcgaccagtacaccaccacggtctattccttcaccaagcagaaggagttcccggtgatcgtggccaagaagtatctgaacgccggcgaccatgtgctgcttattgacgattttctggccaacggcaaggcgttgcgcggtctgattgacctgtgcgaggcggccggtgtcacggtcgagggcattggcatcgccgtggagaagggcttccagggcggcggtgacgcgctgcgtgccgaaggctacgatgtggattcgctggccatcgtcgagtccatgaatcccgagaccggcgaaatcacatttaggcactgagcacattgactgctcccgccagcgggagcaacagagagaagaaaagaatcatgtcagagaagaaaaccaagaattccgtatcctttgaggcgctgtcttcgctgaacgcgccagtatccttctggaagggcattccgttcggcctgcagcatgtgatggccatgttcgtggcgaacctcgccccgatcttcatcgtcgcctcggccgcgaaaatgaccccggcccaatcggccaccatcatccaggccggccttctggtggcgggcctgggcacctgcctgcaactgtacggcgcgtggctcatcggctcgcgtctgccgatggtcaccggcatctccttcacctacgtggcggccgccgtggcgatctgcgcagacaagggctatggcgcagtggccggcgcggtaatggtcggtggcctgctggaactcgtgctgggtttgacggccaagtattggcgtcggttcgtgccgcccatcgtctccgccatcgtggtcacgtcgatcggcttctcgctgctcaacgtgggtgccacgagcttcggcggcggcagcggagccaaggacttcggaagctggcagaacctgacgctcgggcttatatctttggtcgcctgcctggcgttccagctgttgatgaagggcacggccaagcagctgtccgtgctgttcggcctggtggtcggctatgtggcggccatctgcatgggcaaggtcgatttctccggtttccagaacctcgccatcgtgtccgtgccgcagttcatgccgttcaagcctgagttcgactggggttcgatcatctccatcggcctgctctacgtcgtctcctcggtcgaggtgctgggtgacaccgccgcgctgaccaaggtgggcctgaaccgtacgcccaccgaacgcgagaccgcgggcgccatcgccggcgacggcctgatctccaccgtatccggcctgttcggatgcctgccgctgacctcgttcgcacagaacatcggattggtggccatgaccaaggtcgtcaaccgcaaggtgattctctccggcggactgattctggtgctggcgagcttcgtgccggccatcgccgaggtgttcaactcgctgccgcaggcggtgctcggcggctgcacgatcatgatgttcggcaacatcattctttcgggcttccagatgatcgccgaagcgggcttcacgcagcgcaacatcacgattgcggcgctttcgctgaccatcggcatcggcttcacccaggtgagcgacatcttcgcgcagttcccggcactgttccaacaaatcttcgcctcgaactgcatcgccgtgtcgttcgtggtggccgtaatcctgaacgccgtgctgcccagcgaggagcacttcctctccgcgcccaaggaggcaccggccgcggacgccgagtgataacaacgcgacatatcagctgcgcataatcacatgctgatgccctatcgtcttgcaggatgatagggcatcattgattttgagagagactacaagttgaaccatgagttcgagccggtggcgtgtcgatcaatcgacatcttcccattcgaggatgtctccgggttggcagtcgagtgccttgcagatggcgtccaatgtggtgaagcggacggctttggcacgtccgttcttcagaatggacacgttggcgggcgtgatgccaatttgttcggcgagctcgccgacgccaatcttgcgtttggccatcatgacgtcgagattgatgcgaatcgtcatctcaaatcacctgctcaagttcgcgcccgatccggacaaggagaacagtttccatacggccacgaacgccgcttcgatgcagagcaggaacagcacgcccataatgagatatgaccagtgcatcgacgtctggctcgggcagaggccggccagcgcgccgctcaatcccggtacggcgaatagttggccccataggcaggccagccagaccagaatcacgatggctttcaacgcgagcaacacccatcggttcatgtagtttttcatagcccggtcctttcaggtgccgacgtttttggcgacaccgcgaacatcgatatgactatatcgaaaaacgatataccttgcaaggcgtattgcgtcaaccggcattggtcgctcatatgcatataggcttcggcagactgtcagcagaccgtcagctcaacggaacgaacgccatatgagccacccattcgcgcacgagcgtgatgacggcttcgggttggtcgatgtgcgcgttgtgaccggcattatccagagtcacgaaggtggcgttgggatagtgcggcaacagggcttgctggtcttcgtatccgacgatctggtcttgcttgccggtgacgatgagcaccggacccgcatatgtgccgagcatttcctcgggattatcggccagccaataacgctgatccagtcgttcgcatgccgcacggtcgcacaacgccacgccgggcaggatgaaccgttggtagcgccgccacgcgtcgaatgactggttgacgcccatggtaatgaaatcgaacacctgttcctgtggcaaggagtgcgtcagcttgggattgggctgtgcaaccacatgttcggccacatgccggccggtatgctgcgggtccacgaccggcgcgatcaatgccataccggccactcggcgaggttcgcgcgccaatacttcgcggacaagcgcaccgcccatcgagttgccgaccatggcgaatggagccgttttaccgacaaggccgtcaatggccgtttgcagccaatccgccatttccggcagcccgcaggcatgctcgggcaatgccggcgtacggccgaaaccgggcagatccagatatatacggcgaattgaatcattgccgtcaaacgccttgtcgagcatcatcagcgaacgatggtccacacccatgccatgcacgaacacgacgggcaatccatcatcattgccctcaatcgcgcagtacggctgcaattgtgccatgtgtgcctctccttcaacccggtacaaatcgcctttcacacaatagcggcagcagctcccctggtgtcagagcaatcccgaccgccattctcggtttcgaggggctgatttcgtggtttggggacatccacttccgtttcaaggggctggtcattggccaaaacccaagtacgaatagcttcatgccaacgtcatttcgccgttttggagctgtcgctactcggccatcagcccctcgaaacggaagtggatgtctcggaacgagcaaatcagccccttgaaacgcaaatagacgattgcgaatcgacttatcagccgcgtcgaacttgcaatagagatgtcggtgtatcattccccggtctgattgcgcggatgtcaggaagcgtgaagaattgtcacaaagtcgcgtgatggcgcagccgccgttcaggtggatatgccacgctgtcatgatgacggccgagccggaacacggcaaatctcgcatgctgcataggccagccggtcacggtcagccatgacaccgaaatattggaggcgcaatgggacaacaggtgcggtgcggcagacgccgctcccatggcgcgggcgcgctgattgcagccgtcatacttgttgttgcggcgctgatcgcggcatggacgctgctgccacggctattcacacctcacgagaccgcgcgcacggccgaggaagcatattgcgcggcggtgtcgcccgacggagcccgccgcaccttgacgcctgatcaggcgcagaacgcggcgctgattgcgaacatcgccgtcacgcgcggactgccagatcacgcggcgacggtggccatcgccacggccatgcaggagtcgagactgacgaatctggactacggcgacttggattcgctcggcctgttccaacagcggcccagccaaggctggggcacggcggagcaggtgtccgacatgacctatgcgacaaacatcttctacgaccatctgctgcaggtgccggattgggagacgattccggtggaggacgccgcgcaggaggtgcagcgctcaggctacccggaactatatgccacatgggatgcgatggcacgcgcttgggcctcggggctgaccggcgaacggtcggcggacgtcacgtgcgcgttggagccagcaatctcctcggacgcggacgggttggttgccgccataggcggtacactgccgaatgtcagtgtctcggttgcgcccccgaatggcaaaaccggcacgaacaacggcgctgcgaccaatacggccagcacaacgttgacgatcacgctgccggacggcctgtccgccgacaaccgcactcgactttgctggcagacggcaggctggctggtcacgcatgcacgtcaatacggcattgacgcactgcacgcggacggcatggattggaaccgcaaagccggtacatggaccggcaccgaaaccgccgagcagaccgtcaccgtcacgcttgcgtgatgtgacctataccgccgtcgcgaccacaaatccgactggctggagcctacgccgtcgatgctgcctgaggcacgacacggatatgttttttactcgttcgaatgagcccaatccacgacggcttcgatgttattgccatccgggtccagcacgaatgcggagtaatagccgggatggtacgggcgcggaccgggagcgccattgtctcggccgccggcggcgagcgcggctgcatggaacgcctgcacggcttgctgactgtcagccaggaacgcgatgtgtgtgaccggcgtgaccggcgaagcctccgcctccggcccgtcaatcggcgacacgtagaaatcggagtgcagggttccgtcatccacgccgaatccgagcgtgggctcatgatgcgccttgacgatatagccgagcggtgcgagcgcctgtttgtagaatgtgatgctacggtcgatgtctttcacgtgcaacgtcagatggtccagcatggtcttggtcaccctcccctggttcttgtattcgattgctgcttgcagtgtaagcccgaacgtttcccacagggccgcgcatggctatgatgagagcaatcgcacgtcgagttcgagacaatattcaaaacgaatccaaggcaatagggggaatgatgatgaccaaggcactgattgtggtggatatgcagccaacgttctgtgaaggcggcgaactgggagtcgaaggcggcaacgcggtcgccgagcggatcgccgattatgtgaacgcgcatcgcagcgagtacgcgtatatcgcaaccacgcaggactggcatatcgagccgggcgcgcactggtcggcggaaccggatttcgtggacacgtggccgaagcatggtgcggccggcacgccgaacgccgaattgcatccggcgatcaaggcgctgattatccatcatcatttcaagaagggccagtattcggcggcatattccggttttgagggcatcgaggacaataccgaccgtatccagacccgtgaggaggttgcggccgagcaatccgccggcaagacgctggccaatgcgctgaaggccgccggcgtgagtcacgtggatgtggtgggcatcgccgaatcgcattgcgtcaaggacaccgcgctcgatgccaggaagttcggtttcgaggtcaccgtgttcgaggacctgaccgtaccggtcagcgaggagctcggtgtcgcggcccgcaaacagatgacggcggccggcatcacattggccgagtcccgctgatcaggccggatatacccagagcgaacgcacgaacacttccgtatattcaaggccgacactgccgcatagtcgcctagtcgatatgtgaagaaggcttttatggttacgatgctgctgacttcgatattccgcaacgcctcgtccgccgtgcatgaagtcgaaccgcatccgcaaggcaagcgggtcgcgttcatcccgacggcgagcgccgtggaaccgtgggggccggttcactcggcgttgagcaaacacgcgctgcaacgcctcggtttcgaggtggagcaactggatgtggaagatgtgccgagcgggtccgccgaacgcgtcacgcgtagcatcgccgaggccgactgcatctatgtgggcggcggcaacacgttctttctcctgcaggagttgcgccgcaccggtgccgaccgggccatcatcgagcaggtgcgcgccggcacgccgtacatcggcgagtccgcgggctcggtcatcacggcacctgacatcggctatatcaagctcatggaccgcacggacaaagcccccgatctcaccgattacgcaggattgggcttggctgatttccgcgtggtcccccaccatcatgcaacggccatgggccacgccgcacaacgcattctcgaccggtatggtgccgatctcagtctcaagcccctcaccaaccggcaggccctgcttgtcaaggatggcaaaacccggctgctgcgatgatgcgggtcgtcggcccgtcgcccattcggcatcgccgtggtgtgtccggcctgacatgcctatcgagcggcatcaatcacacagcaatgtggctgggaacctcgccgaacgtcaacacctgcatacatcagcacggcaaactctgccgaaatcgcccggcgcacgagatgccagccggccccatccgtcacctcagtgccgtaccgggccaggcatggccttgagcaacgggatgaatccggcgcacagtaccagggccacgacggcgagtatctgccagtgggcggagccga

SEQ ID NO: 3764 - DNA, 27836 bp, Unknown
  R35_2m  MAG No. k141_613
aatcagccccttgaaatggagataccgcctagcaacacttataggctgacgacgacgccctcccatggtgcaagctcacggccggcaagagcggccacagcgtgcgcggcgtcatacgtgctgatcaccacgttcgactcggcaaggccatcggccactgccaacagttcggcggattcgcgaggcaaatcaacggttcggccggacatgttgaccacgaccagcagcttctcatcgccgagggtgcgggtgaaggcgtagacatgcgcgtcatccgcatcgagcagatgccagtcgccggccgccacgacaggcatgtcgtggcgcagcgcgatgagctgcttgtagaaggcatacaccgaatccggatcgtcgaattcgccggccgcgttgatcgccgcatggttgggattgacggagatccatggctccttagcggcatccggcgcagtgaaaccggcatagacagagccgtcccattgcatcggggtacgcgaattatcacgaccgcgcgcggcgatacccgccaacatcgattcgagcgactgcactttggcttcctcaaccctttgacggtaagcgttcagggactcgaggtcacggtactggtctaggcgcgtgaagtgggcgtcggtcatgcctagctcttcgccctgatatatgtacggggtgccgcgatgcatgtgcagcatcaggccaagtgccttggccgaacgcacacgagattcctccgaggagtcatcaccccaacgagaaacgacgcgaggctggtcgtggttaccagtaaacaggcttgcccagcctgcattcttcacggccgcttgataaccggccataatgctcttgagcttcggcaggtcaagtggcagtggcttccatttgacgccttcgcagtcaaaatcaacgtgctcgaataggaagagcatgtccagttcgccgttggcggggtcggtgatgtattcgttgcgctgtgcggtaacgccgggagcctcgcccacggtgaggaagccctcacggccttcgaacacttcacggcgcatttcggccaggaattcgtcttggcgagggccgtccgcgcagaacggattcgggttggaatagccttcctcacccacgggcagatcgtccagctcggaaccgtactcgccgggcagcttgccagacaggtccgtgcgcttggaaatcagcgtaatcacatccatgcggaagccgtcaacgccgcggtcaagccaccagttcatcatgtcgtataccgcgcggcgcacagccggattttcccagttgaggtccggctgcttcttcgagaactgatgcaggtagtattcgccacgctcagggcaatactcccatgcagaaccgccaaagtaggagccccactggttgggctcggcaccgggctcgccggcagtggtgccgggacgggcgggacgccaccaataccagtcggcgtgctcatcatccttgtttttggacgcttcaaaccaggcgtgttcatcggaagtgtgattgacaacaagatccatcacgatcttgagcccgcgcttgtgggcctcggccagcagctcatccatatcgtcgagtgtgccgaacagaggatcaatgtcctgatagtcggaaatatcgtagccattgtcgtcttgcggagacttgtataccggggatagccacagcacatccacgccgaggtcggccagatagtcgagccgtgacgtaatgcccttgagatcgccgaggccgtcgccgttggtgtcttggaaggaacgcgggtaaatctggtaaacgaccgcattggaccaccacggatttggggtggcaccgttggtgcggatggaatctggaattactgtgcgttgtgaagtggtcatcgttggctcctccattatttatggtctacattgcctgttgctcatagtctaaaaagcgctgaattacatttccattggggaactgcgttggtgtgccggaaacaaaaactgcaaagagccggaaggcactgctacggctcaattctcataagctgcacatgctatttagcaacatatgggccctttcgctgtttgtggtgggtgactgtgccgtggggtgatgttggtcgggtaggttggaggcatggatgcctctcacctgttcaccgccgcgcttcggctgcggtcgccttggagggtcgggtctgcggacttccgtgacgccgacggcgacgggcgggagccgcacatcacgatcggcttcgagcccggcagagggttcatgctcctgttcgaggcgtgggtgtggctatatcgcctgtgctcgtggatgatgcactcgaggctcgaacctatgaaggagctcgcccgcttgttccgccgccataatctacctgacctgcggcagctcacatattaacggttcttctgattgcgacgcgcaagagcaacttcgggcgcgcttggattgcctgcttgaacccactggtgcggggatagatgatttagttgacacgcctgcgggaatctggtggggatttcgctggcacaccggatttcaagcaaaccccgcctcgggaaccgctccggacttcggcgttggcccggttcgtatgtcaatcgattgccgtctgaaccgggacagaatccgctgtcccggttcgcgatttttgtccttttttacaaacagggacaagccaatctccgcagttcatatgctccgtaatacaaaatcggcggaatagagccgatcccggaatcaacatgttgtcccggttttcacataaaacgattgacattcataccgggacaatgaaaattgtcccggttcgtgaaaatcgcccgaaaccgcgaaccgggacagcggattctgtcccggttcgcgcgtcaaacggttgatatgtggaccgggacaagccagtggcacggcgacacagcagatgcgctcaattgcaccgtaagccgtacggtttcgtcactttttcattcgcacaacgagcaaaaccacatgacctttgtgcgccaccgccacatcaaccgaccgtcgcctttattgtggcggtttccagtatggcaacaggacagaaaagcctcctccggtgagagccggaggaggcttgggtggaagcggacctttacttcacagagtcctgcaattcaggactggcctacggccagacccaacatgacctcgcgagtacgcgacctatccggccgcccgggccgggaaacagcccacggggctgtttccttaatcggctcgtctcgctcgacgcggtgaagtaaagcagcgcctgcgctgttttacttgaccgctcccctcatcacaccaccgacgacccacttttgggcgaagatgtagacgatgaggatcggggccatggccatcaggtagctggagaaggccatcgggtagttggtggcgaactgcgagctgaagacgtactgggcgagcgggatggtctggttcgactggtcggtcaggatgatcaacggcaggaggaagtcgttccaggcccacagtgcggtcaggatggcgatggtggcgttaatcgggctcatcagcgggaagatgatggtccagaaaatgcgccacgtggatgcgccatcgattcgggccgcctcttccagcgaaaccggaatcgaacggatgaagccagtggcgatgaacaggttcgtgcccaggccgagcaccgtgtacaggatgatcaggccgacctggttgtccaggtgcagggagcccatctgcttcgcaatcggcagcatgacgaccgggaacggcacgaacatggcggcgatgaagaagtagtacaggaagcggaagaagcgcttatccatgttgcgggccacagcgtaggccacgaaggtgttggtcagcaaggtgagcaccacggcggccaccgtgatgatcgcggagttgagcgcggccttcgggtagttgaccttggcggaggcgtcggcgaagttgtgccactgccacgaggtgggcagggcgaaggtgccggcttcggccggagtcttcagcgcggtgacgatggtgaagtagagcgggatcagaatggtcaggctcagcacggccacggcggcggtcagccaccagttgatcttgtggtccctgcggaacttggcgggcttgccggacttggacggggtaactgttgcagtagtcatttcttatcctcccctaaatcagatctgttcctggctgcgggagatgcgcagctgtacgaaggcgatgatcgccagcacgatgaagaagagcacggcgtttgcggtctggtaggcgtactcgccaccggtcaggccacccttccagatgaggtaggtgacggtttcggtggaggagttcggaccgccctcggtcaaggcgacgacctgatcgaaggtgccgagcgcgttcttcatggacagcacgaggttgatggtgaagaacggtccgatcagcgggaatgtgatcttccagaacttctgccaggcgttgacgccgtcgatggcggcggcctcgtagatttcgtcgtcgatggtctgcaggccggcgaggtagatgagtaccgagtaggcgatgccctgccagacggcgaggaagacgattgggatccagctgagttgctcattggtcaacagcgaggtggacagccacttgatgcccagcgccttgccgagctcgggcagcgggttcatgaagatgtacttgaacacgtagccgatgaccagcacggagagggtgtaggggatgaagaagacggctcggaagccattcttgaaggcgatcttcgagttcagcagcaccgacaggaacagggcgatcacattaatcagcaccgtgatgagaatggcgatgaggaacgtgaacaggtaggcgtggcccacgcggttgtcttggaagagggcgatgtagttcttcaggccgatgaacttgtaatcgccgtagccctgcgagttggtgaaggaatactttacgccgtcaagaaatggcaggtacaggaagaaggcgaaaatgatagccgccggaaccaccatccagtagtaggcggggtccaccttgcgggtggagaaggcggagaccttcttcttggccggtttcttggcagcggtcttggttgcggttgcgtgtgacatgatgttctcctctcctaccgatcactcgaaggtcctggcttggaccttgtcccattcggtctgcatctggttcaggaagcgatcggtgttgccggaggccaccatggtctgcaggtagccgccgatgttgatggacgaaggaatgtagtggtcgcagaagtcggccagtcggttttcctcgaagaacgggcgcacggtttccagcgcatcgttgccgaagtaggtgtccttcagcggcgtgatggcggactgggcgtcggcgtaggcgtcaagctgatccttctgcatgaggaactcgacgagcttcatcgcttccttggggtgcttggtgttcgcaccgatggtgagcatcacgtcgtcgccggcggtgaggatctgctcgctggcgtcatcggtggccggcatctgggcgaaaccaagttcgatatcggggttgatcagcaggatctgcgggatggcgtaggtgccgagcgggataatcgcggccttgccttgggcgaagttctgcgtgccctgctggtaggtgacgccggtgtccgcagtggagtaggtgaagagctcggattcctcctcgactgcggtcttccacagttcctggaacgtggtcttgccttgcttgagctcggtgtacttcgattcgggaaccagcgtgccggccagggaggcgagcggtgcctgggtggtccaggcgtcggccacggaaccctgcagcgggttgatgccggcgtccttgaaggtgttgagcatatcggtgaactcgctccaggtggtcggcggattctccgggtcaaggccaaccttgcggaacagagccttgttgtagatgtagccggaggcgttacccgcgaagggcaggccatacaggcgcttcttggaggaatcggtggtctgcaccagattcttggcgatctgcaccatgccggggttgagggtgtccacaatgggttcatcggtgaagtcgtagaacacaccggaggcggcgaagttgccgaagctgatgtcgccgttgaaggtgatcacgtccggcacacgattcttgacgaaacgggtgcgcagatcggtctgggcgttggcggagttgttgatgttgaccttgatggtcgggttctgcttctcaaagtcggcgaccatggacttgaactggtcggcggcctcggacttgaactggaagaaatccagcgtgacggtgcctgcggtgctggagccgcagcctgccaggccgaacccgacggcgatcgcgcacatcacggcggcggtgcgcacggccagacgcttcagtctaggcgttgcatgtggggaatcggacagcataattgttgactcctttatctttcttttcctccggcttcggtgccggcggttcttccactttccaaggtaacggttcggccatttcattcccagcgccagcgagcccacttgcgcaagcaacaaaaagcgcggtattttgtgattaacgcaataaatacagcgaagggggcttgcatgtctgatgtcaacgcgattccacagtggttttccggatccgagcatacgcatcgcgtggcggcggcaattgcccaatacgggccgatagcccgcactacgttggcacagatgctgggactgagccaaggggccttgtcccgcatcaccagcgatctgatctacgccggggtgatcgaggagcttccggccgaggccggcccgtcaggcaagctgcccgagcgattcacgccaagggaaagttcggatcgtcgcggacgcccgcagacttcgctggtgttgtgttcgaacgcacgcaccttcattggtgtcaaggttcatgggatgtcgattgtggccgctgcggtgaacgcgcatggcgaggtggtgtccggccggcacgaggtgccgatcggggcggatcagtcggctgagtatgtggtgtcggccatcacgcggctggtgcgcgaatgttccgccgatatcgcctcttccggactgccctcccccactgcggtgggcgttgcggtaggtgggcatgtggtcgacgattcgattgtgacgttcgcgccgttcctgcattgggacggggccacggacttggggacgatggtcacagaggcgaccggcctgccgtgcggggtgttcaatgatatcgattctctgctggtggatgcctcctggttcgggccgggtgtcggcgtggatatgttcgccgtggtgaccatcggcgtgggtgttggttattcgctggccgtgaacggcaagccagtgcagtacccggataagagctatggtctggtgggccacgtgcttatcgatccggaggggccgcgctgcaccagcggacatatcggctgttcacaatgcttgactgacgattcgatcgccgaacagtactctgcgattgtgggtcgcgcggtcagttttgaggactttgcgcgcgatgccaagggacgtgtgccgcaggccacgcagttggtgaaccggacgtgtttccggttgggttcgctggtggctacggtggcgaacatcgcgatgcccggacatgtgatgattgccggggagtccgcgtttttggccaagctcggcaccgattcgctgcgcgatggcattcgtttctaccgtcacagccagacccagccggtcaagttcacgattatggaccacgactggcagctctgggccaaagccgccgccagtcgcgtaatcgtgaagcatattgggtaggccgttcttggctcccctcagagagggaagtcaagaacgttgcttcgccacagttactccgccacgaccagcaattacggacttgcctatcggcaaggctcaatcccaccttcgctcagctgtcgcttcgctcaggccgtggctactgacagcctactaggctgtcagcttaacgccacagccttgagcaatactgcctgctgggggtggagggacgggggacggatgccgtaacgctgcagggcttcgccggtcaggactacgccttcctcgttccaccagccgagagtgctctggccgttggccagaccggtcaaatccaagctcgggtcgagcgggctgacgcggtaggtgcgctcggggtcaagtccgggcaggtgcacgggcgcggccggataggtctggctggtggtcagctgggtgaagcggtagatggcggcgtcgcggttcggcatcaccatgccatccaagcgcacggccggatcgttggagtcggcgtgcacgcaggtgtcgatggcgaaccagtcgcggtgcttcttgaattcggccacccacacggccagcttggcgagcgcctcgtccggctccttcaacaggttccattcgatgcccatgtggccgaagaacgccatggccatgcgcagttcctggctggtggcacgctgggtggagtgcgcgggactggcacccacgtgctcgcccatcatcgccggcggcaccagcagcgaggtgtagcgctggatgtccgcgcgctcgaccgggtccacgcagtcggagacccagatacggtcagcgtgctctaggatgccgaggtccacgcggccaccgccggaggagcagctttcgatctcaaggcccggatgtgcggtcttgaggcccttgaagatgttgtagacggcgagggtctgcgcgtgcacggccgggcggccggagcggcgggaaccgggctcggtgacgaacttgttgtggtcccacttgatgtagtcgataccaagctcgccgacaagctggtccatgcagccgtagatgtagtcgaacgcatccggattggtcagatcgagcacctgctgagtgcggccctgcagcggcagtcggccagcggtgggcgagagaatccaatcggggtggttacgggccacatcggaatcgtagttgaccatttccggctcgaaccacaagccgaattccatacccttggcgtgcacgtagtcggcgagcgccttcagggacttcgggccatcgggccagacgtcctgcgcaatctgccagtcgccaaggccggaggtgtcgtcgcggcgggaaccgaaccaaccgtcatccaccacgaatcgttccacgccggagtcggcggccttgtcggcgagcgccttcagcgtatcgaagttgtggtcgaagtacacggcttcccaggtgttgaggatcaccggacggccgtgcgagaacaggcgcggatgcagggagcgcacgtaggagtggaagcgggcggcgatctcattgaggccatcgccataggagccgaacagccacggggtgtcgtaggagttctggccttcgccggggccggcgagcgtcacttcgccgccgaacaggagttcgccgccgccgattacgccggttgtgtagggcagacgttcggcggacagcacggagttgccgctccagcccacgtgcaccgaataggcgtcgccatactcgaagccgaaaccgggcacgccggcggtcaggagcagggatgcgtcgaagtcagggcggccggcgagctgcggcttttcgaaacggccgacggtcagcggctggcgctgcggactgcgttcacgtagatggtgaccggtggtggtgaggatttcgccggcggattcgggcagcgggaagccgagctcgatcttgccgatctcgagcggggctccggcgtctgcaccgaacaggttggttacggtggccttctgacggaccaggccgccggggagcagttcgaggtgccattcgacttccacgccctgctcctcatcgcgcgcggtgactatgacgccgggcacgcggaccggaccggtggcacgggcatggccggccacatcggtgtagctttcgccggacacggcatcgagggtggcttccagcacgccgccggcctcgatattggtcacggtgaacttggggaagagctcgacgccggcgcggcgcagcaccacgcgctgctcgccgatccagctttcggcctgggtgggcaggatagacggccaggcggtgtcgtcgagcgcgccggacacgcgctgcggcttcagggcgtcataggcggccagcagggtgtcgggcttggccagcgggcggccccagtggacgatgtgcggcaggtcgctgccggcaaacaccagaccgatcgccacattggcggcgggctgggtcaggtagacggcggtgagtgcggtgccgtcagcggcggcgccggtgaaagtggaggtgttctcggccatattgtctccttcgacgtgtgtggatttgcattgcactactggcttcgatggtagaagaaatggaatatgttgccttggtgccgcgtgttggttgcgtgaggtaagtaatgcgtccgtgtctatcgccgctgggcgaagaaatcagtcaggatggactgacactcgccttccagcacgccgccgtgcacttcaggactatggccgatatgcggatcgcgcggaatatcccaaatcgaaccgcatgcaccgagcttgggatcccaggcaccgaacgcgatggtgccgatatgggtctggatgcaggcacccgcgcacatcgggcacggctcaagtgtgacggccagcgtgcaatcggcgagattccaagcgcccaaggcttgggccgcctgacgcatggcgatgatttcggcgtgggcaagcgggtcgccatcagcctcacgcgtgttgtatccgcgcccgacaatctggccggccgcatccagcaccaccgcaccaaccggtacgtcaccagcggctgcggcctgaccggccagttccagtgcgcagcgcatcgcctcgtcatattccataccaacgagtgtatgcctttttctcatatcgtctcatgatgtgcataatcggccgcaatcttaacgttttcttcatggttcccatatacttttggtggagaaaaaatacgagaaggcggcaacatggcggtatttgagctcatcctatgcatcattgcggcggtggtggtgagctcgtttgccagtcgcttcgtgccgaaggtttccacaccgctggtccagattgtgctgggcgtgctggttacgtatctgccgtttttcccggatgcaaagctcgacccggaactgttcatggtgctgtttatcgcgccgctgctgtatctggaagcgcacgaaatcgataagtcggcgttgctgaaaacgctggatctgagcctatcgctggctatcggactggctatcgtcacgatggcggcggtcggattcactttgcatgccgtctggccgtccatcaccttagcctcagccttagcactcggcgcggcactcggcccgaccgatgcggtggccgtcagctccctaggtaaagaagcctcgctgacgcagcgtcagcgcagcgtgctgaaaggcgaatcactcttcaatgacgcttccggcatcgtcggcttccagttcgctctggccgccgccttcactggcgaattcgccgtggggcaggccgccggcgaattcgtgatctccttctttggcggcaccttatttggcctggtgatagcagcagcggccaactggctattcgagaccgtgcgatccctcggttgggaaaccaccaccacacgtattctgatggaactgttcttgcccttcctgctgtatttgggcgcggaggaattcaatgtgtccggcattctgtcggtggtggccgctggcctgttcatccgattcgaccgtaccggcgtggggccgaatgtggcacgtacgaatatcgtttccacttcagtatggggtgtgctgagtttctcgctcaacggtgcggtgttcattcttctgggcatgcagctgccgcgcgccatgaaggccagctggtctgacccgtatatcagcaataccgtgctgatcggcattattctgctggtcactctggtggtaatcgcgcttcgattcttctggattgcggccatgctgcgcgttgcgcgagatacaatcaccggccagcgccgcaaaatgacacccgaacgctggcgctcggccgcagtgatgacctttggcggccccaagggaaccatcacgctgtcattgatgtttaccatcccgtattacattgccggcggtgcgccgttcccgatgcgtgacgagctgattttcattgcgtcaggcgtgattatcgtgaccttgctgctggccaacttcctgttaccgctattggccccgaaccgtggcaaggatcccagcgcggaaatgattccggtgaccatcgatgtgttacgcgccacggtggaggaattgaccggacgcatcacgccagagaatcgccgtgcgattctgatggtaatcgaccaatacaccaagcgcatcggacgattgcagcagcgcatcggcgataccgatcctcagggattcgagcaattgcagatcgaagcgctgcattgggaaaaggaattcgtgcgcgaccgacttgccgacaccaaggcgcatccggcggcggatacggccacgcaagagctgaacgtcgaagcctgcgagcgcatgcttgaccagattatgaatacgctgcgtcacacttccactgatccgacttcggggcatgcggtatcgcagattcgcggtcgcttacgcatgttccagcggcagatgagcaattacgccaaacgcacggtgtccaagattcgccataccacaccattggtgagcgaggatcagattttcgcgcgcacccgcgaactgcaggtcgaggcgattcatcatgttatcggccggcttattgacgagatgggccaggatacgtacaacaccgagcattgttcggcgctgttgctggattatcgtcgcgctgaggcttcattgcaggcacgtccgaatatgagcggcactacggaaaccatcacgcaggtcgaggacgtaaagcgcgagagctacggtatcgaactcggtgtgattcaggacatgtacgaagccggcgacatcaaccgagcccaagcccgctccctgaggcgcaacatctacgttatgcaggtcgatgccgattccggcatctagtttccttggctcccttctctgaggggagccaagttggggattgctatttccgtatgattctcttcagtatgtgcagtagtgcttgcagtgctcacttcgctcatgggagaacagtctatgaccgcgccggccacaagcgccctcgatgtccgattgctgtggcggccgcgccaattccagtgatggcggctgactacagcacgccagaggtaatgtcgttgtcgagcagccactggcgcaaatcggcgaactcctcaagactcacattgtgatccagaccgtggtagctcttggttttcagccacgtatgctcttccaaccaagcggcggtggcgaacagttcgtatttcgggattacgccatcgttcttgccgtacgtatagaacacggggatatcgtaatcggccaggcgagagtcggcgggggccgtgccgggcacctgaccgggtgtgttgaagccggacagggagacgacggcccggtaccgctcggggttgatgcgcaacaaatgcacggcgaccagtccaccttgcgaaaacccaagcggcaccacgtcacggtcggcgggaatgttgtcggccacccatcggtcgactgctgtggcggcggcatacgcgtcgtagtcacgatcatcgccgataggcagggcatcgtggaaccacgcgtagttgccggggtcgggactgccttcacgggccggcgcaagtgtcagcggcccgcgcaatgccacgaagtcgttatatggagcgatgaggcgcatgatggccgccatgtcttcttcgctggatccccatccatgcaggcacaggaacagcggatgcgtggcatgctggtcgaagccgccgcgcgaggtgacgctgtgttccacggtgagtggctcgccaaaacgtccaggcacagtggtggattcgcggccgatcagaggctggctggcattcgcttctttgctcataccaatccaatatagaggtcttgcgcgctgtgcggaaaacgatggaccatgatttcagtcacattgggtaatccgcgccgaatcgccttgggactttccaggggataccggcaatctgtcaggcattaccgctgtttgcggctgcggtgtctgcggctgcggtgattgtctcaagttcgccgccccactgctgctgcagtgcggtcatcttgctgccctcgccgaacaccatccagcgtttgccgttcagcaatcgccaatcacctttcgtttgctcattatcagcgtattggctcagcagttcggaaatcttgctttcgataggtgcccggctgatggctgcggacgattccgattcaaaggacacgaaggccactctcggatcagtgcacatctgtacggtggtgatgcctggcaaaccgcccgcatcaagcccctgccatccttctttgcacgcgccggcagcttgttctatgccttgctccatctgtgcggtatcttcgacgggtgccttgtcgttcgactgctgaatcagtccttccgggaacaatacgcccatggccacgccgataaccaagcaaactatggcgcacaccagtgcgatgatgccgcccgcgcccactcccccgtgagtggcgtaccgaggcatggtgactcgcgcagcgatgaccagaatcagggtgatgctgataagcaccgccgccgtcaacgcaatgtatcgtcccggcactgccgtcataaaggaaatggcgtaaggcgcgatttcatgaaccgccgaggtggccgataccacgacggctagcagtccgctgacaacggcaagtctgcggcacaatatcgacgttgggctgctggcttttgtagcggcgaatcgccggccggcattccgcctggatgggcgtcgattctgtgcacgacgtgagctgcgcgaatcgtcatactgaccatcgccgaagaaatcgtagtcctcatcgttgcgggccatcggtgcccccttcctgccgattacacagccagtgtaccgctatggcttgggaatggcggtcattcgggggaatgattcagggcaaaaaagaaccccggcggttgcccgccggggagagaaaggagagagaagaagaaagggggttcaattgtcgggaactgctgcggctcctgatcagctttccgctgacatcatttatataaccactgctttctgggtctacctctaagtttctctgagaaaaacctgagaatacttgcgattgatggaccgcggaagcgtgaggagcctctcacgtttccgcccaaggcgctagacttgaaggcagtatttatttgcccaaggagtttttcacatgctgctgtccgatcgcgatattctcgccgcacagtccgcaggtcatatctcacttgatccgtggacccccgaaatggtgcagcccgcttccatcgacgtgcgattggatcggtacttccgtttgttcaataaccacgcctacacctatgtcgatccggcggaaaaccagggcgcgctcaccgaacagttcgaggtggatcccgacgaaccgtggattttgcaccccggcgagttcgcactgggttccacgtgggaatacgtcaagttggacccgtccattgccgcccgtctggaaggcaagagctcactgggtcgattgggtattctgacccattcgactgcgggcttcattgaccccggtttcgaggggcatattacgcttgagttgtctaatgtgtcgacgctgccggtcaaactatggcctggcatgaagatcggccagatgtgtttcttccagctgagctcgcccgctgagcacccttatggctccaagggcaccggctcgcattatcagggccagcggggtccgacgccgagccgttcctacgagaatttctaccgcgcgcacatcgacgactgagcgttgcgacgtaccattcggccggcggatgccggccatttgcttaatcccaaggagatgtcatgaccaacagcgatggtgggttccagttcgacttccagcagcacgaaaagccggtcaggccaacggttcctccgattcccgggcaagagacggcagcatatggcgcgcagccagcgacacaagccacaccggctctgcagttcccgcaatctgtgcaggcagcacagccgacgcagtttgcacagcccacacagcccatcgatccggccatgacgcaaccgttctcgccgcaattcccggctgcggttgccgcacaagcaccacagccggcggcagccacgcagccagtagtatccgaaacaccaatcgccgctgcgcccggccagcagcaatacgtttgggatcagacgacgcaaagcttccgcccggtggaaccgacagcgccggtgacgccagccgcaccagcggcaccggcgacatcgcctgtttcggcagcttcaaacgccgcgacacaagcgttccagcccagtcaggccgagcagcctgcggtagatgccgaggcaacacaagcattccggcctgatcaggtcatggcaacacagcttttcgaagctcaggccatgccgaatgccgaaaccgcggccacacaggcattccagcctaattcagctgcggccacacaggcatacggcgcatcatccaccgtatccagtgagaccgttgccatgccggcaacgcaagtagcgtctgccgatgatgctgcagccacacaggtgttccaaccggccgccctggctgcttcggcacaggctcagcctgctgtgatgcctccctccattccgttgaatcaggtctccgatgaggacgattccgatggcgccgagcctcgtcacggcggtagcggcaaaaagaacacccgcaaaatcgtcggcattgccgtagcggtagtcgccgtgatagcgctggttgtcgccggcctgctctggtggcattccaacagcagcaaggcgagccaagccgtggcattggccgagtgcaaggtagcggccaagcagtacacgaatgctcagaagaagctcaccaccgccatatccaatggccaaaccagcgcgcaaacatccaccagcgatgtggccgatgccaatacgctcaccacgctgaatcaggcgttgcaagacgccggcaatccgaccgacaccgccaagtgcgattccagcctcaacgccactgagctgaagtctcacactaaagagctgcagaatgatgccagcgacatggctgacaagacggatgccatcaacaatgcgatcaaggccgttaatacttcaaaggcgacggccgataccgacacactgaaatcgaacctgagctcggctatttcgcaggcgcagggcacgctggataattccgcgggcggtgtggccgatgaaaacacccgcaccgcgctgcaaaacgccatcaccgaggccaatacggtgatgaacgggaccagtccgtccgaatccgacgtcaacaatgcgatttctaaactgcagaaggccgagtccgacgtcaccgcctcgatgcaggccaagcagcaggcagatgccgccaagcaagctcaggaagaggctcagcggaaggccgaccaagaggcacagcagaaggccaagcagcaggcacagcagaagtctcaagacgggtccacctctactgacgaccccgacggcagccacaactgaggtctgcagcgttctcccgtttcccatggggcggtaacttccccatggggcggttagcgcattttcctttttcgcggaataatgccgttttcagcgaccgccccatgggataattaccgccccatgggatagttaccgccccatgggataattaccgccccatgggataattaccgccccatgaggagccgtttggatatagcagtgggccgggccctgaataccagagcccggcccactgctatatgcccacaatcagggctattgcgatggcttaacgcttggctatcgcgcgtagcacaatcttgcgtagctcggaggcaatcagcacgattgcggccaggcagatgcattccacccaagccatcgggctcaatgccacggtgccgaacggaccgttaaggaacggcacgtaaatcaccacgagctgcagcgccacggacaaaccaatcgcaccccatagccacttgttggagaacagacccacgaatgcggactgcagatgcgaacgggaggccagcgcgttgaacagctgggcaaacaccagaatcgtgaagcccatcgtacgggcctcggtcatctgcgcttcatggccgatggcatccaccgagcggtcggtgaacaagccgccggataggtgcatgtccataccaatcagcgtgacgatggccataatgacgccgacgaagatgatgtcgccccacatggaggcgtcaatcacgcggtccgtcatcttacgcggtttacgacccatcacatcgtcggtctgcgggtccacgcccatagccaacgccggcgcggcatcggtcagcaggttgatccacagcaactgtgtggcgagcagcggcacggtgacgcccacggtttccggctggcggatgccgaggaagccagcaaacaccacaccgaggaacacggtgaacacctcacccacattggaactcagcaggtagcgcaggaacttgcggatgttgtcgaagatcacgcgaccctcgcgtacggcggccacaatggtggagaagttgtcgtccgccagaatcatcttggcgctctgcttggtcacttcggtgccggtgatgcccatggccacgccgatgtccgcggacttgactgccggggcgtcgttcacaccgtcgccggtcatggccacgatgttgccttgacgctgcaaggattcgacgatcttgagcttgtgctcgggggccacgcgcgcgtacacggacacttcggacgtggccttgtcgagtgcggcctcatcgggcagctggtcgagctggtcgccggtcagggccttgccgtccttggcgatgatgccaaggtcggaggcgatgcgggcggcggtcagcgggtggtcgccggtgatcatcaccgtgcggatgccggcacgatgggcctcggtcacggagtcgcgcacctcagtacgcggcggatcgataatgccgaccatgccattccagatgagatcggtttcgatggcttcggcctgatcggcgatgtcggacacctggcctgcggcgttgacgcttacaccgggcacatcagccaaagaactggtttccagcggacggcaggcctcgccaagcgtacggtaggcctcggaggagagacgttcgacggtggcgagaatcgactggcgatcgccttcggtgagcttacggacctgaccacccacgcggatgcgcgtgcagtagctcaacagcacgtcgggcgcgcccttggcgaacacggtgagcttgtctgaatcggcgctgtccttggcgatgatggacatgcgcttgcgttcggaggtgaacggaatctcgccaacgcgcgtgtagcgcttgatcttgcgatcggccttgaccttgcgtgcggccacgatcagcgagacttcggtggggtcgcccacgatctcccagcggccgttctcctcgcgtagttcgccgtcgttcgcgagcgtgccggccacaagcgtggcgacgacttcatcggccacaatctgggcctgctcggattcaggactgacgccaccggtcataaccatgcggccttccggcgcgtaaccggtgccggtgatctgcactgcgccggacggggtgaccacgcgctccacggtcatctcgttgcgggtcagcgtaccggtcttatccgagcagatcacggaagcggagcccaaggtctccaccgaatgcagtttcttgacgatggcgttgtgcgcggccatacgctgcacaccaagcgccagcaccacggtcaggatggcggccaagccttccggcacggcggccacagccagcgagacggccaacagcaaggaatcaatcacgtcatggacgtcgtcgaagccttccagcacggcgagcgccaccagcaccacgacggcgatgacgcacaccgcaatgccgaggatcttggagacgtaatccatctccttttgcagcggggttttctcatcttcggtggcggagagcatgtcggcgatcttgccgacctgcgtgttcataccggtgccggtcacgattgcgcggccggtgccttgcgtcacggaagtgccgttgaagatcatgttggcacggtcgcccagcgccttggcttcggtgagtgtgtccggcttcttaccgaccggcacggattcgccggtcagggaggcctcggcgatgcgcaggctggccgcgttgaccagtcggccatcggcggagactgagtcgccttccgcaaggacgatgatgtcgccggggaccacgtcggcggtgttgatgcgcatgactttgccgccgcgcagcaccgaggtctgcggggccgtcatttgggcgagcgcctcgaccgcggcctccgccttggcctcctgcatgtagccgagcacagcattgacgatcagaatcaaaatgatcacgatggcgtcgaacggcagcacttcaccgccttccgcgccgggctgcgcattggccttttcgatgaaccatgcgatcaccgagatgatggtggccgcgatcagcaggtagaccagcgggtcctggaactgggccaggaatttcttccatttcggtacgggcggggcggtggcgagctcattcgggccgaatttggccagtcgacgcttggcttcttcctcgctcaggccctgggatgggtcgacattcagggctttggccacgtcgtcggcactggtcagacttggatcagcttcccccaatagcgcttcctgcgcgcgcacttcttccgattccacgacctcgttcgttgcggtcgcggacactgcggattgatctttgagatcatccataatgttctccttggtattgccgcggagtagtcagccttgcggccgctgccgggttttctctcccggctggacgcacaggactgcgcggttatggacaccggcgcaactgctgccgatgcatacgattgctattattccataactgcgtggcgcacttggcgcacagcgtaatagcgttttgcctagaacaggcgacgcaaccaggcttcagccaaatcaggccaacactgcacgcattcgacgatgtgcgcatagaagccgttgccagcggtttccgcattggccagggacaggccgtggctgccttcggggaacaggtgtgcttcgatgctcacgccggcggcccggcaggcctggatagcattagcgtattctccacgggctcggcttcgcggtcggaggtcatggcgtagccgccaccaggcaaaatcaggatggccgggcgtatgcggtccggttccatctcctcgctgttgtcggccacatagccaaagaatcgcgcctcgttgccgtcaatgccagcgatggtttgttggattattgcatgccatacatcatacgcgcagagaatagttctcgataagaaccactcaccatatgcggtcttgcccgtatctccaaaccgaataacgcttacagcgaatcgtgaagaacgtatgccgcactaccgttacagagcattcgacagctcgacatataacttaagaatcgtgagaatcaaaacaattcataacctaggaatagtgagttttacggcattatataacttaggaatcgtgatataatagctcataaatccttgaaaatactaggaatatgagcttaacatgtataagagaaaaatatacgaccatctacggcgatggaaagcagcgagcaagggtactactgcgttaatgattgaaggagcccgccgcgtcggcaaaagcaccgtcgccgaggaattcgcgaagaacgaataccgctcatacatccttatcgactggcagaaggctccgcaggcggtacgagactcgttccgcaacaatctggatcatttggacacgctgttcatggacctttccgtctattacggcgtacgcctgcatgagcgtgacaccctctttattttcgacgaagtacagctcttcccctttgcccgcagcgcggttaaacaactcgttgcggatggtcgatatgacttcatggagactggctccctgatctccattaagaagaatgtcgaaaacatcttgattccctccgaggaagaatcggtgagcatgtttcccatggattttgaggaatttctatgggccagaggagaagaactactcgccgatgcgatacggcaatcttttgcggacaggcgagcaatgtctccgctgctggacaacaaggcggaacgcctgttccgtgaatacatgctggtgggaggtatgccgcaggccgtagagcgttatctgggaacatccgatatgggcaatgtcgatcgggtgaaacgccaaattttgcacctgtacgctcaggacatagagaaatacggcggagattcgaaagaacgggtcaaacgtatcttcgatgaaattccaaggcaactttccaagcatgaaaagaagttcacactgtcgtctttaggcgaaaacgcacgcgaacgtgaatatggcgatgctttcttctggttggatgaatcgttcctgatcaaccgctgcatgaatgccacggatccgcatgtgggcctgcgcctacaccaagaggactccacgatgaaatgctatatgggagacaccggcttgttagtaacgcaagtgtttgccgaccgcgcatacacgtcgaatgagttgtaccgcgatatcctgttcggcaagctggaagtgaatgaaggcatgctggtggagaatgtcgttgcgcagcagctccgggcctcaggccatcgcctgttcttctattcccgatattcccgtcaggcgaaggaccgcatggaaattgattttctccttatcggggagtattcaaatgccgccatgaaggccagggtctgccccgtggaggtcaaatcgacaaagagatacaaaacctcatcgctcgataagttcaagaataaattcgacagccgggtcggcatgcaatatgtgctgcatcctagaccaatgcgcgttgaaggagaccgcctatatctgccgttgtatatggcgcattgcttgtgatgattctagaacgtatcgcagagaatgattctcaataagaaaagcgtgaggattacgatgcctcaatcgcacatgcagagcgtcatatcagtgagatcccgccgttgcggaccatgtttgattgtgcggaaaagttcggatgcctcacacttttcttgacgggaattatttactgtgaggcattgcgcaggttggcggccatggcgcggtcgcgcaagcctttggtgagcttgagaccgagggttacggcgatcaggactatcgtgcaggcgatccacagcgttcgaccgccgaagttgctgatggtccagccaccaatcagcggcgccagcgcaatcgataccgaccacactacgttgtagacgccctggtacgtgccgcgtgccgacgcgggtgccatggcggcaaccgtagtggtggcgatagggaatgtgcccagctcacccagcgtccacagcactacggcaagcgcgaatccgccccaggaatgggccgcggcctgcaccgcatagccgatgacggttacggcgaggcccatcaccagcacgcgtgaattgcccatgcgcgagaacagtttcatcgcgggaatctgcagcaggcacaacataccgccattgatggtgagcagcaccgaatactcgcccagccctagaccaaggtccgtcatggcaatgggcaggccggaggtgctttggaagtacacaaggaagtagccgaacatcagcagggagaagccgaggaatggcgtatcagtgagcacgcgccgccaattgcgagacatggagcccttggcactggcagccggtgcggcatccgagtgattcggcccctcgacgccggcgaattccgcatgcttaacactgcgttcgtcttcatggcgcaccgcacttggcaccgatacagtaatccccaaatgccgcacctcgcggaagaacgcaatcagcaatatcgtgacggctatcatcaccgccgcttcaacgtagaacatcagcgaatacgagatcttgaccagctggttggccacaatcggcccaatcgcgtacccaaaattaatcgcccacgattgcagtacgtacgcacgttgctgacgttcggcgggcaccacatccgcgatatacgcggcgatgaccgggctgggcagtgaggcgaacgcaccatagacaaacagggccgcgcctagagccacggggtcagtgagcacggaaacgaccagcagggcagccgctgcgccgatttcgccgatgataatcatggattggcggccgaatctgtcggacaaggtaccgccgaacaggcagccgatgattgcgccgaagccgtacatggccacgactgtgcccaccacaccctcatcgaggcgcagcgcggaaaccaaatatatcgacaagaatgaggtcacgaagcgacccatccacagaatcagaatcgccaaccataatccccaatacagcagggacagtccgaatatcatgcgctgcttcttcactctcaataccttaccggctaccgacggcggaatagccgcgttttggcgcggggtgctgggacaatagcacctatggctatcaaaaaaggaccgaccaaggggtcgggtggcaagcatcgcaacaaactgaagggttacggccccactcccaaagccgaggaccgcgtctatcacaaggcgtataaggccaagaaagcggccgaacgtcggcagatggccgacccgcgtctggcagcccgccgtcgagtggacaagttcgcttcggcggatacttcggatctggtgtacggccgtaattccgtgctggaagcactgcgcgtaggcgtaccttcttccacgctgtacatcatgtctcgtattgaacatgacgatcgtactcgcgaaatcgtgaaaatcgctggtatgaacggcctgcacatgctggaggccgatcgtctggagatggatcgtatcgcccgctccggcaaccatcagggcgtgattctgaaggtcgatccgttccagtactcctcgctgaacgagctggccgatcgtgctgagaagaaggccaaggcaatggaggccgcgaattcggcggccgcccgtattgctgcgcgaccgctgttcattgcattggacggcgtgaccgatccgcagaacctgggtgccgtgattcgttcggcggccgcattcggtgccaatggtgtgattctgccggaacgccgttccgcttcagtgaacgccgccgcttggaaggtgtctgccggtgcggccgcgcatatgccggtggcgcgcgtggtgaacctgactaaggcacttgagggcttgaaggagcgtggatactacgttgtcggccttgacggtggcggcgataagctcgtcggcgagactggctttgaatccgatccgctcgttgtagtgctcggttcggaaggcagcggtttgggccgactggtgcgcgaaacctgcgacgcgattgccggcatcccgatcagctcgtctgttgagtcgctgaacgcttcagtggcggcgggtatcagcctgtacgcggtgtccaacgcacggcgcaaggctgcggggagtgattgtcgcttgaggccgtaataggttgtacacacaaagaagcccctcaatttgaggggcttctttgtgtgatgggctcacctacagacagtccaccggattgtccgcttaatgactccacactgccgcatccggatcgtcatcggggttgtagccgtcgtcgtccgggtcgctgtaggtggattcgtcgtcaatgacgccggaatcggcctcttcgttaagttcggcgagtgccttggaatcaaggttgtagctcggcagaacgttgtcgatgtagctggtcacggcctcgcccatcggcacgtcgtggccggccttctccgccaggaaccagcgatggtcaagcacctcatggaagaactgagcaggctcgatctgggagcgatattcgcgcggaatcatacgcacggtcggctcgaacacctcgcgcatccaatcggtggccacgatttccagatcctcgccctcacgccacgtggaggcacggtaggcgtcaaggtcgttgagcagacgacgggcctggttctcctgcacgtcaaggccggtgaggcgcagcagcttgcggttggcgtagccggcgtccaccacgcgcgggcggaccagcacacgcttgccgtcctcggcggtcttcatttccagctcgtccacgtcgaagcccagctcgttgagcttgttgacgcgctgctcaatcttccacatttcgtccgggttgaacttgtcggtgtcggtcagagcgctccacagcgagtggtagcggtcgaccaggcggttgcccacctcgatctcatccacgtcgccgggcagtagcttgccggacgccaaatccataagttcgccgatgatgttggtgcgggccaagtcgatatcgtattcgcgctggccgtcggtgagctggacttgcaggtcaccggtctcggcgtccaccaggaaggcggagaaagcgtcggcgtcgcgcaggaacaggacgttcgacagggacacatcgccccagtagaagccggccaggtgcaggcgcaccagcagcacggcgagggcgtcgatcagtcgttcggcggtgtccgggcgcaggttgcgggcgaacagcgcacggtacggcagtgagaacttcaagtgccgggtgaccagaatcgcctccagcggctccccttcacgggtgtgacggccggtgaccacggcgatcggggtcacagttggcagttcgagcttctgcagtcgacgcaggatctcgtattctcgctcggccacctggcgcgtgatctccttcatggcgtacacctcgtcgcccacgtgcacgaatcgcccgacgtggcgggagatgcctcgcggcaggttggccagcaggtcctcaggccaggtggccaagggcttgtgccagggcagcgtgaacatctttgggttcgagctggcggcggtgattttcagtgcttgcggttccgctgaatcggcgtgttcgtcttcggctttgacagacgtggccttcagcgcacgcggatccatctggggcaattcgttcaactccatgtgttcgattttacgtgtcgttcgcgatgtgtgctccttggccacgacttcggcgcgttatgtttacgggaaaacaccgtttggtctctccctcagaccgtctagaaggcaaaagaaaagccccgcagctatgcagggcttttccaacgaggtcataagagaggaagagaataacctcgtttaatggttgacgaagcgattagacctcgccaagtatctattagttcagacgcagctcagtcgacggagcgaacaggtgcatcttggccgggtcgatcttgatcttgacggtcgcgccaaccttcggcagcgcacgcggattcacacgaatcgtggtgagcttgttctggtcggacatgacctgggaggcctcggcggcggagccatcggtgacgatgttgccgtagatgtagccatcggagcccagatcctcgacgttcacaaccttcagggagaaggcgttcgggtcgtcagccggggccaggccagcgtcctcaggacggaagccgaccacgatctggccgttgtcttcggcggtgagcttgttgacggcctcagccggcaggtccacggtgtcctcaccgatcttcgccttgccgttgaccaccgggtgggtgttcaggttcatcgacggggagccgatgaagccggcgacgaagacgttggccggacgatcatacagctcggtcggagcaccgacctgctgc

SEQ ID NO: 3765 - DNA, 35266 bp, Unknown
  R35_2m  MAG No. k141_757
cgtcaagaaggccaacaagcacgcattcgtgggcttcgccaaggaccactacggcatcgatatcgacgagaacaccctgttcaacaccatggtcaagcgtctgcacgagtacaagcgccagtctctgaagattctcgccgtgatctccaactacgccgacatcaagtccggcaaggtcaaggccgaggacatcactccgcgcaccgtgttcttcggtgccaaggccgctccgggctactacctggccaagatgaccatcgagctgatcaacaacgtttcccgcgtgatcagcagcgatccggccgtcaagggcaagctcgccgtccacatgctgccgaactacaacgtcgagatggctcagaacctcatcccggccaccgagcttgacgagcagatctcccaggccggcaaggaagcttccggtaccggcaacatgaagttcgctctgaacggcgccctgaccgtgggtacgctggacggcgcgaacgtcgagatccgtgagcgcgtcggcgccgagaacttcttcctgttcggcatgaccgtcgacgaggtcgagaagaagtacgccgagggctacaatcccgcctcctactacgaggccgatccgcgcctgaagcaggccatcgatctggtggccgacggcaccttctccaacggcgaccgcaacgcctactccccgctcgtggccgactggctgaccaaggactggttcatgaccctggccgacttctccgcctacatggacatccagtccgagatcgaggccctctacgccgatgagctcgaatggaaccgcaaggccctgctcaacgtggccaactccggctacttcagctccgaccgctccatggaagactatttggaacgtatctggcacactgctcctctggcctgacggccgccggagcagcgcgccggctacgtgctggtttctgcctcgcggctgtcgccgctcggcgtcgcctacgggaagcccgccgggcttcccgcttgacggctccgcatatctggcacactgctcctctggcctgacggccgccggagcagcgcgccggctacgtgctggtttctacctcgcggctgtcgccgctcggcgtcgcctacgggaagcccgccgggcttcccgcttaacggctccgcatatctggcacactgctcctctggctgactgagtcggtggggcggctcccctcggagaggggaaccagaacataagaagccccgcaaccgacatccatcggttgcggggcttcttgcgttgaaagaccgccctatcaggcttcggccggggcggcttccgcctcgccatcggcctcatcctcggccttgttcagacccaggtcgaccggcgaggagctgttctcccacggctcctcccacggatcgtaatctgggttctgctgcttgtagatgtacaagccaacaagcgcggcgagcaatccgccgaacagcagcgcgaagaacttccaaccgttagaagacttgttctccatgacggctcctttccctagggatcgtctggtcggtatgcccattcagaccgactctgctccctattctaggccgctgtttgtgacgattgggtggaatgacattcgtgggcgattcatccacgcccgcatgccctcggtcggctcagcatcttcgcggcgcgtggaacgcatccgagaccttcgatacagtggattgcatgcatattcctacacaacgggagattcgataccagtgggagcgcggtggtccggtgatgacctgggcgctgattggtgcgtgcgtggcagtgtggctactggaggtattgctgggatttattgccccgggcctgagggcttggttgatgtacctcggcatggcggctccggtcagactggtggctgagccgtggacgctcatcacctcgatgttcctgcatgcgccgaactcgctattgcatatcctgttcaacatgatcgccctgtattccgtgggcccagtgctggaacgaatgatcggccactggcggttcttgggactgtatgtgatttccggccttggcggctctctgggacttatggtgtgggctgcggtggctccgggaggcatcggctggcagatggcagcctatggggcttctggagccttatttggcctgtttgcatcattgctggtggtatatcgccgtatcggcgccgatatccgctccatgttgatctggatggcggtgaacttcgccttgccgttcgtggtcgggggcgtggcgtggcaggcgcatgtcggcggctttgtagtgggtggaatactcacatggctgctggtgggtggtgtgccggcgtggcgaggtaaaagcctgaaatggcgtatgcaggtttacggctgggccatggtggtgctggtcgttgtgttgattctgttgtgcaatatggccaatccttatgggtggatgagtttcggctccctgcactgatatggcttgatatggctgtaaaaaaacgattgatgccgggtattgcggaacatgcagtgcccggcatcagtgtatgtgcggaaagcggcgatgtggatattagcgatgtggatatcgtcattcggtgagtgggcatgcgctgtatgaaggtatccacagtaatgaaggtatccacagtaatgaaggtatccacagtaatgagatgcgcgcaatgacgagttatccacgataacgagttatccacaatggtgacttgtgcacaagtgtgtagaaaagtgcataagactgtggataacttatgtggataagttaggaatgccgcggtattactgggtttgttgcagtggataactcgggtgtataactgttccctcgctgtggcgatgtatgccaagccaaagttatgcacgagatatacaccgagaaacgccgcttatccaccacttatccacatggttttccacattcggtggaaaactacatgggtgtgattcatccacaggctgtggataacgtagtggataagtcgtggataagtcgtggataagtggtggatagctgtggatgaacaggtgaaggcacgaaaaaggccggcctccgcatacgggaggtcggcctttcgcataagaactaagaacaacctaacgatagaaaaacgatctaccgatagataagcgcaacgagtcggaactcagcgccatcccatcgtcatcaggaatccgatcatgatcagggcgaagccgatgcccaggttccacgcgccgatgttcggaatcggccaggagccggacggggagaggtagtacaccacacaccaaatcaggccgatgatcataaacgcgcagaacagcggcacgaaccaacgcgggttcgacttggtgcccttaatggtttcttcaacacgcttggtgttctccgcctgacggttcatcacgcgctgcatctgcggggtcagcgtggccttatcggcagtggcgttgagcacggcctgcacctgctccatattcacgccgtaagccgcgtcttcctcggcagaagcgttctctgcgttctgctcggtgtctttgttggcggtctcgtcagcagcggtgctggatgaggtctcgctctgccagtccttctggttgttcgagtcggtctcgtgcagctcttcgtcagccatcagcatagtctccattcaataggctaaaagtcataatagtggctacactcgaaagcggcgaccagagtcggcaagaagacaggaaattcatggccagacatgtaggtaagcacggcgcacggcactccctatggggtggtgtcgcggtattcgtcgtcattgccttgaccggttttctgctgagcaccaacgtgagggtcaatcgtacggttgccgccaccaacgatacggccgatctggtggagcaaggcgtggacgaggccaaccagctgcagcaggacgtcagcgatctgaccgaacaggtcgccaatcttacggacgcgctcaaggccgatggcaccgacggtactgacagcacgcagaaccaaggcaaggactccagcaatgtggattccagcctgatgctgcccgcgctcagcggcagcggcgtaacggtaacgctggatgattctccgttatgggagaacgccgtcaacaacaatggcacgaccgccaatatcaacgattacgtgattcatcagcaggacgtcgaatcggtggtgaatgccttgtgggccggcggtgccgatgcgctgatgattatggatcagcgggtgctgttcaattcggcggtcatctgttccggcaacgtgctgtcgttgcacggtaagaaatactcgccgccattcaccatttccgcgattggtgacccgcaaagacttcgcgcagcgttgaacgactccgaagccattaccattcttaagcaatatgtgaccgcgtttggcattggctacaaggtggagaatgccgagggccttcagttccccgctaccgccgccttgctgcagcagttgaaatatgccacggtcgatacgtcaaagaccacagatgaggagcagactcagcaatgagacacggcaggcacaacagcggcgcaccggcgcccattgatctcgcgtccgtgtcggacgtacagcccttccccgaggacgacgccgcacgaatggcggcagacccggccaatgccagcagggcaaggtcccgtcgtgccgcagtacgcggcgcgtcttcgccccagcggagcctgatctggcaggcactcggcatctgcgccgaactgctgattaccgctgccgtgatttgcgccctgtacatcgtctggcagatgtggtggaccggtgtcgaggcggagcgagcccagaacgaaaccacccagtccgtcgactggagcgaccccagcaacaacgggggaacggtcaccatcgccaaagcccaggagggcgatgctccagtacagccgaaagacgcgaaatatggagacttgattgcgcagatctacattccgcgcttcggctcccaatggcatcgcaacatcgtggaaggcaccacgctcgagcagctcaatcgccacggtctgggccattacgacaccacccagatgccggggcaggtcggcaacttcgccgtcgccggccaccgcaacggctacgggcagccgttgggcgatgtggacaagttgcaggaaggcgatcccatcatcgttcgtaccaaggattactggtacgtctaccactacacccggtacgagattgtgctgcccacggacgtgtatgtgatcgcgcccaatccggaagactccactgccaatcccaccaaacgcatgatcacactgactacctgtgagccgaaatactccacccccacccatcgatggatcagctatggtgagttggcgtactgggccaaagtgtctgatggcgtgcccaaagagctggctactactgattcgtccggtgcagtgaagttctccaccaccgaaaccccctcgatcgcttcccgcattggctcgctggacaaggtggtattcggcgcgctggtagtgtggctggttctgttcatcgccgctgcggtggcatggcgctggccggtgctgcgcgagattcgcgcgggtgagcgtcgccgcccggatgccagcatctatggcggactgttgcgtctgcagcccggcgtggcaccgattcgatggctgctgctggctctgctgctgttcgcagccgccgcggcgctgttccagtggggattcccttgggccgccgccaatatcccattcctacagcagatgtcgaacttcgtggcagtgagctgacggcagcctagtactatggcttgcagtacacgtccctcaaggagagccctatgaccgattccgcgcatattttggtggtggataactacgattccttcgtctacacgatcgtaggctatctgcaaacccttggtgccactgttgatgtggtgcgtaacgacgctatcgacccagccgcgccgggtgtactggacggttacgatggcgtgctgatttctcccggccctggcgctccggccgaatccggtgccagtgaggatatgattcgcctgtgcgcggccagcggcgtgccgatgtttggtgtgtgcctgggcttgcaggcgctcgccgaggtgtatggctgcactgtgggccatgcgcccaccatcatgcatggcaagaccagcttggtggaacatatcgatgacgagattttcgagggcgtggccaaccccatgaccgccacccgctaccattcgttggccgtcgagcccgattcggtgccggatacgctggtggttaccgcgtggacgcagggcgaccacattgttcagggcatcaaggtcaagggcaagccgatgtacgccgtgcaattccatcccgaatccgtgatgacccaggacggctaccgtctgctggccaactggcttaaggtctgcggccaagacaacgccgtggccaagtccgccggccttcagcccaaggttacgaagtagcttttccgcgcgcggcgacgctttcccgggaatgttgcgctgggatagctctttatacagcaaaggggaggggtgcagaagcccctcccctttgcgttgtgtgattgcgttgcgtgtttacgttgcgcatgtgttgcgcatgtgttgcgctatgtgcgttgcgtatgcgcaacacacatgcccggcgctcactcactcactcacgggttccgccccccgttgccgttgttggcaccgttgccgttgccaccgtctccggtaccggtgtcgcctccggtgctgccggccttcgtggtaatggtgacggtcgatcccgcatctacttggctgccagcgccaggattgatgctgactaccacagcggtgctgtcggttgggccactggcctgagccttgaggcccacggccttgagcatgagttcggcggtggcgtagtcagtgccagcggtgatattcggtacagcgaccttttccttgcccgtggacacccagatggtgatggacccgccctgcgcgatggaagagcccgaatcggggcttacgcgggtaatcagaccggcctccaccgtatcggagctttcctgctccacggtgaagctgaacttgccctcatactgctgtagcacgctgtccttcgactgaccgaccaaattgctcggtacggtggtcatgccggaagaaacatatatggtgatggtggtgcccttgggaaccgactgaccggcggcaggatcggttctcgtcaccatatccttggcgatgtcggcgctgtcttcggttttgacggtggcgttcaccttgaacccggcgctttccagaatgctgcgcgcctcttcctggctgcgctccttgacatccggaacctgagtggactgcgggcctgcggagaaccacaccttcacggcagatcccctggccaccttggagccggcgtccgggctcatcttggtgcaggtgccttccggctcggtggagtcggtgtcttgcttttcggtcatcttcaagcccaatctctcaagcttgagcttgatgttgtccttggacgtggaagcgttgcacacttcagggatggtgacggtgtcttcagaggacttgttgccggagccgttcatggcgaacatgatgcccacaatgacgagcaccgcgacaatcgccgcgatcgccgaaccgatgatgatcttcttgcgcttcttggccttggccgccgccgcacgctgctgcgcacgggactgcaacgccgctgagttggcaccattggccggtggaatctgctcgaactgaccggtcaccgggttgaatgcctgggtgggctgctgctgcggttccaccggcgtggtgggcaaatcacgttcggcttccttgcgggccttcatattcgacaggtccgtcaatgggttgaacgcggccgccaccggcacgccgccgttcatgtaggtcaggatgtcggtcttgaattcggaggccgtggcgtagcggttctggcggtccttggccatggccttggcgcagattgaatcccacatcttcggcagccccggcaccacggcggatggcggcgtggcgacttcggagacatgctggtaggcgatggccacagcggaatcgccggtaaacggcgggcgcccggtaagcatctcgtagagcacgcagccggcggaatacaggtcggaacgcatgtcgacggtctcgccgcgcgcctgctcgggagaaaggtactgtgcggtgcccaccacgccctgcgactgggtcatggtggttgcggaatcgtccagagcgcgggcgatgccgaagtccatgaccttgaccgcgccctgctcggaaatcatgatgttgccgggcttgatatcgcggtggataatgcccatgcgatgcgaatagtcgagcgcgttaagcacgcccaacatcacctgttcgcagtcgcgctggctgagtgcgccgttgaccttgatgatgtcgcgcagggtctggcccttgacgtattccatgacgatgtacggcaaacgctcggtatcgccgctttcggaagaaaccagttcttcgcccgaatcgtagatgttcacgatgttcgggttgttcatctgggccacggcgtgtgcttcgcggcggaaacgggccaggaagatgtcgtcgttggccagatcggcgcgcatgattttcacggccacggtacggcccagacgggtgtcaagagccacgtggacctcggccatgccgccacgaccgatgagctggccaagctggtagcgtccgccggccaatgcggtgggcatactggtgctcattgcttattccctcccaatcttgaggccggggcctccaaaacaatgcgtggcgtgctggtcactcggcgcggcagtcgattgccggacgtggccatggtggtgtcggccatttcggtctgctgatccagcagacggcgttcgatgcgtgccagcgtacgggacaccaccagcgcgtctttcgggcgatccaacgggtccttggccagcatcgacatgacaaattcgcgtaactggacgtccaccgagttcggcagcggaggcacgggattgttcacgtgcgctgcggcgatatcgaccggagtggtgccggtgaacggacgatgcccggcaaggccctcgtacgccactacgcccagtgaatagatgtccgattgcggcgtggcctgctggccctgcgcctgctcgggggagatgtattgtgcggtgcccaccaccatgccgtcctgggtgatctggccttggccggtggagtagctcacgccgaaatcggtgatcttcacttcgccggtgtcggaaaccatgatgttggccggcttgacgtcacgatgaatcacgccgtgcgagtgggccacgaataggcctcgcgcggtctgaatcagaatgggcagcagttcgatgggatccatcgcgcccttgctatggaacagatccgccaacgatttcgaggggacgtattccataatcagaaagccgatgccgtcatgctcgtagtattcgaacaacgcagcgatgttcgggtgcgccagattggcggaattatgggcttcggcacgcaggcggcgcagcttggcctcggcgttggtcacgtccgagcgcagcgccttgatggccacttcacggccgagctgaatatcgtagcctttccagacctcgcccataccgccttgcgcaagacgcgaatcaagacgatatcggcggtgaataagctgtccttcgataagtttcactgctgcaaagcctcctgcatcatcgcgcgcatgatcgggccagcggcgagcgaaccgtatacatctgtgttatgcaccaacaccgcgacggcgatctgcggattgtccgccggcgcgaaaccgatcacccagccgtcgatggcagagttgtcggtaccgatttgtgcggtaccggttttgaccgccaccttgatgccgtcgatggccagctgcggattggcctcggtcaccacgctctccatcatcgtggtgagcttgtctgcggaatccttgctgaacgcgttggccatggtttgcggtttggtctgcgaaagtacggtgagatcggcggcgcgcacacgatcgaccagcgtgggctgcatcagtttgccattgttggcgattgcctgcgcgaccatcgccatctgcaacggcgtggccgtggtgtcgccttggccgatggatgccagcgcaagcttgtcgtcggtcggatcagaggggaatgtggacgcggtggccgtcatcggggtgcccgtggattcggtgccgtcaatggtgatggtgctgccgaacccgagcttggtggccatgtccgaaaccttgctcgcgccgagtttcacgccaagctgggcgaaagcggtgttggacgaccatgcgacggcctcttgcagggagatctgtccgttgacgccatcggcctgtgcctcgtcgttcggcagctgtgtggcggttcccggcaaggtatagctggagcctgcaggaatcttcgtgtccgtctgataatcgccggtttccagcgcagccgaggcgacgatggtcttgaacgtggaccctggcgggtacagctgcgaggtggcgcggttgattagcgggctattttggcccgcagagagttcgttgtaggcctgagacgcggctttggcgtcatgggtcgccagtttgttcggatcgtagctgggcgtgctcaccatggcgaggatacggccggtgttgacttcgatggccaccgccgcaccatcgcgcgtaccgagctgatcgtaggcaacctgctgcagcttggggtcgatggaggtttcgatggacgcgccctgattcgtagtgccggtgagcatggccttggcccgctgccagatcaatgaatcggcctcaccgttgagcagcatgctgcgggaggcttccaggccgcgatcggcggtctggttgatggagaagaagccggtgaccggagcatacagcggaccgttggaataggtgcgcaggtatttgaacgcgtcgttgaccggttcggatttggccatgaccgtgccgtccgaggccagaatggcaccgcggtaggcaccgagctggtggtacagcgaacgggcgttgcgcggatcgttgttcagcgcgttggcccgtaccgccatgatgatggtggacgacaggccgagaatcacgaacagcgcgaccacggcggtgaaaagctgacgaagatatttgttcatacgcgagtgcctccgttaacgggaggaagcgggggaatcgtaccggtaggcgtgtacggttcatcggcgccggcatacgccggagtggtggcatccacaatgggctcggcgatgggggccgcagcggagcccgcagaggtcacaattgcgggcacttcgggtgcctcaagtgtgtctggcgcgtgcttggtgatgtccacaatggggtcgtcaaacgattccgcctcggactgcgacgccgtagccgacgcgctgcgaggctgaacgatcggttcagtggcgcgggcccgggcctcaagctccttgttgcgcagcacggccaaggcctcgtactggaacgtatccgaggtcagctccggctcgggcgcattggccgagttcgagatgatgatgagcagggtcgcgagaatatagttggcgatcagactggagccgccggctgccatatagggcagggtcagaccggtcagaggaatcaccagcgtgatgccgccgaccacggtgaacacctggaaggccatggtgaacaccagtccggaagcgagcagcttgccgaagccatccttgattttcatggcggtgatgaagccggaggcaatgatgagcaggtagagcatcagaatggccaggacgcccatcaacccgagttcctcgcctagagaggcgtagatgaaatcggagttcgcgaacgtaacgagcgaaggatggccttggccgagaccggtgccgagcatgccgcctgatgccaggccgaaaatgccggtgaccagctgccaggagccgccgggggtcttgttgtattgctcgttgctgaacgggtgcagccaggcgtcgatgcgctgacccacgtggctgaacatgcctgcggccagcacggcacccgcggcgaacgcgatcagaccgatgatgatccagcttgtacggccggtggccgtgtacagcatgaccacgaacatggcgaagaacataagcgaggtgcccagatcgtgctgcatgacgagcacgcccatcgaggcgatccacaccacgatgatcgggccgagatccttgatgcgcggcagttgcaggccgagcacttttttacctcccacggccagctggtcgcggtgatcgaacaggtaggcggcgaagaagaacgcaaggaacagcttggcgaactcgcccggctgaaactggcccagtcccggaatcttgatccagatgcgcgcgccgttcacttcctggccgacaaatggcagcatcggggcgagcagcagcactaggcccaccaccatcgacacgtaggagaagcgccgcagcacgcggtagtccttcaaaaagatgatgagcagcgcggaaagcacgatggcgatgcacagccagatcagctgacgttgggcaatcgcccaaccttcgctctggtcgatgcgggcgatcatggtcacgccggtggcggtcagcagtagcatgcaaggcagaatcgactggctggcgtacggctggaagcgcacaatcagcccccacagcaccagaaacagcactacgaccaatgccagcatgccggcgtattgcatagggaattcgccggcggtgcgctggaacatctggatgaacgccaacgcgctgattgccatggcaatcagcaacaaggaaatctgacgtagacgggtagcgatcattgagaatctcccgtggccgcgttgtcggctgctccgataccggatttatccgaggaatcagatgagcttgacgaaccggactggctggacgaatccttggtgctgtccttggaatcgctctgggaactgtctttggaactgtccagggaattggacgcctcggccttcttggcggcgtcggcttcctgctgcttggccagtttgcgcatttcggtgcggatgatacccacatgcgactgcgcttcgtccaacgaaccgactgtgatgccttggctcagctggtcacgccatgtctgaggcaggtccgcggtggcgatattggtggtctgcacttcgtgcgaaagctcaagtccaaagagattggtcggcacgccacgataaatggccacggtgccgttgctatctcccacgtagtagtgcgtctggctccacgtgtacacgccccagccagcgccggccaaggccagcacggcaagaatgcaggtaataatcaccgcaagcttattgcggcgcttcttggtgcgcgtggccttcttctgctcgatctgctcatcgcggatggctttggccacatccgggtcgttggggtcggcggacaggcgcccatccggcttttgcaccaccggaatctcaccggtatcgggattggctcgttcaccggtctcctcgcggacggtggacggctgcaccacgcgtgtggacgacggttcggccgtggtttgcgcggcctccgtctcgtgcgcgctggcgggctgaatcaatgctgcggcgcgctgggcgggggaatcatcctcacgcagcgcgggcgcggtagccaccggctcgttgacgatgtcggcgatcggctcaagattacggctggcggcaccgccgaccaacggcgtttggtgcggcagatcgaacgcatcggcatccaacgccaacgtggcatccgcaataacggccgtgacattatcggtgctgcctgcccgcagtgccatctgcaccagacgctgcgcgcattcgccctgatcggacagcgtggtcatcgtctcttcgatggtggaatcttccagcacaccgcacaggccgtccgagcacagcagccaacggtcggcggggtgggctcggcgaatcgaaatatccgggcgcgggtcaatgtcaaagtcgccaagcacgcgcatcacgacgttgcgctgcgggtggttcttggcttcggacggggtgatacgaccggtgttgatgaggtgttgcacgtagctgtggtcgcacgtgatgcggctcaggtgtccgtcgcgcagcaggtaggcgcgcgaatcgccgatatgggcgatgacccagtagccggccaccaatgccactgcggtaacggtggtgcccatgccggcaagcttgcgttcgcgcttggccttgccgacgatggcgtcatgcgcggccataacggaggtttccatcatgcgggagatcgtctcgacgttgccgccggtgtcgtcctgctcgatgtgggccagtgaccggatggcgatggaggatgccgtatcgccgccggcgtgaccgcccatgccgtcgcacatggcgatgagatgctcgccggcgaaggaggaatcctgattgttcgcgcgcacagtgcccacatcggacaccgtggtggaatacaggaacagcggttgtgaagcggcggattttggcatgcggctacctcagttcgaaggtggtggcgccgatgcgcacaggaatacgagcgggcaggatggtggggcggttgatgcgctgctggttgaccacggtgccattggtggagttcaggtcttcaatggcccactgcccggagcgcgtgtcacggtagacgcgggcatggtgggaagacacgaattcgtcatcgagcaccacggtgttcgaggcggcgcggccaagcgcgatgtcggcttcggccagcggcacggagctgccggcaagcggaccatcgatgatgaccaacagggtaggctgcgccgaggcgacggacgacgcggaagcgctgggccggcgatgcgggcgcggcgcagctgcctgtggcgtttcggccttggccttatgcacttcacgctcacgacggcgacgcgcgcgcgaaggtcgcggactgaacgtctcgatgtccttgcgcagcgaacgcacggccagccagatgaatatccacagcaggatcaggaatccatacttgagcagggcgaatgtcagttcggtcataagtggacgactttcgggcgtgtgctcgactactcctgggcttgggcggaggcccagtacaggatgcgggtacggccgatggtgatggtgttgccatcgagcagcgtggcggcgggcacttggtggccctccacgtacgtgccgttggtcgaacccaggtcgcgggcgatcacgccgttatccgtgatgtcgatttccaggtgcttgcgggagatgcccggatcgtcgatgacgatatcgcagccggaaccgcggccgattaccgtcttgtctttggtgagcaggtactggttgccgttcacctcgagcaccgggctgtcctcggtctgcgcatcggtggtgaccggcacggcattgccctgcacggattcggaggtgaggttgaagttgcccttggacaggtcaaggtcttcctcgaagatcacgatcaccgggcccacgaaggcgtaatgctggctcttcgcgtactcggtgaggttatcggccagttcgttggccagggtctcgctaccccatgcctcgatacggtcgaagtcaggagtactgagcttgaaacggtattcattcggggccaccgtgcggtcacggcccacgggcatggcctcggcgtcaatctcgcgctccaaggcgctggaaagatcgacaggctgcaggtctttggagccaaacttggcgaatactccgttgactgcaccctccacgcttttttcaaaacggtcgagaacgctcatagtcctccctttctaatcctcacccatcctacgcggtgatgggaatatgaggcaaaaaaccggtctctcacatgacgatgggtgcaaaatatccaaaaatatccaaaaattcagggcggaaatgggtgcggcgcaccacctgcgccgtttttccgcatgccgtgtgggcgcgggccccgggcgtgccgcggacgtcacggcccacggcacgcccggggccggtcaggccagggcgtcgcgcaggaagtcgcgctggagggtgagcaggttttcggctacggtctcgtcgttggtcatatgggtgatgcccgtcaacggcaggaaggtgtgcgggcgacccgccgccatcagggcttgcgagaggcgcaggctatgggcgatggtgacgttgtcgtcggcgaaaccgtggatcagcataagcgggcgctcgagtttcggtgcgtcctgcacgatgccgttgcggtagtagacatccgggtcgaggcccagatagcgctcggtgtaatgcgtgtcgtacagcgtccagtcggtgggcggggcgccggcgcacgcggccttgaacacgttcggcgcgtccaacacggccagtgcggacaggaagccgccgtacgaccagccgatcatacacaccttgtcgaggtccggtgcgggaacgccgggcctgcgcccatcggcgttgagcctggagacggcctcgggaagggcgttgacggcttcgatctgatcggccagcgtcacgcccttcatgttctcgaagattgcgcgatcccaggccgggccgcggcctgtggtgccacggccgtccgccgtgaccaccaggaagccctggtcggcccaccactggccctcccagtagaaggactgggaggcgacgacctgctggaagccgggcccgccgtacggcttcatcagcaccggcagtttgtcggcatgggcgtacgggctggacgggctcggcgcgatgatcgccgtgtacaaccggtgctcgcccagccgcgtgaacgtgacgttcggcgtgaacccgggttccgcggcggtgctggtgatgtcggcggcggtgatgtcggtggtgttggcggcatcgctggtgttggcggcgacgacggcatcggtgacgccgccgacggcgcgtcgcgtgacgatgtgccgcatccgggcgcgggcggaacgcatatcgcgcccagacaccaccatgccgcgtgcgccgcgtgaggccgtccactgaccgggctcggtcgtgatcggcgcgaccgagccgtcatatcccatgctcaccacatcgaagctgcgggcgtcatggccgccgaacagagactcggcatccgaagcggcacccgagccggcccaggcgcgcggcacctcggtcgcgatttcgggcgcacgctgcaccacggccagcacatcctcgtcggtcacgtcgagcaccgcgcgcacgttccagccagccggcgtgaacgggcggccgtccaccgtcagacggttggtatccgtggccatatcgttgagcgggcacaccagccggccatccggcgtgtaggcgggcgtgccgtgaatcaggtcgatccactggtcgttcgcgtgctcctcaagcacacgcgtggcgcccagcgcggccccatccgccgcgaccgccacctcgagcacctggtcgcgggtctggcggcggttctgcaccagcaccagcggatcgtggccgcgacgccagctcacggcggccacatactcgtacgcctcgcgatcccaatccacatcggcgttgccggtgatgcccgcgtaccggtcgttctcatcgaacgccagcgtgatcacggtcaggtacacgtcggcgttgcgggtcagcgcgcgcgggtagcggcggccggcggccggcttctcggggtcggccggatcgctgatgtaccaggtcggctcgtcggcggtgtcgaaggactcgaacagcacatgctgcgaatccggggcccaccagaaaccgtcgtaccggtccatctcctcgccggccacgaactcggccagaccgattttccacgtgttttcggccggattgccgtcctcatcctccacgctcacgccgtagaccgcggtgatgcggtcacccagctcgccgccgatatcgaccagcatcaggtagctgcccgtggtgtacagcacatgctcgccatccggggcgatgcgcgggttcagcaccggcgtgtacatctccgggtcctcatcgagccattcgccggccagttcgcgggtgtgcggctcgggtgcgccggtctcgtcattccaggcgatctcggtcaggaacaggcggccgttgatggtgaacacgatgcgattgccgtcatcgtctgcggagtagccgacgatgccggtgccgccttcgcgcgcacgctcgcggcgggccttctcctcggccggcacgtcctcgctgtcggcggttgcgccaagcagttcgcgcggatcggccagcttggtctcatggtgttcgccggactcgtcgaaccagcttagccacagtgcggtcaccagatcctcggggccgtcggagcgcaggaacagggcccgcgagccgtcgcccacggtctgtgcggagcgcggtgcgccgcagccgaaccgcagcgtgcgcgccctgaggcgtgggaaatgcttgattgcgtcattgacatcattggtttcgctcatacctcacaacctacgcgcctgtgcggtcagcggcgtgaggcttgtcctaagatgggaaccatgcaggtgacgatgatcgacgaaaacaagtacgccgaaatgatggccgacgtggtgctgcccgcgctcgaacaatgccgcgaggagggctggttcgatccgtccgccgccgaacgttcggccggggtcgagccgctgtccggcattatggacaccggcggccgctcgggccagctgcactacctgtgctacgactccgccaaattcgacgcgatccgcgaacaaggcgccaccgccgtcttccgcggggccatcgtcatcagccacggcttcaccgagttcgccgagaagtacgacgaactggtctggtacttcctgctcgccggctattcggtgtgcgtgctcgaacatcgcggccacggcaagtccgcgcgcgacgtggacgatcattgcatggtgtggattgatgactggcagcgctacgtggccgatctggccggcttcgccgaaaccatcggccagcagtacgcggccggcatgccgctgaacctgttctgccattcgatgggcggcggcattggcgcggccgtgttggagcgataccccaccctgttcgacaaagcggtgctctccgccccgatggtcgcccccgccaccggcatgccgctgggcgtggcccgtgtgctggtcggcgcgctgtgcggactcggcttcggcaagaagcgtgtgttcgggcagtcggacttcacgccggagttctcgatggaaggcaacgagggcgcttccgaggcgcgtgaacgctggtacttcaagctgcgttgcgagaaccgcgaataccagacctactgcgcggcgttcgaatgggtgcgccaggcgttgaagctcaaccgggccgtgctgaacccgtccgcctgcgccgaagtggagacgccggtgctgctcttccagtccggacgcgacatctgggtactcaataagccgcagaatcacttcgtccaactggtcaaggacggcggcggcgaggcgaacatcgtgcgcttccccgaatcgcgccacgaaatcttctccatgcccaacagcacctacaagccctacctcgaaaagatcctcggcttctacgacgatcccatgatcgccagcgccgcgtactgatgtagctcttcattcattgttcaccgtgcggtcaccttgtggcccggcccgctttaggtggcgggagaacaatggaattatgggcataatgtcttctctccgtcgccgcgccgccgtggttgcggccgcggtatgcgccggcgcgctcgcgttgaccggttgcacggcgttcaataattccgatgacggcacagcggacggcaacggcgcgtccgccaccacgcagaccttccagccgtccggcggcaaaccgaccgccaccctgagcattgcctccggctccgagaacaaggaagtcgccactgccatccagaaagcggccgaccaatccaacgtagccgtgacgatgcactacatgggttcgctggagattatgaacgcgctcaaggccggcggccagaattacgacgccgtctggcccgcttcttcgatgtggatttcgatgggagacgccaagcacatcgtcaaagacgcggccagcacctccaccacgccgatcgtgttcggcatcgccaaatccaaggccgtcaaactcggctgggctgacgactccggcgccaccaagcccgtctccaccgcggacatcctcgccgcggtcagcgacggcaaactcacgttctcgatgacctccgccacccagtcgaactccggcgcctccgcctacctggccttcatgacagcgctgcgtggtggcgatggcccgttgactgaagccgatctggccgacgaccaactgaagacctcggtcaccaagctgctgtccggcgtggaccgttcctccggctcgtcggactggcttaaagacatggtcgtggccaatcccgaccgcttcgacgcgatggtcaactacgaatcgctggtcatccaggccgacaaggccttggacaaggacggccacgacccgctgctcaccgtctacccgtccgacggcatcgccgtctccgattcgccgttcggctacgtggatcgcggccagaaactgaagtccgcgttcgattccttctccaaagcgctcggctccaaagacgccaaactcgagttcgagcgcgccggccgccgcaccgggctcggcggcacactcgcctacgccacggacagtcaggtcaagcagtccttccgcgccgagtggggcgtgaatacggacgcctccgcgctgaaaaccatcccgctacccgccgccacggtgatcgacagcgcgctcaacgtctaccagaccgcgctcaggaaacccagctggaccatttgggtggtcgattactccggttcgatgtctggagagggcaagaacggcgtggtcaaaggcctgaacgcggcgctcgacccggaccaggccaagaagtcgtacatcgagcccgccagcggcgacgtgaacattctcatcccgtttgaaaccgaggcccaccgcccggtcaaggccactggcacaagcaccagcgacctgctgcatgaggccgatgccaccgatgccagcggcggcaccgatatctatgaaggcctgctgagcgcgctcgacgagctgcccagcgagtcggaagcctcgcaatacaccaccgccatcgtgctcatgaccgacggccgctccaactccgatcatcaggacgaattcgaaagcgcctataagtcgcgtggccgtgatctgccgatcttctccatcatgttcggcgacgccgatcccagccagctgaagtctctcgccaccctgagcaacgccaaggtattcgacggccgctccggcgacctcgccgccgtcttccgccaagtcaagggcttcaactgatgctccaggtaatctgtggattcgttgtcggactgctgctcgccgggctcggcttcgggctggccggcggcggagtgcccggcctgatcgtggccgtggtgctggccgcactcgggtatatcgccgcctccacgctcaccgagccggagcgacgcatcggcaaaatgctggtttccgccctgcccaacggtcagaaggccgccgatacgatcgacgcggcgaacgctcgactcaactcaatcgccatgctcaccaagcaagtacgtgacccagccgtcaaagccgaagccaatgacttcatcgccgctaccaaagatttagtgcaatacgtgacccgagacacctccgcctacccgacgttgcgccactacatcaccgtgtacggcgagcagaccgagaaactgttgcgctcctacgtggacgtggaaagttccggcgcacgcgatcagatagccacggcacgaatcgaaaccatcgaggcgctgcaagtgctcgaacagaccgccgccggcgaactcagccgggcggtaagcgccaagacgttgggcattacggccgactccgacgccatccaacggttggcccgcatggatggatacgacgacgtcgcaccttcgcctgtgccttcctcggctgccgatgaaggacggcatgcacccagtcagggcccggctcaccagtcggaccagaaaacggacgcacaatgaaactctccaaatcaaaaatcatcggactgatcgccctgcttgcggtagtgggcgtggtctgcggcacgctggtgtggcggcaatcgcagccagcgccggccgaaccgaccgaacaggtgagcatcaccggctacctgggcggcgagaaaatcggcctgttcgatgacgccaagttcaaggcgcttgccgccaagcaaggcatcgccatcgactatcgcaaggccggatcgctggccatgatggatgcggaccggaaaggcatggattacctgttcccctcctcgcgcgcggccgtcgaatacggcaatgcgaaaggcgtcaaggccacccaaagcgacatcgtcttcaactcaccgattgtgctgtacacgcacaaggccgtggcggacgggctcgtgaacggcggacttatgaccaaggacgattcgggcgcgtaccacatggatatggccaaagccgtggacgcgatggtcgccaacacaacctgggccgacgtcggatacacggcaggctacgggcagttccgcatcgactcgaccgatccggtgaagtcgaactcaggcaacgaatacgcggcgctgctcgccacggtgctcaatggcgggcagccggccacggtcgattcggtggcgcgcgacggcaagaccatcgcctccatcttcgccaaatccggttggatggagacctcttccgaggattcgttcaaccagttcctgaccttgggcgtgggctccaagccgatgatggtgggctacgaatcgcagctgcttgatttggccgtgaaccaaccggatgcgttcaagcagatcaaggacgacgtggtcatcgtctacccgacgccgaccgtgtggagcacccacacgctgatggccttggacgagaaaggcggcacactgctgaacctgttgaaaacaccggcggtgcagaagctggcgtgggagcgccacggcttccgcgcggccaacttcgccggcaccgattcgatcagacgattcggcgtgcccggcacgctcgaccagatccccgccgtatccgaactgcccaacaacgacgccatgcaacaactcatcgccaccctccaatccacgcaataactcttttgccagcccccaatcggtgtttttattaaccccctctgacgagctgagtcgtatagcaaacagcccagtgggctgtttgtagacgaaggcgagcgagagcgagcaaataagaaatcggctgtaagccgtccttaattgcgttcgggctcccggcaaagccgggtggggggagagacccaaacataactatcaaaaaaggaaccagaatgccccaaaacatcaccctcgcagacctcaccaaaagctccgcaacccccatcaccaacccgttactcaacaccaaccaagccgcccccaacaccaccctcgtccccaccgccgccgaagcccaagccgccgcggccctgaccccggaccagcagatcgccaaattgcccgaagccgaccaggccacggtcaaccagatggccggccagatcgacttcactcgcgacggcatcgaatccagctacggcaaggatgcccagcgcgccacctccaccttcgccgacgaaatcctctccgacacccgctccaaagacaccggcgaggcgggcgaactactgaacaccatgctggtcaccattgacgaggctgacctcggcggcttccgcaccattccgatcatcggccaggtggccgtcagcgtggataagctgcgccgccgctatcagaaagtcgacgcgcaaatcgacgaaatcatcgtgcgtctcgaatccgcgcaagccaaactcgtggccgacatctccatgtacgacacgatgtacacgcagaacgcccagcaataccgcgagctgaaaatgaccgtactggccggcaagaaggcgctcgccgacttcaacgccaaccagctgccagcgctggaggccgaggccgccgccagtggcgacgccatgcaggcgcaagtgctgaaggacttcaagtccaagctcgaccgttttgccaagcgactcgacgacctcgaccgcatcagcgtggtcaccttgcagaccgcgccgcagatcaaaatcatccagaacgcggaccagaccatcgtggacaagatcgacaccaccatctccaccacgattccggtgtggaagagccagatggtgatcgcgctgggcctgtccaaccagcgcaaggccctcgacctgcagaacaaggccgacgatgtgaccaacaagctgctggcgcgtaacgcggccgccctgcacaagggtgcggtggacgcggaaaaggccaaccagcgttccgtggtggaaatcgacacgctggagaagatcaacgccgaactcatcgccaccctgaaggagaccgtgcagatccagaaggaaggcaaggccaaccgcgaggccgcccaggtcaagatgcgccaaatcgagtccgacctcaaaaacgccttgctcgaaaacgcccggcagatgtgagccgttcgcgcgccagcatgctcccgttggcagaggtatatgagtacgcctactggtgtgcgtatatatgctcccgctggcgggagctggcagccgtaagactggctgagggtggtcacggcgctcggctcggccggctttaccggcaaccattccccgccgcaatttctctgtgggcataatcccggaatgattgccgcgctcgggaattgggtgaagtgaaggttaaaggttgagagcccgggagggttccggaaccggccacgataaccgctgctagccccgcgatacgggttggcggccggcatccaagccgattctctcctaatcaaggagtaccgattatggcaatgtttccggctttgatgaatgacacgatgttctcggatctgttcgatgatccgttctttgagggttggcgcaacacggacaacacgatgagtgccgcaatgcctgccaacatgatgaccaccgatgtgcgcgagaccgacaagggttacgacgtcgacatcgatatgcctggctttaagaaggaagatatcaaccttgagctcaacaacggctatctgaccgtgtccgcctcgcgttgcagcgagcatgaggacaaggctccggccgctgagggcgaggcttccgacagcaagtgcgcttgcgcgtccgattcgggcaagtggctgcgtcgcgaacgctacatgggctcctgctcgcgtagtttttacgttggcgaggacgtgaaggagtccgacatccacgccagctaccggaacggcacgctgtgcatccaggttccgaagatgcaggcccagccgcaagtcgagtccaagcaccaaatcgcgattgagggctgacgatacttgattcgtcccgaagtcccgcttcgagtagctttgccccctctgacgagggagctcccgcgaagcgggtgggggagagataaatcgtaaccaaaccatgcttcccacgccgcctgccctacgctttcaacgccgactaacctgacagacggcgggaaacatagccaatgcaaatgccgagtagggatttaccctacccggcattttgctgtttcaatcaccgaaccccaccctgttcgcgcaccggtcgtgtgccgttctgcagctgtacacatccgatgagtagaatgccttcgaaacgaggcaagagaggcggacatatggcgaacggcgcacagaacgcaagcggcacgccggccccggcggcaagccgttccggcggccacgtcgtatccgcgcgcgccacgaccatcggcctgatggcgatcctgctgtggagcttcatggccggcaccgtgcgcatcgtctccgaaaacttcggtgccacgcttggttcggccctgatctacacggtcggcggcatcctgctgctgatgttccggcgcccggccccgattcgcgagttccccaagaaatacttgattatcggcggcctgttgttcgtattttacgaatcgtcgatatccctctcgctgggtctggcctctaccgacgcatcctcggtggaagtgagcctggtcaactatctgtggcccacgatgatggtgctgctgtcggcaggcgtatctcatcgcaagcacgcggtcgtcaaggtgctgccgggcgcgattgtggccactgccggcgtggtgctggcggtcggcggtaattccgggctcgactggcatgcggccgtgcagcatatcgccgccaaccctttgccctatgcgctggcgttcgcgggcgcgctcgcttggtcggtgtacgcggtgttcacgccagccatgagtcatggggtggacggcacttcattgttcttcccctgcgtggccgtggcgttgtggattatccacttcgcgtccgggcaggggtggccggccgagccgccgagtctggtcgcatggctgtttgtgttgattgccgcggcggcgattggcggcggttatgcctgctggggctatggcattctgcatgggtctatggagcggctggctattgcgtcctatgccacgccggtgctgtccaccggggccagtgcggtgctgctgggtttggcgctgtcgctgccgttttggtgtggcgcgctgctggtggccgccggatcggtgctcaattacttggtcagtgcgcgcaaatagcggggtggctttgctcatggggcggtaaaaccctcatggggcggtatcccaaaatggctttattctgccgtttcacaatttcttcaaaccgccccatgggccttttaccgccccatgggtaaattaccgcccgatgggcagcagcaacttactcgccgcggcgctcggacgggcggcgaatcgggtcaagcagcgtattcggatcggagatgccgaacatgctgcgcccgccggtggattcagggtgcttggcgagaacggccagcgaaatcacccccggaatcataatgatcaccgaaagggccgccaatccccagttcacgaagaatccgagccccagtacgatggccaccacaaccaccaccgtgacgataatcgtcaacagtgctcgacgtgggttggtttccctggtccaagaggtgctggctgcgggttttgctgttgaactggccgcggcgtttgtggctgttgtgccatcagccgtgccggtcgtgggccttgccgccgcgctcgtcgcggggtcagtaggggcgtcagacacgttatcggcgacattgccggtcgctgctggacgttgttcgtttgcgtgagtcatatccaccaacatattccctgcttccggctaaagctgggacaagcctgcgcaccgctaatccagcgccgacactggccttgagctgcggacgtccaggccggatgtgaacaggagctgaacggagtctggggaaaccatgagaactcgcgacaatttttgtgaaattgggtgacgctctatgaatcgcgcgctagtattgcgtgagcttacaagacgaggagcctggagcgcggggacgaaggatgaagaactccgtttggaagacgttcatggaattgtcgctggtccgcggaatcgtgccgtggaccgtgttcggactgaccgcgatcgcggcaatcatactgattgttgggctggcattgagcaagaagcgcggcccggcagcagacggcctggcgccggacggcgaatcgtcggcccaatcgcccgtcgacccagataaccagccggccaaccagcctacgaacgcggctgctacggcgtcatccgcagcttcgacggaagagacgtttatttcccatggcctgcgtacgccgcaacgtcgtcacttgcatccgctggtcgcctcactggttgccgccgcgctcgccggcgcgggcggactactggccacatggctgatgtccgacgtgttcatggtgttcggcgtatcgttgggctggccggtgatcctcaccgtcgcgggaggcttcgcgggcctcggcttcgtgctggccgccgccgtgacgttacggggggcccgtcgcgcgctggccgtcgtgctggtgccgctggtgctggcgtccaccgcgcttggcgtggactcgatctacggcgaataccagaccatcggcagtctcgtcggctatacgccataccccccgctcggttcggtcaccgtgcgcaaagcctcgatgagcgtcggcgagtggcgcgacaaggcgcgcaaggacgctctgccatccatgcccgactcgggcagggtgttcgtcgtcagcatcccgaacaccgaatccaagttcaaggcgcgcaaggcgatggtctacctgccgcccgccgcgctgtccgaccgcccgccggccctgccggtgatggagctgctcgccggtcagccgggcagtcccggtcgcctcatcgacgccggcaacatcgccgccacgatgaacgcttacgccgccgaacatgacgggctggcgccgatcgtgctcgcacccgaccagaacggttcggccatgcacaacagcctgtgcgccgacaccacccgaggcaacgccgaaacctacctcaccaaggacgtggtgaactgggccagggcgacgctgccggtagccaagtcggcccgtatgtgggcgatgggcgggttctcgcaaggcggcacctgcaccacgcagctggtgccgcgtcaccccgacatctacggcgcgatgctgccggtggatggtgagctcgagccgaccgacggcagcgtcgagacgatggtccggcgatatttcgccggcgaccgcaaggcctacgacgggcaggtgccggtcaacgccatcgccgccaccggcacggccggccaggcgctgttcgccggcgccggcaaaggggatcggaagtcggtcgccaacatgcgcaccatcgccgcggccgcgcgcgcggccggcatgcagaccaccgaactggtcgtgcccggcgccgaccatgactggcatgcggtgcaggcggtctggaaccccggtctcgactggttcggcgcgcgaaccgggctgggcgaaatgacgaaatcgttggaggaatacccacaagtggaggtgttgcaatgagcgaagaacaacagcatgggaacgcgcggccggcggccatgccgcagacgcggcggcccctgcgggacgcggaaccctcgcggacgaagcccgccacgacctcccgcgccaccaaaccgcatacggcaaggtccagccatgcggcggaaagctggcgtgaactggccggtgacgtgcggcagtgggcggacgaccaccggctggccgtcaccgccacggcggcgctggtggcgctgaatctggtggcgtggctggtggccgcgatggccggattcgcgtttccgctgcggctcagcaccagcatggccgcattcaacgccggcaaactcatctgctcgctgttcctggcgcgcggcgtcatccaactcatggtcgacgccgtcctgtggctcgtcatgctgtcgatagccgaaccatggctcggccgtgtgcgcaccgtcgtcaccgcgctcgcctgcgcggccggcggcgtgctggcgggcctgaccctgtgcgcggcggccggatggatgttccaggactccctgttcgtctcccgcatgcggttcgcattgagcccgctggtgttgccggtcggcgcgctcatggcggccagcgcgttctgcagccacctatggcgcaggcgcatccgactcgtcggctatgtggcgatcctggtcacgttgctctacagcggcaaccccagcggctactgcatactcgccgccgcgctgatcggccatgccgccggccgtgtgatggccggtccgcccgcgcacgtcgaagccgaatggcactggctgcgcagcacctccttcgaggcgcggcgcatattcgcggccatcgccgtggtactggccctggggccggtcatcgccatcacctcccataaccatgcgggcccgctcagcacgatcggcctgctcatgagcccggtttccgtcgacgatggcatgctggccaaatgcctggccggtgacacgcacggcggctgcttcctgcagttcgatctgctgcgggcctcgatgcccggcgcggtgttgcgctcgttgctgcccaccgccgtgaccctggtgctggcgtggggcctgtatcgcggacgtcggttcgcggccatctgcaccgtggccatcaacctgttcacggtggccatcgccgtcgcctactatctggtcgtgccgctgagcttcgcgccggacggcatggcctccctgctgcagcacggcgcgatcgtggcctgcgtggcgaacgtcctgcccccgctgctgttcgccatcgccctgctggcggcgatgaaacacttcccgatccgcatcggctggtgcaggctggtcggcggcatcggcgccatcgtgctggcctggctggcgtgcgccgccatatacctgatatacggcatcgcccaacccgccaccttctcgccacgcgctacggcctcgtcgctgctggccgagctgccgggacgcttcctgcccatcggcttcctgagccatatgaagctgtcgttcgtgccgcgcactccgatggcctcgatcatgtaccaaggcgtcggcctggtgttctggatcgtggtgctggccgtggtgatccactggatgggcgacgtgagcgaatcgaacgagcgggcccgggcgcgcgccgaacgtctggtcgaaaccggcggcgaatcgatgagcttcatgaccacgtgggaaggcaacagctactggctgtcccccacgggcagatcggccgtggcgtatcgcgtgctcaacggcatcgccctgacctgcaccggaccgttcggcgatccggcggaatggatggacgatctgaatggtttcgcccagcactgtgcggaacgttcgctgtcgccggtgttctacggcgtgcatcgggaacagcgcgacgcgttgctggaagccggctggaactccatcgaggtcggcagcgaaatggtggtcgacccgcgcggctggaagacgaccggcaagaaatggcaggacgtgcgcaccgccatcaacaaggccaagcgcgacggcgtgaccgacgtgcagtccacattcctggaagcgtcgctcgatgtgcgcgaacagatcgaggacatctccgaggagtgggcgcagctcaaggcgctgccggaaatgaagttcacgctcggcggcgtcgaggaactgcgcgacccgcgcgtgcggctgctttacgccatcgacgcggacgggcgcgtgctgggcgtcaccagctggttgcccacctggcgcgacgggcgcatcgtcggctggacgttggatttcatgcgccatcgcaccgacagccccaacggcatcatggagttcctgatcgcgcgcatggccgagcggctgcgtgacgagggcgaagccgatcccacgcacgccgtggagttcatgagcctgtccgcggcgcccctggccggcatgaatcccgatcgggacaacgccggggaggacggggcgccggccagcgaaggcacgcaggtgctccaacacgcgctgcagatcgtggccgactggatggaacccgcctacggcttccactcgctgttcaacttcaagcgcaagttccagcccaccgaagcgccggtctacgtgtgctacccggacccggcggcgttgccgcagatcgggctcgcggtggtgcgcgcctacgtgcccagcgtgacggccgccgaagtggccggcatgctcagcacgctgcggtcgtgaaggtgtgcacacgggtacgcaggttagccgattcgagcctgagacggggtatctgctttcagagaggtacatttggccccttgcggacaactaactgccttcaaagaggtgcctgaactctgaaatctcgagtatgagcgttgcaatgacaacgtttgtactcggggtttcccgtattcggtgcctctttgaacgaagatagcattctgcagaagcccgaatgtacctctttgaacggagaaagcctgacaaggagggcgcggcaagcgctatctccgtttcgaggggctgatttggtctctcccggaggtctactcccgtttcgaggggctgatgccgaagtattcacgctccaaaatcggcggaatggcgttggcgcggatgggtttttacatgcggtctagcggccgaccagccccttgaaacgggagtagacctccggcgggggtcaaatcagcccctcgaaagcgggtttgccggtgcagaggtgtcgttgactgcatcgcgagccgcctcgacgtagtaacgtggggcgtatgagcgaacgtaacgaacacaatgacggaaatacgcaaaccgcatacttcgccggcggctgcttctggggtctggagcgctacttccagaacgtcgacggcgtcacggacaccacggtcggctacgcgcaatccaccgtcgaatcgccgacctacgagcaggtatgcgcgggcggcaccgatgcggccgaaaccgtaaaagtcgagtttgacccggcacaggtcagcctgcggacgctgacattgctgttcctggaggtcatcgacccgttctccgtggaccagcagggcgaggaccgcggccggcagtaccgcaccggcatgttctacacggacgagacgcagcgcgccgtgtatgtggcggctctggagcagctggtcgaccgccagccgcagcgcccggccgtactggtcgaaccgctgcgcaacttctacccggccgaggcacaccatcaggactatctggtgaacaaccccggcggctactgccatgtaccgatcgccgcaatcgcgaacgtaaaacgccgtcagaagtacgtggaacgcatctgggatctgacgcttgagcagttcgcggtcacgcagaacgccgctaccgagcgcccgttcgtcaacgagtatgacgaggagtttgagcccggcatctacgtggacatcgtcagtggcgaaccgctgttctcgtcgcaagacaagttcgattccggctgcggctggcccgcgttctcccgcccgattgccggtgacttgctgaccgagcatgaggaccatcgcattccgggccgcgaccgcatcgaagtgcgcacgtcggacacacagattcacttgggccacgtgttcaccgacggcccggccgaccgcggcggcctgcgctactgcatgaattccgccgccctgcgcttcgtgccgcgctcgcgcatggccgaggaaggctacggcgactggattgcggttgtggatggggatgatcaggcatgagcatggagaatatcgcgggcgctcgcaagcccgccaagcgtgaggatgagcacacggtcgccggcgagcatcgcatgatgcgccgtgcggaccgtgaggtgaccgatcccgagcggatcgccgcgatcatcgccgcctgcgacatcgttgaagtggcctatgcggatgccgagggcctgactatcgtgccgctgaatttcggctttgattacgacgaggcgactggcaagctgacgctctggttccactccgcgccgcgcggccgcaagctcgacgcgattcgcgccgccgccggtggccgactgcccgtggctttcaccatgcagaccgactgcgaggtggtggcgggccgcaccacgtgcaattggggtgaggcgttcaagtcgatcgtcggcaatggcacggcgtcactggtcgaggatctggatgaatgccgccacggcttgcagacgctgatggcgcagcaggcgcatatgccgaatgtggaattcactgatgcgcaggtccgcagcgtcacggtgtggaagattgagtccgactacttcaccaccaaagtccgcaccaaacccgtgcccgcacacatgcatcagcgttagccggggatagcgcgccacctccccactggcgggaggcagcgcgcagcgccggtggatggcccacgtccggacccgatagacttgccgccatggcagcagtgacagtggtaattaccagctacaatcagggcccgttgattcacgaggcagtcgagtcgtcattggtcccagacggttcgtccggaacggatcatcatcgtgaacgatgggtccgatgaccacgcatccgtcgagatgctgaacgccactctcgacgattgccggcacggggcgatggatgcgaatggtgtggccatcgacctcatcggccagacaaacgccggtccttccgccgcgcgcaaccgtggcatcgccgccgccgaaacgccgttcgtagtggtgttggatggcgatgaccgtttgcggccggccttcattgagcgcacgttgtcgatgttgtccgccgacaaaacgatggtcgccgcatccggctggctgcagactttcggtgtcctggaatcagtggtccagccgactggtggcaatgccgccgcgttcgtgtcgcataattgctgcccggccacgtgcatgattcgccgtgtcgcgtgggagtgctgcggcggctacgacgagtcgatgcgcggcggcttcgaggactgggacttcttcctgtcgttgttggagcgcggattgacggtggaaaacgatatctgcggtgctggggttactggcggtactgagcatgtcggaggttttgggagtgcctgggatacagagaatcccgcaaaagacgcggcccatatcggcatcgcccccgagccgctgatcgagtaccgcacggccccggcctcctcaaacgtgaccagcatgaccaagcgcctcgatctcatgcgcttcctgatcgccaagcaccgcgatctctacgccgcgcacatcgccgacgccatcctcggcgttgaagccatctccatgagccgcttaaccatgtgggaatcgttgatgtgcggtgacaccaccgccagccaagccttcatgctccaccccacctacggcgacggtggaatggccgccgccgtacgcttgcggagttgagaggcatcagctgaccaaatgccgatagagctccggatcgattggccgggccaaccgcaggatcgacagcgtgaccttcacgctgccttgtccgcttgcgtcaggtttggtggtgagctgagggttgtcaaacgcagcaacgtggccaacgtagtagtacttaccctcggcctcttccgccttgcgcataacgaataacgggacgaaatgcgtctggccccaattcgggccaatgccgttaagcgcccattggaattcgggagactgcggagttcgtccattcttgctgaagtatttcatttcctgtgtgctcaggaattcatcttcgtattgacttgccgcgtatttcacgaagatgggcatggtattggtttccttgtcgaggaggtaac

SEQ ID NO: 3766 - DNA, 2652 bp, Unknown
  R35_2m  MAG No. k141_916
cactcggagcgttccggcaacggcctgtacgtcaacgtgcccggcaacaagtaccagccgatcttcgaggccggcgtggaatacttcgccgcctgataatcggcgcgtatcgcgtctgatacggcacacagggaaggaactctcgggttccttcccttttttgttcatgccggtcatgggctaaggttggggtgttcgcactaccgaatccgccgctgaaaggacctgtcgtcatgccgatcaacgaggcattgttcgccgcgatgaaggccgccagctacatcaagcccaacgcgggcaagtcgtacaaattgcagcgcgtggcggaagagcttatcgccaagcaggcacccgccaatccgaaatgccgtgtcgaggacgccttcgcgcctatggcggatggatatgccgtaccattgcgagtgttcacgccgctggtcgcctatggagcgcccctgcccgaagccctggaggaatcttccgccaatggcacgccagtggcctcggcaatatccgcgattctgcccgccgtattacccaaagtcctacccaaaatacccatcaaggaaagcacgtcgagcggcaacaccgacggtatttccggcaatgccaacacggaacttccctcagtcacgccgcgtggcacgatcctgtttttccacggtggcggttggaccacaggcggcatcaacctgtacacgcaggcttgcgcgcatatggccgtacgtctgcaacgccgtgtgatctcggtcgagtaccggctggctcctgaataccgcttccctactgctgttgagaattgctatgaggtagcccggcagctgtttgctggggaattgccgatttctggggtgggtggttctgttgatgttgaccacccccagtcggctgcgccgacagcccccaccggcgggggcgatatatctgcgacaatcccagcaccggatcccgacagcatcgtgctgtttggcgacagcgcgggcggcaatcttgcggccgccgtctcgctcatggcccgcgaccgcggcgagttcatgccgcgcacgcagatgctgctttacccggtggtcggcaacgactacaatcccgagaccagcccgttcgaatcggtgcggaccaacggcaccgactacatcctcaccgcacaggacatggccgactacatcgacatgtaccgttcgtccgtggccgacctgaccaatccgtatttcgcgccgctcaccgcgcatgacctgagcaatcagccgcgcacgctggtgttgtccgccgaatactgcccgctcagagacgaggacgaagcgtacgcccgtcgtctgcaattggtgaacgacaacgtctcctgttaccggattcacgacggcatccacggttatctgctcaacacgtcggccgtagggctggtgtccaccacttaccggatcatcgagcatttcctcgacgacacaccgctggtgccggctcccggcaccggcaccaccgccaacgcaccggagggaggcgacgcatggcaagacgtacttggtaccgactagacaacatcggcaagttctactcctcccaggctggccgctcctcgcagaccgtgttccgctattcggccgagctggcggacgacatcgccccggacatcctgcagcacgcgctcgaccatgccatcgcccggttcccgagcttcaacgtgcacctgctcaacggcatgttctggcattacctcgaacagtcggatgataagcctcgagtggaaccgggacatctgccgatatgctcgcgactgcattacggacccaaaagcatgctgttccgcgtaagctatttccgcaatcgtgtcaatctcgaggtctcgcacatcatttcggacggtcgcggcgccatcaacctgttcaagtcactgctgcacgcctacattgccgagcgatatgacgtgccggatgtgccttcggattacgacggttcggatagcgacaaagccgaaaacagcttcgacaaatactacgagaaagacaaggccggcgctgcgccaggcacgaaaatctaccggatggccggccccatcgaccgggccgcgcctacgttcatggaataccacgtcagcgccagcaaggtgcttggtgcagcgcatcagtgcggagtgagtctcacctcctacctcatcgccgcgatactgtgcgcgattcgcgacgtcatgccctcgcgcgcccgcaatcgcgcgattcgcgtggatattccggtcgacttgcgcgccttcttcaggtcggagaccgtgcgcaacttctacggcatgacttacgtggcgtacacgccggccgatatcgaagccgatgaggactccgcgaaaacttccgcaacgggcccagacgcgaccggcgacggccagcagtccgtcgcccgcaccgcgcacggcaacggtatgggtggattgctgaccgatgagccgttggccgacatcgcccgccatgtgcaggagcagctcgaccatgccaccagtcgcgagcgcgtcgaatcgcatatgaaccgcatgattgcgctggaaaagaatccggcgctgcgtctcgcgccctcccctgccaaggactgggtgctggagctggcccggttcatcgccgaccgcgagaccacgaccaccgtctcgaaccttggccgagtcaccttgga

SEQ ID NO: 3767 - DNA, 2789 bp, Unknown
  R35_2m  MAG No. k141_967
gatgagcaccttggcctgcatgtcgatctcgtggcggtcgagggccatttcggcctcttccagcgaggagaacacgcggccctggcccttggcgccttccagcacggtggacaggtagtacagaccgaggatcatgtcctggctcggcatggtcacggtgtgaccgtcagccggcttcaggatgttgtcggaagccatcatcagcgagcgggcctcggcctgggcttcggcggacagcggcaggtggactgccatctggtcaccatcgaagtcggcgttgaaggcggcgcaggccagcggcggcagatggatggccttgccttccaccaggatcggctcgaatgcctgaatacccagacggtgcagcgtaggtgcacggttgagcagcacggggtgctcggagatgacctcctcgagcacgccccacacttcggcgtcgccgcggtccacgagacgcttggcggacttcatgttctgcgcgtagttcaggtccacgaggcgcttgatgacgaacggcttgaacagctcgagggccatcggcttcggcagaccgcactggtgcatgcgcagggacgggccgaccacgatcacggaacggccggagtagtcgactcgcttaccgagcaggttctgacggaaacgaccctgcttacccttgagcatgtcggacagggacttcagcggacggttggaggcaccggtgaccgggcgaccacgacggccgttgtcgaacagggagtcgacggcttcctgaagcatgcgcttctcgttgttgagcatgatttcaggggcgccgagctcgatcagtcgcttcagacggttgttacggttgatcacacggcggtacaggtcgttgaggtcggaggtggcgaagcggccaccgtcgagctggaccatcgggcgcaggtccggcgggatgaccgggatcacgtcgagcaccatggcctccggcttgttgccggtggtcaggaaggcgttgacgaccttgagacgcttcagggccttggtcttacgctgttcggaagcgtccttgatctcctcgcgcagttccttggagatggtctccaggtcaagggactgcaggcgcttcttgatggcttcggcgcccatgcagccgtcgaagtaatcgccgtagcggtcctgcatctcgcgccacaggtccacatcgtcgaccatgtcgccgggcttgagcttcttgaacttgtcgaagacggcgtccacacgggcgatctggtcgttgtagcgggtgcggatggcggccatatcgcgctcggcaccgttacgcagcttggtgcgggccgggcccttggcctcgccggcctcctcaagggcggcgagatcctcttcgaccttcttggcgcgggcttcgatgtcggagtcacggcgctgctcaaggcgtttgatctcggaatcgaactcgtcctgcaggccgggcagatcgttgtgacgctcgtcctcgttcacctcggtgaccatgtaggaggcgaagtagatcacgcgctccagatccttcggggtgacgttcagcaggtagccgaggcgggaaggcacacccttgaagaaccagatgtgcgtcaccggggcggcgagctcgatgtggcccatgcgctcacggcgcacgcggctgcgggtcacttcgacaccgcatcgctcgcagacgatgcccttgaaacgcacgcgcttgtacttgccgcaggcgcactcccagtcacgggtcgggccgaagatctgttcgccgaacagaccgtccttctcaggcttcagcgtacggtagttgatggtttcaggcttcttgacctcaccgtggctccaaccacggatgtcatcggcggtggcaaggccgatgcgaatcttgtcaaatgcgttgacgtccagcacttgttaatccgtttctgttcttgagaccttcccaagctccccttgtcaggggagctgtcagccaaggctgactgaggggtagtgcaaaccggaaaggtctctgtacgttatctatttcacgttggcggggctacacgcggcgtattgaccgcatgcagcccgagggatcactggtattcgggctcttcggccttctggtcttccttggcggccgcgtcggggcgggcgccaatgttgaagccgaggtcgtcagcggagctggccggatcgtcatcctcatccttcatgtcgatggccacgccttcggcgttgagcacttcgacgttcagggacagggactgcatttccttcaggagcaccttgaacgactcagggatacctgccggcggcaggttatcgcccttgacgatggcaccatagacgcgcacgcggccgtcgacgtcatcggacttggtggtcatcatctcgtgcagcgtgtaggcggcaccgtaggcctcaagggcccacacctccatctcgccgaagcgctggccaccgaactgggccttaccaccgagcggctgctgggtgatcatggagtacgggccggtggagcgggcgtggatcttgtcgtcgaccaggtggtgcagcttcagcatgtacatgtagccaacggaaatcggcttggtgtacggctcaccggtacggccatcgaacagggtggccttgccgtcggggccgaccagacggtcgccgtcgcggttcggcagcgtggtggacagcagacccttcaggacctcgggcttgacaccgtcgaacaccggggtggcgaccggggtgttcggctcggccttctcggcaccggacggaatcagcttcttccactcggcttccagattcggatccaaagagatgtcccaaccggagtgagc

SEQ ID NO: 3768 - DNA, 9632 bp, Unknown
  R35_2m  MAG No. k141_994
gtcgtacgccttgtcgatcatgtcgagcgacttgaacaggttgatgatgtggatgccgttgcgctgggtgaggatgaactgcttcatcttcgggttccaacgacgggtctggtggccgaagtgcaggccagccttcagcatatcgctcatagtgatctgagccatggtattactacctttcattgtcggttcttgcctggccatgcgcacctgcgtgcagctgctcccccggtttcacgagttgtgcagccgaccgacacaggccgtcgcgagcatgacgcgaatttgttgtgtgccggttgacaatattgggtggttccggacgccagcgactgtgtccgttgccgggtggcacacaaatttcaaggatagcacggagccggtactaagaaaaacaggctcccctctctgaggggagcctgtcgccgtaggcgactgaggggagttacgggcggtaccggcagaaccaccctcagtctcactacgttcggcggctcccgccagcgggagccgggtatggactacttcgcctgacgattgcgcatgtagcgcagggcttcgcggcgttcttccttttccaggcgatccaaatacacgtggccgtcgagatggtcgcattcgtgctgaagcatacggcccatcagcccggagccctcgagcacgacctcgttgccgtccaggtcgatgccacgcacgcgagcgtagtcggcccgacgggtcttgtaccacaagccgggcacggacagacaaccttcatcgccatactgctcgccggacttctcctcgagtacggggttcagaacgtagccgaccttgccgtcgatgttgtaggagaaggccctcaggctcacgccgatctggttggcggacaggcccgctcggcccggatcgtccacggtttccagcaggtcgtcaaccaggcggcgcacggccggggtgatttccttgatctcatcgcagggggtgcgcaggactgggtcgggcacgaccctgatctcacggatggccacttctcgttactcctcgttcttctcgtcagccggctggtccggcttgctgccggtgtcagcggcattgtcggcattgtcggcggaatcgccggtctcgccctcttcgggttcggccttcgacttcttgatcttctccgacacgctagcaatcgaatcagacacgctggttttcatctgttccgaggcctgtttgacctgttcggacgcctgcttgaccgattcggaggacttcttgacggtctccagcgtgctgtcgatgatcttggcagtggcgggcagcggcttgttggatggcttgggcgcgtacagatcctcttcgatgacggtggcgtagcgctgcaataccttgggacgcaccactttcatgctcggggtgagcgtgccgtgctcctgactgaattcctcatccagcaccgcgaatttgcgcacggactcagcgcgggagacattggcgttggcctggtcgatgtactgctggataaaggcgcgcaccgcgtcgttgtcgctggcctcggcgagtgtcatgtcggcattgaggccctgaccttccagccaggaatgcagcatttcggggtcaagctcgataagtgcggacacgaacggcttgccgtcgccgactactactgcatgagccacgatcgggcaggtgtcgatgacatcctccatcggggcggggctgatgttcttgccgccggcggtgatgatgatgtccttcttgcgtccggtaatgaaggtgaagccgcggtcgtcgatacgacccagatcgccggttttgatccagccgtcggcagtcatcgtctgtgcggtgagttcgggctgcttgtagtagcccaggaacacgttcgggccggtcagctcaatttcatcgtcttcgccaagacgcacgcccatgccaggcccaggcttgccgaccgaaccgacctcgttgtcgtcctcccaattgacgagcatcggagcggcggtttcggtcatgccataaccctggatgaaggtgatgtcatccatgccgttgaagaagtgggccaaatccacgttgagcggcgcaccaccgcaggccagccatttgaggttcggtccgagagcggaacgaatggatttgcccaccgtggccatgtagaacgaatggcgcatgcgctcgatgaacgaatggccgcggccggcctgctcatccttgctccacttgacgaagtgcttgaccgactgggcgaagatatgcccctggatgccggcaccagccttctgcgaggccgcgttatacaccttctcgaacacacgtggcacgcccagcaggtaggtgggcttgaagctgcggatatcggcgagcagtcgcttggcgtcgggaatgtatccgaccacgccgcagccaccgatgcacacatactggatgtagcgggcgaagcagtgcgccagtggcaggaacagcagcagacggttgtcgtcgtacagcatgccacgcagaatctcgtagccgttaagcacgatgtgcgtgtaattgcggttggagagcatcgcgcccttgggcttgccggtggaaccggaggtgtagaccacggtaagcagatcatcggctttgatacgagcgatagccgcatccaacgtctcatcggatacgccatgcccgaagtcagcgacagcgtcaaggccatcggccttgaaattgaacacgtatttcatgcccggatgattgacacggatctgctcaagcgtctgtgcgcgctggaagtcgccggcaaaggcgatggcgggatcgacttcctcgacgatgcccgcggtctgacgggcggaatcggtctcatagacgggcacaaccacagcgccgattgccgcgcaagcgaaatcagccacaccccactcatagcaggtaggcgagtaaatcagcaccatggtgccggctttgacgccaagtcccaacaggcccttggccacctcgcgtacgcgggacagcatttcagtagctgtggcgccgcgccattggtgggtgttgtcatcctgccattccgcgatgatgtcatccggcgtgcgagctgctcgtttggccagcagcgagtagacggtgtcgtcatcggtggtgacatatctgggttcttctacatgttcacgcatggtcactactataggcgaaccagcctatgacacggcagaaccgtcttccgctaccagcgtaggaatcggtgtgcgggcggggccgtctggtcagcccagatcggcatagatgcacatccatcgagaaccgatgaacttcagtttgaggttgactcgcagattttcctggccgatggtcatgaataccgccatttccagcgtgtccttgccggtgatcatgccgtcgatcaatgtggggacagtgggcagatagcagaatttcgctttgagctccggatgagtgaccatgtgggtgccgagcaggtattgcatggtttgcagccggtccaggcatggttttgtcatggctctgttgagatgtgcgacgctgagtttgccacgtatcgcgtccgccgatgtgcaggcgatgcggcatgcagccatggccatggaatgacattccttcgcattcagcccgcctatgaatgtgggttggatgtgataccgcaccgggcgatccgacagttccacaacgatgaatccgtcataactcggcaacggcccgtactgatatgtgccgtggaaaaatcccgaatactccatgatgaccccttcaagcccccttgcaactcaccatcatcggcgagcgtttgtactacaacatcacgaaaggcgcgccaagtcaaacgacttgagcgcgccttagggcaagctaagcctcctgcatggagggcaaacccccattttcaggggggtaatcgggattatcgtgcggaatacgggttgaccaccatgccgcaacgctggaagttcttcacgtcgacgtagccggtggaggccatagcgcgcttgagggcgccgatgaagttggtcttgccgtccgcctggtggctcggtccgaacagcacctgttcgagcgggccgaccgtgccgaccgtggtgcggtagccgcgcggcagcgtctggtggcgggcttcggaaccccagtgggtgcccttgccgggggcctcggtggcgcgggccagcggcgcgccgagcatgaccgcgtcggcgccgagggccagggccttgacgaagctgccggagtcgcccatgccgccgtcggcgatgacctgcacgtagcggccgccggattcgtccatgtagtcgcggcgggcctcggccacgtcggcgatggcggtggccatcggggcctgcacgccgatggtctggcgggtggcggagaccgcgccgccgccgaagccgacgagcacgccggccgcgccggtgcgcatcaggtgcagggcagcggtgtagttggatgcgccgccgacgatgacgggcacgtcaaggtcgtagatgaacttcttgaggttcagcggttcctgaccggaggagacgtgctcggcggagaccacagtgccgcggatcacgaacaggtccacgcccgcgtccaccacggtggagtagaactgctgggtgcgctgcggggagagcgcgccggccacggtgacaccggcggcgcgaatctcgtgcagacgttgcgtgatgagctccggcttgaccggctcggcatagatctgctggatacgctcggtggcctgatcggccggcagcccggcgatttcgtccagcagcggggtcgggtcctcgtaacgggtccacagaccttccaaatcgagcacgccgagcgcgcccatcttacccatggcgatggcggtggccgggctggtcaccgaatccataggggcgccgatcaccggcacatcgaactcataggcgtcgatctgccaagaggtggagacgtcctcggggtcgcgggtgcgacgggaggggacgatcgccacatcgtcgagtgcgtagccgagacggccctttttgcccaaaccgatttcaatttcctgagacatggttgtaagcctattgcccgggtgggacgccaacaaggtcgtttcccacggaccggacgattgcttcaagtcgttacaaacatgcgctatgactaaatcatcttcacaccatctatcaggaggaagcatggccaaaatcaaggtcgaaggcactgtcgtcgaactcgacggcgacgagatgacccgcgtgatctggaaggacatcaaggatcgcctgatcctgccgtacctcgacgtgaacctcgactactacgatctgggcatcgagcaccgcgacgagaccgatgaccaggtgaccatcgacgccgcccacgccatccagaagcaccatgtcggcgtcaagtgcgccaccatcacccccgatgaggcccgagtcaaggaattcggtctcaagaagatgtggaagtcccccaacggcaccattcgcaacatcctgggcggcacgatcttccgcgagcctatcgtgatgagcaacgtgcctcgtctggtgcccggctggaccaagccgatcgtcgtggcccgtcacgcattcggcgaccagtacaaggccaccgatttcaaggttccgggcgccggccagctgaccgtcaccttcactccggacgatggctccgagccgattcagcacgtggtctacaactacggcgaagacggcggcgtggcccaggtgcagtacaacgtcaacgattcgatccgcggtttcgctcgtgcctgcttcaactacggcctgatgcgtcattacccggtgtacctgtccaccaagaacacgattttgaaggcctacgacggccaattcaaggacatcttcgctgaggtgttcgagaccgaatacaaggacaagtacgccgaggccggcctgacttacgagcaccgcctgatcgacgacatggtggccagctccctgaagtggcacggcggttacatctgggcctgcaagaactacgatggcgatgtgcagtccgactccgtggcccagggcttcggttcgctgggcctcatgacctccgtgctcatgaccccggacggccagaccgtcgaggccgaagcggcgcacggcaccgtgacccgtcactaccgccgctggaagaagggcgagaagacctccaccaacccgatcgcctccatcttcgcgtggaccggcggcctcaagcaccgcgccgatctggacggcacgcccgaagtccgtcacttcgccgagacgctggaaaaggtcatcgtcgacaccgttgaaggtggtcagatgaccaaggatctggccatgctcatcggcccggacgaaccgtggctcgacaccgacggcttcatgaacgcgctggacgagaacctggccaaggctctggccgagtaaatcatcgaacacatcgtgcggacctacatgggtcatgtcatgtcgccaactgtcatgattgtcgtgcttcatctggaatgttcctcagcacgacaatcatgacagttgttcgatacacgcgcgaaatacccctaattgttcccggatatgtggcgatttgtccactggtccgggactttttcgtatacggcctactagaatcgtgattcagtttgttttcacgcccgcttgaggaggtttcgccgcttatggtgttcgcacgccgctcaaccaccctgctcgccgccattgtcgcatcctgcgcgatggtgctgtcactgaccgcgtgcacctcagacaataagaccgttgtagatggtcaaaccacggtgacgtccaattctgccggcggcgtggccgtgttcacgccttcggacggcattacgctgaatcagcagacgccactgaacaaatgggcgaagctggtgcccgacctaaccaaggccctggtcgacgccggtttcaagaaaggcgatatcgatcatacgacgtccgactcgttggacaagcaaagccgcgccatccaagactttgtggtcgatcatctttcgaataacaccacggacgattccggcattgccatcgcgcccgacaacatgacattgctcgtggctccagtagtcgaggccgacgcttccactcgccaatacggcgattacgtcagccagaacctgagcaccaacgatgccacggatgagggagctacttctgacggtgattcttccgaagacagctcttccaaagatgactcgtccaacactgagagcgacggcactgcatcggacgagcaggcgcaggccgtggaccggctggtctcatcgctcaagctggccaaggaatccggcatgcatgtggtattgctcggcaacagcatcgaggggtataggccggacgccttcgtcaagttctcggacgcccagaccatcggcaagctacaggcggaaaagatggtgtccaaactcaagttggataaggccagtaaagacaaccccaaatacattgaggtgctgctgccatacaccgccgtggacgaaaaaggcaacgccaacgattccacgttcgcccaagaggcgttccgtggtatctggcaggtactgggcccctactatcagaagggcgttgtggaaagcccttcaggcaccttggacggcaaatccacggaaaacgattggcaagccgtggcctacgatgccgccaaggaaggctccactgcgaaagtgcttgacaagcgtctggcaaaaaccgacgggcagtccacactcacccgtattgacggcatcatcacgatgaacgactatatcgcctccgaggtcgtcaaggaattggacgatctgggatacaccggctctgccgccgatatcaatccgcagatcaccatctcgggcattgtcggcaatatcaccggcaagaaggatctcagccgcgacgcagtgccggacccgatcaaatcccctgaaaacgacaacgcaaacgactcatccagttccgatgacgatgcggataaggacacctccgcttccgacaaggaccgtgactcgcaatggcctctggtgaccggatacggcgcgtacgtctcgaacatcccatccatcgtcaatggcaagcaatggatgaccggcatggaagacagacagaccatcgccacggatatcgctcaggcctgcgccaggctcaacaagaacgaagcgctgaattccatgccttcaatcaggaactccgaggtaggcggcgtgaagaagatcccgaccatcaacgaaccgttgctggctgtcagcgccagcaatctcaagtccgcgctgatcgcccccggatatatttccttggccgatgccggtctatgattcatactcgtcacgccgctagccgcctgcgatgcctcttccgtacggccctgttccggccgacaaacattgctgaatcatgacggcttcagtacgatttttcgactccccgcatattgctgtgggtcaagatagtcggccgttcctcgcttgaggccccaatgcaggcaacggtcttcgcaatggtccgagttgccctcaacgatgcctacgggctgtctgcgggagatcgtatcccccaccgagagctcggtaacagccggttcgaatgtcgacgtgacacctccacgatgccgtacactcaccacatctttgccagctactttgccagcaaaactcacggtccctgcctgtggtgacagaatcacggtaccttgctccgcagcaagatccacgccacgatgacctggtgcccacgggttgatcggccgctcgaactgttgttcgacctgtggatcgtcgaccggccagtcgaaccgggattcgcactgattgccattgcgccacgccagatcagacatatcggtgaaatcctccaccgtgtatgccgcatctccggtcaccgcagtatccgcatgcacaacatgctgaggcgtggatgccagtcccactcccaaggcaagcagcaggccgataacggcggccaacgcgattatggcatccatacgccgttgccgttcctgagcccgctgacgcgcctgctgacgccgcctgctggcacgtcgggcttcgtcgcgacgccaatcaaacaacagtggtgcattcatgagattcctccccatagtgtgagtgtgatgcgattccggcttctttgccggtgatacccaccttgaggggtccgaaacaggatgtccagccagaacgacctatgtggttccagcttccgaagttatccacaatgaaatttcgcgtgacagtatcgccgcatcgtcatcatgttgtatgagtgggtattcgatgagtccgattctacggaattcagcgcgacatgccatacacgcatgtaatttgctttttcgtggcaagcatgtaagatgtgtgacttgtgcgcgagagaaatctcaaacacagcagacattcctgcgtagctcagttggcagagcatccgactgttaatcggacggtcactggttcaagcccagtcgcaggagctcacctgaagccatcggcgtgtcgccggtggcttttctgttactcattccctgaagctgcttcattcacgtgagaaaataccggtcggcggtaccacgatgcgcgccgatcgccattcaaacgaggacagtcatggaccgtcacgggttcgcccgctacgagcccttcacgattcagaaaccctacattattctacggaatctgtcacttctgcagattcggcattccggccttataccagagcaccgcgataccaacacgttctttgaca

SEQ ID NO: 3769 - DNA, 7630 bp, Unknown
  R35_2m  MAG No. k141_1009
ccggccccactgccggaaccgacatgggtatgttcatgaccgccgaccgcaggaacgaacaggcccgtccgccacggaccgcatcttgcggttcaggcggacgggccttatgggagggatgggaacgggagatcagttcttgactgtctgcgtctcatcgccgacggctgcggcggcttcaacggccgccacgggctgcgcctcatcgtcgacgatctcgccggaagcgagcttggcttcgagctcgtcaacgatctgcgcgtgcatcttctcggtgatcttgaccttggagacgaacaccaccaggctgagcacgatcaggatgagcggggcatagaacgcgcagatcttgaagacgtggatattcgtcggggtcatatcggcggcggttgcgtcacccgtcatgccggccgcaagggcgatgaagccgacgatgccgttcgacagagcgccaccaatcttatcgagcatcgggcggatggaaagcgtaacggcctcgttgcgcttgccgttcttcagctggccgtactcgatggagtcggtcagggagaggatgaccgtcatcatgatgagcgtgccgggaacgtagaagagcaccagcgcgatgaagaccaggacgatgttgctggagaacagggcgagcatcacataagccacgatcatggagaccatgccgccgatgtacaggtagcggcgcggaatgtacctgttcagaatcgggtacagcggggacatgaccaggcccgcgatcatggcgatgacaccggtcgcggagaaagcggcctgattgtcaaggacgaacttgaacaggaagagaagcacaccggtggtggtcacgttcgcgatggcgtacagcaggtaggacagggcgacccacagcagctggtcgttctggaacacggccttgaacgcctgcaacggaccaccgttgtcttcggcgttggcgcgaagggcgctttggttttccctggtgccgaaggcgacggtccaggcggtcatgatgccgagcaccgcgacgatgatgccgaaagcggtccaacccgactggtgctcggcgttctcgccggtgaacacccagctgaaataggtgacgaccggaatcacgaggatggtgatggcgttgccgccgatggagccggtgaaggagccgagggcggtgtaggtggaacgttcgtgggagtcggaggacaatgccgggatcatgccccagtaggagatgtcacgcagggagtagaacacgtcaagcacgatgaacgtgatgacgaacacgacgatgaacaatgtggagttaacgttcaccaggccaaacatgccgctgaaaaccacggcaagcagcacggaggagaccagtccgccgaagaactgccacgggcggaaacggccccacttggtggtggtgttgtccacgaggttgcccagcagcggatcgacgaagatctcggcgatgcggatgatcaccacgaggctggtgatgacgccgatcagcttggccgcaagcgccttgtcaacgcccgagaacaggcagctggtgacatacacgatgaagtacgtgctcatcgcgttgtagaaggcggcctgaccgaggttgccgaacgcgtaggcgatgcgctggcctaacccactcttcctgcggacgtcaccgtccgcggcattttcgttgctcattaatcttctccttaagaacccagagcatggaatcactcattgattttgtaaagtaagcatacaagttttatcaccaaaagtaaaaagcattagtaaacaaggagataaacagcgtgtcgcaaggatgggataacatgggctgaaccgagacattgcatggacgcggcgtagcgtcgacggcaagcagtgccagtgatttggaagcggtaaacaggatttgcgttttatataaaaactgtttattcttttcggtaaaggaggccccgacctcctccataatatcattcacaacgaggtaatgacagaaagcaggagagcatgacagacgtcacacatgtcgatcgcgcatcgcaggcttggctgaccgacccgacggtgttcgaggtgaaccggactccggcccattccagccacaagtggtacgcccgcgacccccagagcggacaatggtccgatctcaagcagagccttgacggcgagtggcgggtcgaggtcgttcaggccgccgacatcaacctcgaagaggaacccgcgacggccgagtcgttcgacgactcctcgttcgagcgtatccaggttccgggccacctgcagacggccggtctgatgaaccacaagtacgtgaacgtccagtatccgtgggacggccacgagaacccgttggaaccgaacatcccggagaacaatcacgtcgcgctctaccgcaggaagttcaccgtctccgcccccgtagcaaacgccaagcaggccggcggatcggtgtcgatcgtgttccacggcatggccacggcgatctacgtgtgggtcaacggcgcgttcgtcggctatggcgaggacggcttcacgcccaatgagttcgacatcaccgaactgctgcacgacggggagaacgtcgtggccgtcgcctgctacgaatactccagcgcctcctggcttgaggatcaggacttctggcgtctgcacggcctgttccgctccgtcgaactcgccgcccgcccgcacgtgcacatcgagaacacgcaaatcgaagccgattgggatcccgaggccggcaccgcttccctcgacgccgcgctgaccgtgctcaacgcggccgacgcggccacggtccgcgcgaccctgaaggacgccgacggcaacacggtgtggcagacgacgggcgacgcggaggcgcagaccgcgatctccagcgagccgctgcagggcatcgaaccctggagcgccgaaagcccgacgctgtacgaacttgacgtcgacgtcatcgaccaagcgggcgacgtcatcgaatgcacgtcccagaaggtcggtttccgccgcttccgcatcgaggacggcatcctgaccatcaacggcaagcgcatcgtgttcaagggcgccgaccgccacgagttcgacgccgaacgcggccgcgccatcaccgagcaggacatgatcgatgacgtggtcttctgcaagcgccacaacatcaactccatccgcacctcgcactacccgaaccaggaacgctggtacgaactgtgcgacgagtacggcatctacctgatcgacgaagccaacctcgaagcccacggcagctggtccctgcccggagacgtcctcaccgaggacaccatcgtgccgggcagcaagcgcgaatgggaaggcgcctgcgtcgaccgcgtcaacagcatgatgcgccgtgactacaaccacccgagcgtgctgatctggtcgctgggcaacgaatcctacgtgggcgacgtgttccgcgccatgtacaagcacgtgcacgacatcgacccgaaccgtccggtgcactacgagggcgtgacccacaaccgtgactacgatgacgtcaccgacatcgagacccgtatgtactcgcatgccgacgagatcgagaagtacctgaaggacgacccgaagaagccgtacctctcctgcgaatacatgcacgccatgggcaactccgtgggcaacatggacgaatacacggcgctcgaacgctacccgaagtatcagggcggcttcatctgggacttcatcgaccaggccatctacgccacccagcccgacggcaccaggagcctgcgctacggcggagacttcggcgaccgtccgtccgactacgagttctccggcgacggcctgctgttcgccgaccgcaagccgtcccccaaggcccaggaagtcaagcagctgtactcgaacgtccacatcgacgtgacgaaggactcggtgtccgtcaagaacgacaacctgttcaccgccaccagcgactacgtgttcgtcctgagcgttctcgccgacggcaagccggtctggcagtccacccggcgtttcgacgtgccggccggtgagacccgcacgttcgatgtcgcatggccggtggcggcgtaccgcgccgacgcccgcgaactggtgctgcaggtttcgcagcgtctcgccaaggcgaccgattgggccgagagcggctacgagctcgccttcggacaggcggtggtgcccgcggacgccaccgcgacgcccgacgcgaagccggccgatgggaccatcaccgtgggccgttggaacgctggcgtgcgaggcgccggacgcgaggtcctgctgtcgcgcacccagggcggcatggtctcctacaccttcgccggcaacgagttcgtgctgcgccgtcccgcaatcaccaccttccgtccgctgaccgacaacgatcgcggtgccggtcatggcttcgagcgcgtccagtggctgggcgccggccgctacgcccgctgcgtggacaacgtgctcgagcagatcgacgacagcacgctcaagggcacgtacacgtatgagctcgccaccgcgcagcgcaccaaggtgaccgtctcctacacggcccacaccgatggccgcgtgaacctgcacgtcgaataccctggagagcagggtgacctgcccaccatcccggcgttcggcatcgaatggacgctgcctgtgcagtacacgaacctgaggttcttcggcaccggcccggaggagacgtacctggaccgcaagcacgccaagctcggcgtgtggagcaccaacgccttcgccgatcatgcgccgtacctcatgccgcaggagacgggcaaccatgaggatgtgcgttgggccgagattaccgacgatcacggccacggcatgcgcgtcagccgcgccgatggtgccgcgccgttcgcggtaagcctgttgccgtactccagcttcatgcttgaggaggctcagcaccaggacgagctgccgaagccgaagcacatgttcctgcgcgtccttgccgcacagatgggcgttggcggcgatgattcctggatgtcgccggtgcacccccagtaccatatcccggcggacaagccgatcagcctcgatgtcgacctcgagctgatctgatcagaattgatccgatagtccaccgtgcaaacgatgtggcccccgacttcctcgcaggaagtcgggggccacatcgtttgcacggtccttgttagtccagcggatgcgccggatatcgatgcagatccaaacctagtcgttgtagagcatcaatgaataaagatgtcactcataagctatcaagagaatccagaacctttttgaattcatatgctcgacacgcaatgtatccagcgtcgtttataatgattcctcgtgccttaatggcacatcgggctatagcgcagtttggtagcgcgcctgctttgggagcaggatgataccaaaccagcaaaactatgaccctcgctgaggcctactgccgcttaggttttgggacttcggtaaaaactgaaaaatggcatccgttaacaatggttaacaatgaccgcagacctccgagtttgcggatgtttcagggcttgatcccttgggtgcctgaaggtacagagtgtcccactcggtgcgtataattaaaaagttatgccttaaggcatgaaaacgggctgtggcgcagtttggtagcgcgcttgctttgggagcaagacgtcgcaggttcaaatcctgtcagcccgacaatgaaagccctactcccacttgggatgtagggcttcttcttttttgctctgggggcgtttgctaacacaattccagtgttaacggattggctgaatccgttaacattttctgttaacgcagcttggtgcctgtaatccttgtgattccaatggtttcggtatgatcgatggatcgtcgcaatccctcacacgctgtgagccaattcgtgagccaactgaccggaacgacattcatgtcacgataattccgatacctcccgatcacatctcactgccacgtcaaattgtcgagatccacaccgaatcttgtcgcgttggcttcaatcagtgcaagcagccactgggccaaacccggttccaaagcatcgtaatgctgtacgaaacgctcgtcggccacgtacatgcggccgaggcacacgtgcattgacggggtgacatcgaaccataccaaggaacgacggtgggcttccgccagctcattgccctcatcgctgccgggcttcacgccgtgacgcatggcatcggcgagccgctgctcgatggcttcgaattgcttcatgtcgcgctcctgcatatcagacgttctcctcacctggtattccgcaacctgcatccactgccggctcccgccccaacggctctgcgcttcttcggcccattctcgggattgctgcgtcgcatcattcatatcgattcctttctgtgcaacgttcataagccgatcgatatcggccaatgcctgattgatatgttccgccttgcgtgcaagttggccccgacgatccgccaactcgcgtattacctcactcggcttggcatcgagcagctgcttgatacgcggcacgggtatgccgagctccctgtacagcagcagcctgcgcagtcgtctgagatccgaatcggaatacagccggtatccattccagtcgcgttgcggagacaccagacccatttcgtcccaatgccgcagcatgcgaatactgatgttcgtcagccgcgacacatcccctacgttgagatgggaaatacgctccgccggagtgtccatgtcgtgtgattgccggtcattcatggttacaggctaaagtatgacatcatgtgagggtcaaatcagcatggcgacgcgaacacagacatcgatttcagttcacggtatccacggctggagtaaaaatccgattatactgaatcgcacatcacactaacggctaaaaccaaccgtctccgacaatccatagggagaacacatggatgacatgaacccacgctgcggctggtgcaatctcagcaatcccgtctatgttgcctatcacgatgccgaatgggcggttccgtcgcatgatgaccaccacctctttgagatgctggtgctcgagaccttccaagccggactgtcatgggagacgatactgaacaaacgcgagcgtttccgtcaggcgttcgatgggttcgacatcgaacggatccggcgctatgacgagaacaagatcgccgaactcatgaacgatccgggcatcatccgcaaccgtcgcaaaatcgtcgcgacggtcggcaatgccaacgcattccgggatatccagacgtcgtacggcagtttcgacgactatatttggcggttcaccggccgtcacgtcatctacgagacaggcatgactacatcccctctgtccgacgccatcgcagcggatctcaagacgtacggcatgcgattcatcggcaccaccatcgtctacgcctatctgcaatccatcggcgtcatcaatgcacatgagcctggatgcttcctgcaccgggaaaggtgacccgcgcaaggatttataaggtcgctcgggcagaatctctccgagaggaaccagtgcttctagttattttgcttatcgagttcttggtagcgctctttgaccacggtgaggattccggcagattgttcgcgctactgcgcggtgagcgcttcgagc

SEQ ID NO: 3770 - DNA, 52709 bp, Unknown
  R35_2m  MAG No. k141_1060
ggacgtgtagaacttgaacgcaccaaggaaagtgccgaactcaaagccggcggattccacgtgctcgtagatgcggtcgaggaattcagcggagtactggttgaagaccgcagggttgtagtactggttgctgatcaggtattcgagacgctcggcggtggaggcgaaccgcttgctgttggtggccacgtgccctgtcacgtattcgcgttcggcggccttgtctttgtcgaactggatcttgccgtcggcgtcatagaggttgagcatcgcgttgagcgcgtggtaatcgtgcgccgggtcgtactgttccgctgcggtgtcggcagtattgtcgagcggcaggccggtggcggtgaggtcagtcattggaaatccttggaatatggcagaagtgtgtttactcagacagttgctcccctcagtcaacttcgttgacagctcccctcggagaggggagccaatacctcgagggggtcaagatttactgttcggtgaagaagcggacgaggccgtttcgcacggcggcagtgtcttccggggtgcccatgagttcgtaacggtagaggtagggcaccttgcatttggcggcgatgatgtctccggcggcacagtaggcctcaccgaaattggtgttgcctgaggcgatgacgccgcgaatccacccgcggttggctggatcgttgaggaagcgtttgacctgaatcggcactgctttcttgaccacgccgccgccataggtgggcaccatgatgacgtacggttcgcggacgtttagcgccgggtcggcggcccgcaacgggatgcggtagacgttgatgccttcgtcctgcaaacggcatccggccacgaaccgtgcggtgttttcggaggccgacgagaagtagaccaatgcgccgatcgtcttgccttcggccgcgaattcgggctggctcagactcacgcggacaccgtggcggcggcgcggttgtcggcggccacctgctgggcgacttcgcgaatcaggtcggggcggtagccggtccaggagttgtccggcgtgatgaccaccggagcctgctggaaaccggcggcctgcagctgctcaagggtggaggggttctgcgtcaggtccacggtttcaaacggcacacccagcttggtgagctggcgcttggtggcatcgcactgcgggcaatgcggcttggtgaacacggtgacggtcatggcgactccccttgatgtggttctgatgaacagtgaagcgaaggccatattacagcggtgtgatttgaaatcaaggcactatatgtagtggcgcgtgtcacataacaaacctagatatagggtttttcgttgatattccgccattcccatgcacccccgaaaatcggcgtgcagcgacccgcccaatcacatgtggcattgttcacatttgcgtttgaaccgctcttcgactgatcctcaaccgccctgcaaccgccatcttgagtttcgaggggctgttttgaccctttccggagatctatctccgtttcgaggggctggtactcaagtaagcgcatccccaaaatggcggaatgacggtggggcgaagccgtttatacccgtgttctagcgggccaccagcccctcgaaacgggagtaaacctctacggaaggccaaatcagcccctcgaagcggagaacggatacctcggcaccccgtgtggagccagaagacccggccggatgtccaaacgagcatccggccgggccttaaaagtagttgtccagttatcagaatcgatgcggcgcgatactactccgcgtctttacggctccaacagatcttcgatgcggcagccaagcgtgcgggccaaagcgagcacggtggagacggcagctttgccaaggtctttgcggcgctgctcgtacatttggatggagcgcagggtaacgccggagcggcgggccagcccggattggctgagtccggcgcgcacgcggatcgtgtgcagccgggagtcgccctcggtgcgattatgggcggcccgctcgtcgtacacgtcgacgaatcggctttcgtcggcttcgtgcagagtcgggtacagtcgcacgatatcgtcgagcgacagcacatcgagaatgtccgagaaccgcactcccctggtccattggcagtatgcgagtacccatccggcccagtattcgggtgttgagccggcgcgcagtgcggctggcggcatatcgagaatgcgcgcccaaccggtttgccgcatgatttcggccaccagctcctcgccggacatgccacacacgtatttgggcgtgcctcgcccgaaaagcgcggccgcctcggaggtggcgaagaagtccatgaataggccgaccggcaacccgcaatcgttcagcgcataatcgaaggcgccggccaagttggccatggcgtccggcaagtatgtcccatcataggcggggatcatcgttggtcactttctcgcggatgatgtcgcgcatgaacaggccgtcgagatcggcttctgcacttttgcggcggtaggcttcgcgagctgtgcggtcgcgctcgttacgcaatccgtggtaggtcgaagcgcgggcgatttcgcagccttggaaccgcagtgccgcgaatgcctgaggactggcgagtacgatctgcttgccgagctcgcccaaccgcatcgcctcagcgagttggtcgatggaaatcgcgttattgacaaaagcgcgggcgaacgagaaatacgaatcgtcggcacgatatccgacgatgacgtcagcctgactggcatccggcagaaacacttgtttcagatattcgatgccttgcgcggcgacggcggtggtcggctggaaacgacggttttcgaccagcatggccagccagttcaggatggtgtagggcggctgggacaggtccaggaagaggagcccgtccgtggtcaacgtgtaccgattcgcgaaaccgtcatccggtcccgcgcacgcccattccttggccagctcgacgctgcgcgtgcaatagaatccgcggccataatcgttgttcggcttgaccagcccgtattcaggatgcttgatgacatgcgaagagccatgccacagttcgatcgatgcggtctccattggccggctccttctctctccttacatattcttgattatatcactgtggtgatagtcataagggaaatacgagatgaaaaataccgctgtatacgttcgtacacaacgtgaaatgtatacgaacgtatacaacactgatgtccggagtcatgctccgcagtggcgcagcggacgcgccactacaatcggaatatgggactgaagacgtggaagaagtggacggactggccgctgatggtgctgtccgtggtgtttctggtggtgtattcgtgggaaattctctcccgcacgcatatcgcgctgtgtgaaaccgtcatcaacgtgatctgggtggtgttcgtcgtcgattatgtggtctcgctgtggttggccgacgatcgctggcggtggttcaagcacaacctgttcacgctgctgaccatcgcgctgccgatgctccggcccttgcgactgttgcgtttgctgaccgtgctgcacgtgctgaaccgcacctccggcatggcggtgcgcgggcgcatcaccgtatacgcggtcggcgcggtgggaatgctcatgtatgtgggcgcgctggccgtgtattccgtggagcgcggggcgtccggatccacgatcaccgacttcggcacggcgttgtggtgggcgttcgtgaccgtgaccaccgtgggatatggcgacttctcgccggtcaccttccaaggcaagatcattgcggtggtgctgatgttcaccggcatcgcgttgatcggtattgtgacggccacgctggcttcgtggatcgtggatcaggtcaatctggagacggatcggcgcgaggacgctcgggagaaggaagtggccaaggaagccgcgcaagaggctattgcaacatcagccaatcccgaaatcgacctattgcgcgaggaagtgcgtgagctgaccgctacggtagccggtctgcgcaccgaacttgagcgacgttgattggcgaagcaggacaaacaacgattctgccaagaaggtccgcgtcagttgttgtcaccgcggattgcggcagaatcattgtcgccacggctgttttcttcagtcggctcaacccaacttttgataatttttatttttttgatacttttgataatttttattttaggttgattcagcgaggaggcggtccacatgaaggcaaaggaaaacccattcaagccaacggcaggaggggaaccgcccctgctcatcggccgaggcaaagttatccgcgatttcgagaaaggtctcgataacggagtcggtgccccagggcgcattatgctcgtcaccggcgctcgtggaaccggaaaaaccgtgatgctcactgtgttcggagaccgggccaaagcgcgcagatgggatgtcatcgaagaaacggcctctgccggactatgcgaacgccttgttgatgccttacgaaccgggcgaggggcccttgaccacctcactatccgaccatcgttgacttttgctggagcgggcatcggcctcggagaagccgaactatccccgaagcgtatgcccgaaacgttgagaagtgccattgccggacggttggatgcgcttgagaagcgccatgctgggttgcttatcaccattgatgagactcaagcggctgagcgatccgacatgattgccatcgccactgccatacagcatcaaatcagggaacgacgcaatatcgccatcgtgttcgccggtctcccacagatgatttctgatttgttcaatgacgaagtcatcacgttcctacgtcgcgcgaaaacgaacatgctcacagatattcctcttgatgaagtgcgcgatgctttcgccacaacattccgcgcctccggcatatccatcaccgacgctcaattaagcactgcagccaatgtgacagccggatacccctatatgattcaactggttggctaccatatctgggatgccgcagacatgcggggctcggataccatcatcgacgctgatgttacggcaggtatcgaggaagcacgtattgaccttgataacgccgtgtgcatcccggagttgcaaggcttatccaaaaacgaccgtgagtatctcgaagccatggcagcgtcagatggtccctctcccaccgtgaatgttgcacagcgcatgggcaaaacgcctaactatgccgccacctaccgcaaacgcctccttgacgccttcgttatccgcgaaacagaacgaggcaaagtcgattttgccgtgcccttcctgcgcgaatacttgcgtcggaatcagtaatcggcacaatgcacagtatcgatatattccgttccatataatgacttttcgcattcagatacacaatggacggcctgttgagtagcactcagtaggccgtccattctatttagctattcagttatcggagacacacctcaggccttgaccggagcgccagcgacctgctgggaggccatcacgccgaacaggtagccgtcttcggagaagtattcgaaggtacgaccggcgaagtcgcggcattcgaatctgatatcgttatcgattcgatcagcggctcacgatactgcccttgcatcgctgtgccactgttgaatgtgcccggctggctcacctttgggtcaccgccgacacatccttgatgccgatggttatagagtcgcaaattcacgactggcgcacctgcccacgcacctatcctgtcatttcgagcgcataatttgctaccacatccggtcagggcaatcgaccttaatggcgtaaacggcacttctcaatacgtaaacggcatttattcttgcccccccctctcagagaggggagccaagaaatatcaagctcggcctcccaggagagagccagaataatgcaccagcaaggcattaggatggagggcatgagcgatttgaacgcgttgaatcttgagcccggcgaagtggttggtgggtatacgctgatctcccggctcggctcaggagctatggggtcggtgtggcgggtgcgcgacgacggcggcaccacctatgccatgaagattctgcgcgactccctgaccgacgagtcagtggcaggctccggctctgcgtccacggccctgcacgaccccgacctcaagcccgatgtcacgccgcgcgagcgcctgcggcgcgaggccatggccttgaagaaggtcaatcatccgggtgtgtgcggcatcgtggatatggaactcgacgatacgttggcgttcatcgtcactgaactcatcgagggcaagaatcttaaggatgatgtggccgccaatggccggtatgtgggcgacgatctggaacgcttggcccgcaagctcatcgaagccaccaaagccgtacatgcggccggcatcgtccatcgcgacatcaaacccaccaatgtgatggtgtcggccgccggaccggtattggtcgatttcggtatcgcgatgggcgagggcgaaagtcacgtgacccgcaccggcctagtgatgggtacacccggattcatcgcacccgagattattgacggtgccgaatccgacgacgccaccgattggtggtcggtggcgtccgtgctcgcttttgccgcaaccggcgcgcctgtgttcggcaccaagccgatgatggcggtacttgagcgcgaggcctcgggcaacgcgaatctttccggactaccggccggcacattggctgccttccattctgcactggacccggatcgcagggatcgttgcacgccggatcaattgctgaatgccatcgccttggatgcgttgaatcccaacgcttggcagggcgagcaggcgggaccgttcgccgcgggagccgtggctggacaaccggctgcgatcgttgccgaagccgcggaggcgatgcccccttttggcgcggccggcggcgttgaccgcaataatccccgaaccatctggcgcgcggccgaggaagccgctgaggctcccaccatggccgtgttctccggcaataagggcgataacggcgatggcgaaaccgccgtattctcgccggctggcgccgctaccgccacgctgcccttagccgatatgccgccacgtccgccggccggtgcggagcaggccacgcaactgttgcccgacgctgctgccgatttcaccgacgacgccggcacacaggtactcaccggcgcgaccacaccgatgccggaccaaaccacaccaatggccggcgccaccacaccaatgaccaacaccgattcgactccggccccgaccacgccgctggccgagcgcaccaccgtactccccacgccgcagccgtcatcattccccccgtccggcaccgcccagagcagctgggatcccgcaagcaaccagcccacagcggtggaccccgccattcgcccggcattgcagcgcatcatcgaccaaaccgcccaagcggcccccaccgaaaccatggtccaaaatcctcccatgcccaatccggtggacgtgaagcgaggggaatatctgcagcgcggcaccctgccattgatcctgctggcggcgccgctggcggcactggcggcaaatgctccgctcgtggccatcatcgcggccactgcgttgttgtggctactgctcaccctggcctataacaccgaaccccagcttgagcgcgagggcaaacgcggcggcgagcgcaaaaactccgattcgtggattcgcgtggcgacttttccctggcatctggtcaaagccctgctgctggccattccccgcatactgctgctagtcatcatctatatggcgggaaccgccgtggccaccgcggctctggcactgcccgttcacaccatctcctggtatttcaccgcggattggggtattccggtgccgttgctcaatgatgtgccgttctccgcttccgggctggcgctgggcggtttcatggccatcggctggctggtcactgtgttcgccccacagtcgatgatgattcggctggggggcggcgtactgcgcgggctcaaacacagtcgcccggcgggcgcgccatccaccgaagtgggtggggctccacctgctccagtggcgccggcgcccaagggcggcgggcgcggcaccgtgctgttcaccatatgggccatcatcaccgtggccttgtgcgcgatgccgattctgggcatgccgatcaactggatgccgttcgcctagagcggggcggaatctcacacatcagccatccgcacacatggccgttgtgtatccgatacgttcgttccgtcacacttttacagggaattcacctcagatcagctctgggcgcagtcctcctcaggcccggtcattatgatggggcccaaacattgaagcgattgcaaggggatagctatgtcagatccgaagcgtcaggccaagcgtgccacacgcgctgagcgccgagcggccgaggaggccgcccagcaggcacgggccgagcaggcggctaaggaacgtaagcagcagaccatcatcggctgcattgtggtggccattattgtggtgctggtggccatcgctggattcgccgtatacaaggctatgcggccgtccaacaccagcagcagtagccagcaaagcaacatgaccgtggacgaggcctatagcaagctcaagaaagtcagtacccagccggccaacgccgatgacaaggccggcttcgtgatctcgagcaaggggtacggtcagaaggccgaaggggcgcccaccgtttccatctacatggagccgctgtgccccggctgcgcctcggtgaaccgccagcttgacccgacgctcgtcaagctgatgaacgccggccagctcaacatcgatttgcacttcctcaatttccaggacaacaagagctccgacaactactccaaccgcgcgttcaacggtgccatctacattgccgagcatgatgacaatcccgatcacctcatgagctacctctccaacatctacgctgaggatttccagccgggcgaattgtccaattacgagccggtaagcaacgccaagctggagaagcaggccgtcaatgccggcgtgagcgaagatgtggccaccgcggcattcagtggtaagaacgaatacgtcaagtggctcaccgcctccaacaactacacgatcctacgccccgaactgttcaacagctccggcgcgttctcctcccccacgctcaccatcaatggcgaatactgggatctgaagcagctcacgctggcggacaccagcatggtggacggattcctcaagtccatcggcttggactccgatcaggtgggcgtggaaggccagatgccatcgatcggcgccaacaagaagccgatttcgctggccgattaattaccggcgcggctcggcctgaattgaccactcgagaactaccggtatactagagatttgttcaaaacgatttacgcgttaagaacaatcgcctctttagctcagatggccagagcggccgccttgtaagcggcaggtcgtcggttcgatcccgacaagaggctcgacgcgtagaaaagtggcgtattatatgatacgtagattttttctacgcatataattcttaccttgggtaagtactccaggagccttcccccaactatgggcttcctggaatgagggcggagcgtcccccaaccagctccgcgccttcaggggggcgggaacatccccttctctcccgccccctttttcttttctttttttgagctcagaacaatctgacgagcaggaatggtgacggtggccggtgaaaccgcagtacgggccggaacaaccgttacgatgggtggcgtaatcgttcatccagcaggaagagtatggcaatggcacggcgttggaccccgcagcggtttgttacactgcgtcgcatccgcgtaatcgcctgtatcgcggcgaccagtatcgcgctggctggatcattcgcgttcaccgcgcgtaaatccgtagccctgaacatcaacgggcaaaccacccaagtcaccacatatgcgatgacggccacccgtcttctggaggaacaaggggtggatatcaagacccacgatatcgtcactacctcgtccggcgaccaactcgccaatcatgccgtggtcaccgtacagtccgcctaccagaccactatcaacatcgacggcacgtccgttcccttctggaccgtggccaccagtgccgaccagttgctgggatttttcgaggaaaaccagaacaacgccacaaaaatcaccatcgacatcgacaatgtgtacaaccagctcaccggcggactggtcatcaatcaggatggcccggtcaccgtcattgcggacggcaagacttccgtggcccccaacggcaaactgcccgcggcctccattcttgactccaaaggcatcgtgctgaacaaagaggaccgtgtgagcgtcgaaaaggacggcgataccactatcctgcgcgtacggcgcgtgacgcatggcgaggaaacacgcacagccgtagtgccatactccacacaaaccatcatcgactccaatctgcctgaaggccagtcggagatccgccagcaaggcgtcaatggcgagaaaacccaggtgtataacgtcacgtatgtcgatggcgtggccgaatcggagacgctgaaatccgaaaccgtcaccacgatggccatcgaccagatcatcgccgtaggcgccgccaaatctgataccgataagggttccgataaaggttccgacaaaaaatccgactccgccgataacggcaaggccgattccggttccaacaatcagcacgagtcgtccggtaacaatgccaacaacacaggcgacaagaacaacagcagctctggcaacaacacgaacaccgataccaacaacaatgccggcaacaccggcggcaacaactccggtaacaccggcaacaccggcaacaccggcaacaccggcaacaccggcaattccggtaacaccggtaattccggtaacaccggcggcggtacgaacaacaattccggctcttccggctccgattcaggaacaaccaccacgccctccggccgactctggcacgccaccgtagcccaggctcaggcctatgccgccggtgccgccgcgcagcgcgggtggacaggcaacgactgggattgcctggtcaaactatggaaccgcgagtccagatggctgtggtatgccgaaaacgcgagctccggtgcctacggcattcctcagtcgcgaccagcagacaaaatggctgcgttcggcgccaattaccgtgacgatgccgccgtacagatcgattggggtctgtggtacatcgcacaaacctacggcagcccgtccaaggcatggcaacattccgaacaaatcggttggtactgatcggttacgaagcccacaaggaacacacgcttatgaacgacaccattcccgccaccggtcacctgttaggtgccgccgatatccgtcgtatcgcggccgatgccggcatcagccccaccaagaaattcgggcagaacttcgtcatcgaccccggcacggtccgtcgtatcgtacgagaggcgggagtgaccgctgccgatcatgtcatggaagtcggccccggcctgggatcgttgacattggcgattctggaaaccggcgccaccatgaccgcagttgaaatcgatccgccgttggccgaacgactgccgggcacagtcgccgaattcatgcccgaagccacatcacgactcaccgtcgtcaatcgggatgccttaaccgtcaccccggagaacgtgcctgatttcagcgatgacgcatcgtttacgctggtcgccaatctgccgtacaacgtggccacgccgattctgctcacgctgttggagcgtttcgacaacctcggctcgttcttggtgatggtgcaaaaagaggtggccgacagactcgccgccaagcccggttccaagatctacggcacgccgagcgtgaagctcgcctggtatggcaccgccgaacgggtgggcaccatcggccgcaatgtgttctggccggctcccaatgtggattccgcgctcgtcagattcacccggtatcaggccgatgacccggccgccccgggagcctcgaacagcacggccgacggcggcgcacaacgggaactcgtatttcgtctgattgatgcggcgttcggtcagcgtcgcaagaccctgcacgcggcattgaagaccattgcgccctccgaggcattctccatcgccggcatcgatccgacccgtcgaggagagacgctcaccatcgccgaattcaccgctctggccaaggccatcgaatcgtgtggagatggagatgaggcacaatgagtccggtaatctcacatccacacccagccgctgcccgacatcagttcgatgagctctcccccatcaccattacggtggattgcccggcgaaaaccaatctcaccttggaagtgggacctgctcacgacgaatggggcggacgccacgaactggacaccacctactgtgcaatcggcgtatacgacaccgtcaccgcaaccgccaagcaacccggagcgggattctctctggagctcgaaggcgcttatttgggcgacttggcctcctcacgcagcgacatgcgccgcaaccatgcggtactggccctcttcgccatggcccaggcggccgagcgcgagccggatgtggcgttgaccatcaccaagcgcattcccgtgggtgccggactaggcggcggttcagccgacgccgcggcgaccatgctggcggtcaatcgtctctgggagctgaactggcctatagagcgtctgcgcaccattgccgccacgttgggcgcggatatgccgttctgcctgaccggtggccttgcatacggcaccggtttcggcgaacgcatcacggatatcgcccccggcagccgcgatgagctggcgctgatagaacagggattcagcggcgaagtattggtcggcgcgtaccagtcgcaactcagcactcctgaggtctaccacacctttgacctcgtgggagccgcagaaggcgaccgcaatcatctgcaggctgcggcaatcagcctgcatccccgcagcgggcaggccatcgacgccgccacgcaggcgggtgccagccatgcattcgtctccggatccggcccctcagtggtcgctttcgccgccgacgaggcagcggcacaacgcattatcgatgtgtggcgcgatacggctgtggtcgatcgcattattcgagccaaatctcccgcacaccccaatatcggcgtcagacagtgacgctaaggtagcaaccagccacccgacccatgaaagaagtccaccgatgacgtatcaggttgatgaacgtgaagcccgcaaggcgtacgtgcgccaccgccagaccatcgtcttttccatcagcggcgcggtattggcagtagtgctggtcatagccctactgttcaatttccacgttttcggcctcggcgaagtggagactccggcccgccagccgaattacggcaacgcggcaccgtgcgcggtcaaggacagcagcggcaaagcgcaatacgtgtccaacgcttcggtcggcatccgcgtgatgaacggcacctctcacggccaattcgccaaggccgtgggtgaggctttggccaatcgtggattcagcgtgcagaaaatcgataactattccagcaccggcgttgaacgcaccaccatctacttcggcaagaacgccattaatcaggcgtatacgctgatcggcaatttcaccgacgccaccatgatcatgacggctcgcgaggatcaactcatcgatgtggtcatcggcgccacgttcaacgatctgcaggacaccaaatcctccccacaatccggtaagaccatcaccaatatcgagggttgcaaggccgccgatagcatgaccaagctgcccgccgacaccaaacacgacgcatacacggcggagtaaggcgcatacagcttcatcttcgcgaaaaaccgtacgctgacacgtattcagcgtacggttttttggtatcggactagtatcggactactgaatctcggcgtaccagcgcttgagttcttcgacggccacatcgtggtccaccggaccgttatccaagcggtattccagcatgtgcttgtaggcgcggccgatcatcgggccgggctccaggcccagcaactccataatttcgttgccgtccagatccgggcggatcgcgtcgaagtcctctttcttcttgagttcgcggacgcgctcctccatctcatccatggcctgggagaagatcatcgccttgcgcttgttttgtgtggtggcgtccgcgcgcgtgagcctgttcagccgctcgtacaggtgcccggcatccttgacataccggcgtacggccgagtcggtccacggctcgtccacatagccgtggaagcgcaggtgcatattcaccagttccgagacgtcctcgaccagatggtggtcaaaacgcagcgccttcaaacgcttgcgggtcattttggcacccaccgcgtcatggtggtggaagctcactttgccgcccggctcgaaccggcgggtcttcggcttgccgatatcgtgcatcacggcggccaagcgcagcgtcaggtcgggggcgggcaccgggccgtccgggccggtttccagggcgatcgcgcgttcgagcacaatcatcgtgtgctcgaagacgtccttgtggcggtggtgttcgtcgatctgcaattgcagggccggaatctccgggaagacgatgtccgcaagaccggattcgaccaacgcctcaaggccggcgcgcggacggtcggagagcagcagcttggtcagttcgtcgcgcacgcgctcggcggatacgatgtcgatgcggtcgcgcatcgaggtaatcgcctcggccgcgtccggcgcgatacggaagcccagctgggccacgaatcgcacggcgcgcatcatacgcaacggatcgtcgtcaaaggactgtcgcgggtccaccggcgtgcgcaacacacccttggacagatcactggcaccaccaaacgggtccacgaattgcaggtcgggcacgcgcagggccatcgcgttgacggtgaagtcgcggcgggacaggtcgccctcaagcgtgtcgccataattgacctcgggcttacgcgagtccgtgtcgtacgtgtcggagcgataggtggtgacctccaccttgacctcggtgccgtccgggcggcggcgcatggcacccagcgtgccgaacttgcgccccatgtcccagaagccgtcatgcccccaccggcgcagtatcggctcgaactgctcaggccgtgcggatgagcagaagtccaaatcgtggctctttctatggagcagcaaatccctgaccgggccgccgaccaatgccagctcgtaaccctgttcggcgaacagtcgaccaagttcgatggcttcgggccatacttcgaaattcaatgggcaccttcccgcgtgcgacgtttttctgccctaccagcataccgttaccccacctgcacacggggttgagtaaggtggagaatatgattacgcccgccgaccttgcccgcatactggggcaaacaccagattcggcggatagccatacccaagaccacctgctgtatacgtccgaaactccgcatcattccgccgattcgggcgattctcccgatgccggcggcaccgcgagccactccaccaatcaggccgttcatcaagacgaagtagacgcagtaccgactgcgcaacattccggtgtacccggcacacccgcaacgcccgccacacccgcaccatccgaatccgaaatatcggacgccgccagcgacatgcccacaccgaagccgatgatgcccacaccggccaccgtcttcggcatgcatgccaccgtcaccatcgccactaccagcggcactatcgaggggcaggccgatggtatcgccggcgaggccggtgccgagacgattgccgaggtcgagccgattatcgccacggcacaaacgtccgtaaccatcgtcacgaacgattccgcggcgaccgcccacgcggccgtagatactgccgttgcggtcgccaaggccgcctccgcgcataccgcagcgataccgactccgcgcgacgtgctgatgccgcctgcggcacgtaccgcaccggccgcaacgccggtcaccatgccggtctcagcgccgtctgcagcaccagtgaggcccgcaacgtcagcgcatcccacgccggccacggtcttcggccggcatccgtccgcggatgttgcctcgccggaaccggcagtgccagtagaaccggtgacgccatccagcccgactccggccatgatgccgcaacgccgtacgtcggacggtccgaccacattcgcttcactggatgcccaggaactgccggtcgtacgcgaatattcggcaggcggtctgattttcgatgaccagaatcgcgtggccattatcgcccgtcattcccgctccggccatctcgaatggtgcttgccgaaggggcatatcgaaaaaggtgagaccccgcagcagaccgctgtgcgcgaagtgcatgaagagaccggcatcctgggcgaggtgatcgattccatcgccaccatcgactactggttcaccggcaccacgcagcgcgtgcataagctggtccatcacttcgcgctcaaacagaccggaggcgaactgacggtggaaggagacccggatcatgaggcggaagacgccctctgggtacgttttgaagatttggatgacgtgttgagctatcccaacgaacgcaaaatcgcgtggctctacgccaggaagaagaacaggcaggcaaacgagtgaacctacccggagtcttacgacattgcacacgtctggcacacgcactggcggctggcgtcgccgttgtggcgatgctggccgctccattgaccgtctacgcgaacgatacgacggacacgactgattcatccgatacgacggacgcaacgggcaatcagaccgagaatcagcccaagcagagcattgccatcacgcaaagcacccccatcgtcacctccaaatcgggctatcatgtcaccgcggtcatcagcaatacggacagcacggccacgtcaagcggcacactgcacctgaccaccaatacgctgttcacctttgtctcgcgcaccgatattcagaattgggccgagaacaacgcccccatccccacccccaacgagttgggttccgttgacgtgccatcgattcccgccggcggcactgccaccgtcaccatcgaggtgaacgccaatcagcagacccttgcctccatagggagctgggggccgaagccgctgatgctgtcgtatatcgtcggcaatcggatactcgccgatttgccgagttttctgacccgatcttcggatgggctcaacaccgcgacgacaccggccatgaacctgaccgtggccatgccctacaccgccagcggctggcaggtcgataacaaggccatcagcaatcgcattgccgaaaccaccacttcctcgacatcaacatcgtccaagtccaacagcacggacaaggccgacaagtccgataacgccgacgccggcaacgcggccaaagccactgatacgcaagccatatccttatccgagcaggatgccgataccgcgcgatcccttgggcagacattcgccaagcaccgctcgctgcaagtgatcgcggatcctctgtattggcgtcagtccgcagtgcaaccgtccattgccggcatcatgcagcccgccgactttgacatcaccgcctataccgcgctgggtgataccgcggcctacgaaaaggccggcatcaccactgaacagtggaacgccaagcaggcggccgcatggtatgccgccggaaacgactccgaaacaccctccgcgtacgcatggcagggcaacaactgttggacgttggatgcgctgaccgcggcacgcgagcagggctatgacacggtgattgccgatgcctctttcgatgccgaccagactgaagccgtacacacaggcacctacgtggtggatacgcctgccggcgatgtcaccgtgctgaaggagcaatcgaccttgggcacgctggccaagggccaacccaccagcacggacgcgcaggccgagtccagcgatgccggtcggttggcccgactggtcgctcagagcgcgttctaccagatggaacagccctatacatcccgatacctgcttatgacgttctcccgcaccacggaggccagctggatcgatcaggtgatgagcgccttcgagcaggcctcttggttgaatctgacggatctgaagaccatggccaaggccgatccgtacaatgtcagcgattcggtcaatcccgacaaggccgatgatgccaacaccgccaatacccggtcggcattgagacagttggccgacagccggcatgacatcatgcgcatggccacctccatattgaggaacgagattgattccgacgaggtctcgtcgttggccccgcaggccctggcccggcaggatgccaatgacaccgtctcgcacagcaacgatccgacgcaatggattggctctttgctggtgctgcatgacgatatggcgctgcgatccatgtctggctccccccagccgacagccacgcgaaaagccatggtcagagccgcgaaaacactggccagcgatcttctgaacggcgtacgcatcaacccatcggaatcaatatccgtgttcagcgaatccgcgaaaatgccaatcaccgtcagcaatgaccttccttatgccgtcagcgtgcaggtcaactcgctgactgactccatgcagatcgtcacctcgcgaaccactgacatcgatattcccgcgcatagcgacgctcaggtgaccttcaccatccgcgtttccacttccggctcatcgacggcccatgtgtcgctgagcgaccgggaaggcaacagcttcggcaacacgcaggataccgcgatcaccagtgtgatgcgcgtcagtgatgccagcggtttcattatcatcggcttcgccgtgctactgtgcattatcggcctgtggcggcagttccatcggaagaaggaccccgacgaatgagttcaaccgtaggtcgtaattccctgatcatggccacgggaaccgctgcttcccgtgtgaccggtcagctccgcacgattcttctcgctgcggccatcggcaccactggattggcggccaacgcctatcaggccggttccatgattccccaatccgtgttcacgctggtgtccggcggcatcttcaacgccgtgctggtgccccagatcgtgcgcacgttgaaagaaaaagacgcccaagaacgactgaatcgtctggttacgttggccatcggcatcctgttggccatgaccgtggtgatggcggcggccagccctctgcttgcccgcctgtacgtgggtagcgacgatcaccagatgatagccctgaccacctcgttcaccctgtggtgtatgcctcaggtgttcttctacggcctgtatacggtattgggtcagatcctggccgccaaagaccatttcctcacgtatgcgtggagctcaaccggtgccaacattattagttgcgccggttttactggttttattctgctgttcagcaaggccaatgaacagcccctcgaattctggaccgccgacaaaatcgcgcttaccgcaggcacctggactttgggcgtggccttccaagcgctgatactgttcctgccactggcccgtatcgggttcaagtacaaacccagcttcgggcttggcggctttggactcaggtctatgggtcccgtggcgttaggctctttgggcgtggtggtcaccagcgagatctgcggcattatccttacccgtatcgccacatccgcaccgcagcgcgcccacgaactgacgggtgccagcctgttcagcgtggcaggcaacgcgacctatcagaatgcgtacaccctgttcatcctgccctattcgctcatcgccgtatcggtatccacggctatgttccccaaaatctcccgttctgtcgcagctgcgaatctggatgaggcacggcacgatctggtgagcgcgctgaacaacgtagggctgctgatcatattcttcgccgccgccatgattgtgttccccgaaccgattatccgcgcattgcttccgtccgtctcgatggacgagaccatgctgatttcctacgcgcttatcgccctatctgtgggcactcctttgggatcggcgttcctgctgatccagcgcacgttctatgcctttgaggacggcctgcaccccttcctgtccgcggtgatgcagtatggattcacctcggtattcatgatcattggcatgatggtacttcctcctgagcattgggtactcggcatcgcctgctcggtgacactcggtggattactggcgttgccgctgacattgatgatgttgcgccgcaagttcgaaggcaatcttggcggtcgggagatcacgaggacatatgccaaggccattgtggcggcgctggcttccggagttgtggtctggctgatcaaacgaccggtagtcgcactgttcggcgcggatattcgatcggtaggcgggcacatgagctggtggtctgcactggccatctgcgtggtgctcaccatcgtgctggccgtagtatatgtggctgtgttgtgggtgatacgcaccccggaactcatcagcgcctatcactcgatactggcccgtttacacaagactccggccagtgaggacgttgctgtgacagcccagccggaaaaagtcgacgatacgcaaatcaatcctgagacggagcccgtcaaggatagccccacacgtagaatatctaagaccagtctcgaacaccaatcacacggagccgaacgcactatgaaaccgcaactcggagacacgattctcaaccgatacaccttggtatcatcgttgcgtgaggagcctggcattcaggcatggaaagccaacgaccgtgtgttggcaaaggattgccagctgttcatcattaccaatcgcagcactttcgccgcaatcgatgagctcgctggtcgcatcgccgccactcgccctgatcgtgtgattcccgtactgaaataccgtatggaatccgacgtacttctcattgtcatgccggtggacagcggccaatgcctgactgactacatggtggataccgacaagccgctcagctacagcgccatccggtcgattatcggagaatgcgccaacgtgctgcgcgaggtcattgcggatactcccagcagcatcgtcatcacaaccgacaccgttcgagtgactacctccggtgtgcagattgccgatgcaccatgtgccacgatgctggccgacacgtccgctaccgatctgcgtacggacggtcctgaacggtatgcgattcgccagcttgcggcattgctctatgccctgctgacacgcacgccaagccaagcgacacccacattcaatcttcgcgccttgccgcaagacacccctggcgaattccgcgtgatttgcaagcgtggattggccttaagcaagcccgacgagcacacgttgccgatggctgcccttgtagaactcgacgccttgttgggtaattggaagccgctctctgaactgagcgatgctgatatcgctttgccgagcgtggaaagcgattgctcgattaccaaggcgatactgaagcccgccaacgagaccgatatcgtgcctattcccagcacgttgattaacagcagcagtcttccggaattgtctattaccccttccctgccggttcagccggccgccgtccccgctccgcacgcgatgtcaccggctcctctgcctgatgggtccagtactgctgacggcaaccagtctcaatctgacgcccgccgtctgtttgacttcaacctttctgacgcctgggagcacgagaatctttccggtgaagacaccggtgactggtacagcgaaatgaatccggcccccatcggcggtccgggtgataatactcggttgacggtgcctattgttaccggcggtatttccgatgccaccgtgggagagacgaccagtcgtattcccgtgttcgatgtcagcggccgtgctgtggcccccggtgaggaatcgctgcgtgctttggaagaggagcaggcccgcattgccgaagtaagcgccattcctccgagcttcacaccgaaggatgtgccggatgacgaggatgacagcaagctgcccgatgaacatctgttcggcaaactgtcgaccaaggtcgttgccatcattgtggctctgatattggtagtggcagcggctgtttgggcagtgcatgcgttccgatcctccggagacaatcctgccgatgcttccagcaactccagtgaaggtgactggcccgatatcaatgctgacgctgtgccattcggtggcagcaagaacgcgacgaacggtggcgccactgacgattcctcaaagtcgagtgatgccactcagagcgaatccagggactcggcatcagacaagtccaagaagtccgagactgctgattcgtcgtccaagaagaccaaggccaagaagtccagcgataaggattccagcgctgctccgcaaccgcgccatgagaacaacacggcgtttacgatttccagcgccaacttcctgtcgaatcctggcggccaatccgggtacgcatactacatgcaccttgaccagccgcaggatgcgtaccgcatggttatcaccatccgcacatccggtggtaagggctatattcgcgcaaataccactggagaccccactcagggcgagcaggtggccgaattcacctttgctgaaggtggcactactgaggtgaagttcaccaaagccgtcaatacgcaggatctgctgctgtgggtgccatcgggtagcctgccgcagaaccagctgtacatcgagaaggtggaggtcttctaatcggcatctataccgataactgacccaagaagggcggtaccgttcgcatacattcgacggtgccgccctttcttcgcgtctggctgaatgacatggaatatcgtatgggggtgtgacaatgtttcacgtgaaacataacgtcatcattatcggttctggtcccgctggctacacggccgccatctatcttggccgtgcaggtcttaatcctgttatggtcactggtgcgttgtcgccaggtggacagttggtcaacaccactgaggtggagaacttccccggattcccggaaggtattcttggcccggatcttatggatcgcatgaaggaacaggccaagcgcttcggtacaacctatatcacagacgatgtctcttccattgaggcgtgtgagagtgattcggtcaagccgacctatcgtgtaacgctctccgatgactcccagttggaggcatcagcactcatcatcgccacagggtcgtcattccgtaagcttggggtgcccggcgaacaggagctgtccggacatggcgtctcgtactgcgccacctgcgatggcttcttcttcaggaacaagcctatcgtggtcgtaggcggtggcgattcggcttttgaagaggcattattcctgacccggttcggttcttcggtcaccttgattcaccgacgcgatagcttccgtgcctcgcagatcatggtggaccgagccaaagccaatccgaccatcaccctgctgaccaacacagtggtgacctccattaccggcacctcctcccccacacagaacaccggtgcacctattgccattcctgacttgacaatcaaacgaccggctgtggcaccggccagtgtcagcagcattgccgtacgtaacgtggtgaccggagaagaaagcacgctggacaccaacgccgtattcgtggctatcggccatacgccagccactgattttgcagctggtgttgtggaccgtgacaatgatgggtatgtcgtggtgcagggtgccagcacggtgaccagtgcgccaggcatctttgctgcaggcgattgcgtggatcgtacttatcgtcaggcaatcagcgcagcgggcatgggctgccgtgcagcgctggatgcgcaggcctatcttacggactgattgcggcgacctgctgatggcttgctgttctgactgctgcctgtgacataggagcagcgctaggtcagtgttacagcatgccgcccttggatagtacgcaccggtcaaaggcatagaaaggcccctcaggcgacggagaatcacgatgtgtgatttgtcatcctccagactgaggggtttttattgcgacaggggctacaacgcaggcatacgcccctgccaggaatcacgcagaggctataacgtcttgcgcgtacaacgcactgcacagcaataatgccggcgacaacacgaatgttcttatcgtgttacacccatttggaatcggcatcgccttggctcggcaccagcagctgcaggatgcgatccatatcctctggtgacgagaagacgatttcgatgcgaccatgcttggtgctgcccttaatcgacaccttggtgtcgaaatgattttctaaactctgctggatggcggaaccaacccaaggattggtcttggacgtcttgggcttcttcggctgctcccccgacgcaatcttcatggcgacgatttcttcggtgctgcgtacagaaagaccttccgcaataatacgagaagccagcttgtccatttcctccggatcgctcaggcccaatagcgcacgcgcatgaccggacgatagcacaccggcagccactctcttttgcacagaggccggcaggttcagcagtcgcaaggtattggcgatttgcgggcgagacttggacaccgacttggacagttgtacttgtgtcaacccgaactcttcaatcatctgctggtaggcagccgcctcttccagcggattcaatgccacacggtgcaggttttccagcaatgcatcgcggagcatatcatcatccgcagtggttttgacgatggcgggaatcgtctccaacccagccaactgggatgcacgccaacgacgttcacccataatgagctcatacgggctgtccaaatgaccggcaaacggatttgtgctggattccgtctcgtcgtgcttggcggctttggccgcagcaatctggcttgccggacgcttgcgcacgactatcggttgcagcacaccaacttccttaatggaagcagacagctcattcaactcatcctcgtcgaagatggtacgaggctgatgtgcattgggcccgatatcagacagtttgagttcagccagataaccaccggctaccggcttgagttcgtccttcttatctgtgtcagcggtctttgccgccgatgcagtctgagatgtttcacgtgaaacatctttgacggtgacggatgtacgatgtgccgtctgagacgcagacggcttgccgccctgctgaggtgcggcgaccttaccggtttgaggtttctccgtaccgaaaaacaggtcgctaggatgagtaatggtgtccaatgcgggcatggatgcgcgtttaccggcggctttcttggctgctttgctggacgataccatctgaggcgcggcaggctttgattcctgctgggcagtagccttcttggcgggggttatgtcagcagtggccgccggagtagacgaatcctcctcaatcattgcgggctgctccgccactggctcctcccctggcaatgtggggaacaaagcgccaaggcccttaccgagtcgtgattttgatgccattacttgttcctcctcgcatcaatggtgtcaaggacttgttgcgaacgctgtgcgatttccaaagctgcttcaccatacgatatggcacctatgccacgaggatcataggcaatcaccgattgggagaaactcggcgcttcggagatcttgactgaacgcgggatggtggtattcagcacaatgctgggatagtgtcccttgacctcgttatatacttcacggctcaatagcgttcggcgatcgaacattgtgacgagcatggtggacaccagcagtactggattgaaatgctcctgcaccaaaccaatcgtgttgatcagctggccaagaccctccaatgcgtaatactcagcctggataggaatcagcatctcggtcactgcacacatggcgttgatgaccaagaggcccaagctgggcgggcaatcaatgaacacgtaatcatagtgtttatctgattgacgcaggtagaggtccaaggcctccttcaacaatgtgtttcggttgggcagatcagccacttccaactcggcaccgctgagatcgattgatgcaggcacaacatcaagtgtgggaaaatcaggacagaccgtgataacatcacccagatcggaacgcccctcgataacgtcatagaccgagggctctcccgatgcatgagatacacccaacgccgtagaggcattgccctgcgggtccatatcgatgaccaacacctgcgcgcccttgttcgccagcgccgcagcggtgtttaccgtggatgtggttttacccactccccccttctggttggccacggcaatacgacgggtacgttgaggtttggggaaatcggttttcttgagtacatcgtagcgtgagctttcatcagccatctggctgccaagcactgaaccgtgaccatcgaatattcgctgaagcgtttcggaagccgattctataggttccgactgatgatccttggtggacatcgctcctccttgcacagacgtaagttccagtgttctcattcgtatggacatgatgctcgttatccacaattgcgatatgcaatgtggataagtgtggataagtgtgaatgacgttgagtgttagattatgtatttgcagacgaaaaacattgaaaaatcagtgttttcatcattctgcacatcgtcccgtaaaaatgtggataacttatacgcacatatggaaatgtggataactcaatcagtactccactcatcgcttatccacaatcaccacgtgggtaggctcaagatccggtccgacagccgcctcaacgacgcgtggacgacgaccaccgaattttgcaatctccttgccagccttgtcgatttcagcctgagcagaccgtcccttcagtgcgatcaactgtcctgacggtttcagcaacggcaacgtccagccagagagtttggtcataggagcaaccgcacgacacgtgacaacagcgaacggatgaatttcccgcttccgtacctgctggatgacggcatcggagcgtccacggataatctcaacgttctgcagttgcatcaggtcaacacattcatgcaaccattcgattcgccgctccatcggttcaatcagcgtgaagtcatgatcaggcaaacacgcggcagccaccaatccaggaaaaccaccaccactgccgacgtcggcaactgttttgaagcgaataccattcgtcacattccgaacgtacggcacaatcgcagcggaattcagaatatgccgttcccaaatgatatcgacgtcacgggggccgatcaatccacgaggttcaccctcttcggcaatcttggcatggaaacgctccaacttcggcaacgcatcacccaagacctcagcaagtacaggtgacccctgcagctgatccgtcatagccatctccctcaccatgtttcacgtgaaacaatcaacatggaaaaggcgtcgctcattacgacgccattctccctacggtcactcttgtttgtttagagacgacatccgttgaacgtccttgtcatctcaaaaactcgtcgacctattactcctgatcaagctcgtcgtcttcggcaacatcctcgattttgttcttgagatacaccgtcacgtaacgatgaggctcctcaccgtgcgagcgagacttcagcccctcttcccgaaccacatcgtgaacgactttacgttcgaaggaattcatcggcttcaaatcatacggctcgccggaatccttcactgcgtcaatggcatccagggcgatatcacggaggtgctgacgcttgcgcttcaggaaaccgtcgacatccacaatcagatgagaacgctcgccggtcttctgctgtacagccagacgagtcaattgctgcagagcatcaacgacttcaccattatggccaataagatgtttgatgtcggtatcgtcatcagcaacgatttgcacggtggggcggtcattacgcacgcccatctcaatgtcgccctcatagtcggcgatatccagtaggccttcaaggtaatccgcggcgatgtcagcctcttcgttgagctgatcgatcgacttcacgtcatcctgtgccatacgctactccttcatgtcgtgtttgaattccaagtctaagccctgctcccccgaacagagaaagtaatgtcggtgcgtgttgaatgtttcacgtgaaacatcgaacgcgcaccgacatggtcgtcacttctttttgcgcttacgcacgggctgttgacgctgatagccctgagtggccttacgctcagcctcttccttggccttgaccaatgcttcttcttccagagagggcaggccggcctttgcgcggcgagcattctcattacgatgatcgcgcttctccttgtccgccgcagccggagagccaggggtcgggaatgcatacacctgccacagcgtacggcacaagttgcaaacgttgttggtcagccagtacaccaacacggcgaacgggaaggaaacacccgagaagatgtacatcaccgggaagagccacagcatggccttctgcatggtctcggtctgcttgttcatcgaagcagctgccatgttgcgcttcatgttgatgtactgaatgagccacaagcagaagcacatcaggaacacgaagataccgatgaccaccttgcctgcagtagatgcgcgggtgaagttatcggtcacactgacaatgccgaacacatcggtttgggtgaattgcttggcggttgctacgtcgaacgcgcccaacgcatcgcgtttaccgttggcaatgtatggaatggccgacagcgtatagaacatggacatgaacaccgggccctgaatgagcataggcaagcaggagccagccggattggcgtcattgtcttgatacagtttcatggtttcacgactcatggcttccttggacgcctgatccgtcttacctttgtacttgttctgaatgcgctgcatcttcggtgccaatgcctgcatcttgcgcatcgacttcatctgcttgtagaacagcgggaagatacaagcctgcaccaccagcaccaggatgataatggcaagcacccatgagacaccaatcgggctcatgcccagcatcgcgaagaagtcatgcacgatcttcatgatccaggtctgcaaccactcaacgggagtcaggattttatatagaaatccccaaaacccgctatcaagcagaaattcatttgagttcatcgttgggcctctctttgggctgtggccaatggtgtcagtcggggctcttcatgagccttcgaccacgaaaatctgtaaaaaatggaataccgttgtggaacatcgtcgattcccccacgactccacggccggcaacgcagtaatctcagcatggcgagcactccccctttgaacgcaccataccgttccaatgcctcaatggcataattcgagcacgttggataatacttacaacaaggcggtgtgtttgccgagatgtgctgttgataccagcgcaccccaccaatcatcaccgccttgaaagaagctgtcatgcctcagccaccttatgcgccactgtggcaaaagccttcgcgatctgctgatctagcgaagcgaacgatgcggtcgcggcactgggcttggcgcgcaaaacgatatcgcaatgcgcgggcagcagatcctcatgggctctggccaatacacgaaacctacgcttcaccgtattacgggtgaccgcatgtcctaccgatttggagacagctaatcccaaacggcgatgcaccgtccggtcgtcatcatcatgatggtcgtcgggcaccaaatagtgcacgacgatatccttgccacctgctttgcgccggcgtttcagcacggtgacgaaatcacgatggctttgaagccgctccacctcgactatgcctgtggcactgatcggaatgatcaggcggagagggacttgcggcccttggcacggcgacggttgatcaccgcacggccagaacgggtgcgcatgcgcaggcggaagccgtgcttcatgtggcgacgacggttgttcggctggaacgtcctcttcataatccattgctcctaggtctattcggcaacgcttcgcgctgccctcacgtgagtcaagctataccaaagtactctcacccctaccctcaagtcaaaacggacggagtattttcacatttcgacacgttgcgagacacgcctcaaatctcttataatcggcggaataccaaccattcacggccaaaagttatccacaaattacatgtctgttattcacaatccagttatttcaacacgcgacacggtggataacttgtctaaaccagagtaaatattatctgttgtacagatttcgccacaccgatagaaggggccaccatggttaacgcttccggcgaccccgtaatcgaggccgcccacatctggtcagacacgctgacggtgctcaaacacagcgcttcgctcagcccacgagaaaaaggctggttggaaggcgttgttcctgaaggcgtcttcggttcgaccatcgtgctgtgtgtggacaacaacgatacgcttcaagccattcagggtgatttgaacgattccctgcttcaggcattgcgtacggtaaccggcgaaaatatgtttcccgcgttcaaggtcgtgccgaaaaccgagcccgaaccgctttcggcggcaaagccggcgcagccatatccttcggaaatttctccgaccgtcgccgagttcggtaaagaatcctatggtgcaaagccggtagccgcaccgcgggaaccgatgcccgccaccgagtcgcagttcccggtcggtcagcagaagatgaatcgcgatcccgagactcatctcaataagaacttcacgtttgattccttcgtgcccggcgattccaaccgttttgcccgtacggtcgcactggccgtggccgaaggttccggtcaggatttcaacccgttgtgtatctatggcggatcgggcctaggcaaaacccacttgctgaacgccatcggcaactatgcactggtcaaggatcccgggctaaaggttcgatacgtcacgtctgaggaattcacgaacgaattcatcgacgcgctgcaaaacccgaaccaaagccagggtcagattgctgaattcaaccgtcgataccgacaggttgatgtgttgcttattgacgatatccagttcctcggcggcaaggaagccaccttggatcagttcttccatacgttcaatgcactgcatcaggcaaataagcgtattgtcattgcttccgatgtggcacccaagaatttgaagggtttcgaggctcgactcatctcgcgcttcgaatccggcctgaccgtagacgtcaagccgccggatctggagacccgaatcgcaattcttcgtatgatcgcctcgatgaacggttcgaaaatccccagcgatgtgttggacctcatcgccgaacgcttcaccgagaacattcgcgaacttgagggcgcgcttacccgtgttacggccgtggcctcgctgagtaatcagccggtgacccgcgccttggccgagcagacgttgcaggacttcttcaccaccgatgtggaaatcaagcccacggacatcatcagtcaggtggcgaagtacttccacctgacgtttgaggatcttgtcggtaaatcacgaaccaaaaacgtggctgttcctcgtcagatcgccatgtatctggctcgcgaaatgaccagtatgagcctgatggatattggccaggtctttggcgggcgcgatcacaccacagtaatgcatgcctgcactcgaatcagtgaccgaatgcagcaaaaacaggagatctataactacgttatggagctcacggttcgcctcaagcaaagcaacaccaactgacacaacgcttctgagagacgaaaaacggcacttttcggaaagtcagtccgaaaagtgccgtttttggttgctcaggcggattctggtggatacgtcgaggcaacggattcgagacatcagattcctcatggctcccctttgtgaggagagctgtcgtcgcagacgactgaggggagtttcgaaggggaacacgcaaaaaacccatgaaacgagagaatcgattctgaggaccgattttgcgggtttgggcgagcgagacgaaaaaagtgccgaaaacggtctccagaatcgattctcctcgacgaaaaacagccttcaacacgccgtgcgaaagtacgaaaaccaaaaaaaaagttatccacacagttgtgcacagatgtgggtaaactcggcggataactcgtggattacccactgttttgttgtggaaaactcgtgcataaccgcgacctcgatgtggaaaactcaaattcgacgaactggctgtggaaaactcgcccacttatccacaagccatgcagaatttgtccacaattttcagggacttatgaaccgttgcatttgtagggctcacccctacttatccacactatccaccggccttattacgacgattacttactcagttacgtgaaaagcatcatcgccacagtaacagccggtcacccatcgtacgtaagttcgccacctaacggctagaatatttctcagccaatccgacgaagggaacaatcacacatgaaagtcgaaatcgatactgcagccctggccgacgccgtagcctggacctcccgagtcatcgacgcacgtccctccaacccgattctcgctggcgtcaagctggaagccattgacggaacgctgcaattctccgccttcaactacgagatttccgctcgccaccacatcgaagccggcgttgacgaagccggttccgtactggttcagggcaagctgctggccgatatcaccaaatcgctgcgttcggagaaaacgtacctggtcaccgacggctccacgctgaccatcacgtccggcaagtcgaagttcaccttgcagctcatgcccgacaccgagtacccggatctgcctgtggtaccggccatgctcggccaagtcgatgccccgactttcgttcaggcagtgaaccaggcatgcgttgccgtctcccgcgaagaaaaccgcccggtactgaccggcgttcgcatgcaattccaaggcgacaaggtcgtcatgacctccaccgatcgcttccgtttggcccgcgccaccttcacttggactccgcagaacccggacgtcgacaccaccacgctggttcgcggctccctgctcaaggatgtggcccgtgctcttgacgagcaccagaacatccgccttgatttcgatgccgatagcccgacgctgctcggcttcgaaaacgccggccgcgtctccacctcccagctcatcgacggtgaattcccggcggtcgaccgcctgttcgccgacgaatacccgattcaggccgtagtcaacaagcaggatctgctcgacgccatcagccgtgtggctttggtcgccgaacgcaatgctccgattcgcatgaccttcaccggtcaggaagtggcgctgtccgccggatcggtcgacgaggcccaggccaacgaaacactggacatcgacatggatggcgacgacatcaccgtggcattcaacccgtcctacctgaaggagggtctgtccgccgtgaccgaaccattcgtgcgcatcaagatgacgaccccggtcaagccggtcgagttcaacggccagcaggaagctgattccgacgagtccatggactaccgatacctgctcgtgccgatgcgcttcaacaactgagatccctgaatttccaacgattcgctaatgcacatctcccgtctcgcactcgaccactaccgctcatggagtcaagtagtggtcgatttcgtaccaggcgtgaatatcctgttcggcaagaatggcttgggcaaaactaatctggtggaagccgtcgaagtgctgtccaccggatcgagtcatcgcacgtccagcacgttgccgctgatcgaacgcgggcagaccacggccaccatccgcgcgaacgtcgctgatgatgccggtcaaaccactacgtatgaagcgtcgattcatgcgcgtggtgccaaccgagcccgcatcaactcggggtcgtcgctgtatctgcgcgatatcatcggcaagattcccagcgtttccttcactcccgaagatcagcgattggtgtccggcgatccgggagcacgccgcgtcatgatgaatcaggctgcggctctgctcgagcccggatacatgcagacgttgcaacagttcacgcgcatcgccaaacagcgtgccacattgttgaagcaattgaatgccaatgccaacaatggacagccgatggatgcggttctgagcggtttggaaatctggaccggccagttcatcgaagccggtgtggcgttgacccgtatgcgcgctcatgtgatcggtctgcttgccgagccatttgccgcgatttacgccgacttggccggtgccggcgagcaggtgacgctcacatatgcgccttcattcgacgaagtgctgatgttcgacgatccacatccgcagatcagcgagcattttcaacgcatctaccccggtgaaatggctcgcggcgtgaaccttatcggtccgcagcgcgatgacatgaaccttgagttggccggtattcccgcccgcgagttcgcttcgaacggcgagatgtggacgatggcgttggccttgaaaatggcattgtttgaaatcgtgcgtgaccggttgggattgcagccgattgtgattctcgatgatgtgttcgcccagcttgacgacagccggcgcacgcagattcttgatttcgccagaaaacaggatcaggtgctgattaccgtggccgctgaaggcgatgtgcccgactatgaatcggcccatcgtatcgacgtggccacactggccgaacccgcttccgtaatactgccaactctgggcaatttgtccgattcgcgggaaaacgagagtttgggtaagtatgacggaaaacccgcggtggacagcgcgtccgtagaacggaaagtgtcatgaacccgccgatcgcccgccaactcaacctggacgagaccaaactgccggccgaaatattcgagcggctctcccgtcgcggggcgaccttgaaggactacagacgccgccgtgaagaggccatcgaaaacttcggcaaaccggggcgcgatccggctgaactgggcagcgtgatgaccaccatcgccggcaatggcgtctgggcggcgaatatgaaacttgcgcaattgcgcaaccattgggaccaagtggtggggcaggccatcgccagccattcggcagtcgccgatttcacggacggcgtactgaccatccgtgccgaatccacggtctgggccacgcagctgacctaccttatcccccaacttaccgataccatccgtcgcaatctcaaaggattgaccatcgccgagattcgcgtgaccggaccggccgccggatacacgcgcaaatgggctcggcggcggtagccaagataccaaacaaattcgcagaagcctcgctatggcgctcgtcgggttagacgagtaaaatcacatgcagtatggtcaaatggccagaagagccctttacgggcctcgtaagccatatcgcctccgtgaatgaccttcatgacggaggttgaccctgtagtcacggaaggaagcctgttggcagacgaaaccagcaaagaggagcagctgaaggcggctgcggaacgcatcaacaatgcggaattgaccgaaggcgaacttgacgaatccatggcccccgagcattatgaggcctccgatctgagggtgctcgaaggactcgaggccgtgcgtatccgccccggtatgtacatcggttccaccggcccgcgcggtttgcaccacctggtctatgagatcgtcgataactcggtcgacgaggcgctggccggatacgccagccatatcgaggtcaccattctgccggacaacggcatccgcgtggtggacgatggtcgaggcatcccggtcgatgaggtgcccggcgagggcgtctccggtgtggagaccgtgatgaccaagctgcacgccggtggcaagttcggcggcggcggttatgcagtgtccggcggtctgcacggcgtgggtatctccgtggtcaacgcactctccacccgcgtggacatcgaagtgcgccgtcagggcttccactggacccagacgtacatcgaccagcaccccaccgcgcccttgaagcagggcgagccgatgaccgaaggcgagtccaccggtacgtccgtgactttctgggccgacccgaagatcttcgagaccaccatctacgacttcgagacgctgcgttcccgtttccagcagatggccttcctgaacaagggcctcaagatcagcctgaccgacgagcgtgagaatgaccaggccggcgacgaggtggccggcgacgccgcggacgagcccggcgcaaagcaccagaccgtcacctaccagtacctcaacggcatcaaggactatgtcgactacctggtcaaggtgcgcaaggccacgccggtggaagaggacgtcatcagcttcgaggccgaagacctgaagctcggcatctccgccgaactcgccatgcagtggaccaccgcctactccgaggccgtgcacaccttcgcgaacacgatttccaccaccgagggcggcactcacgaggagggcttccgcgccgcgctgacctcgctggtcaaccgttacgcgcgtgacaagggcatcctcaaggacaaggacgagaacctctccggcgacgacgtgcgtgaaggcctgaccgccgtgatctccgtcaagctcaccaacccgcagttcgaaggccagaccaagaccaagctcggcaactccgaggccaagaccttcgtgcagcgcgtgatgaccgacaagctcggcgactggttcgacgcccacccgaacgaggccaagaacatcatccagaaggccatcgaggcctcccgcgcccgtctggccgccaagaaagcccgcgagaacacccgccgcaagtccatcttcgagtccgccggcatgcccgacaagctcaaggactgccagtcctccaacccggaagagtgcgagctgttcatcgtggagggcgattccgcaggcggttccgccatccagggccgcaacccgatcacgcaggccatcctgccgctgcgaggcaagatcctcaacaccgaacgtgccagcttggaccgcatgatgaagtccgacaccatcgaatcgctgatcaccgcggtcggcggcggctatggcgaggacttcgacatctccaaggtccgctaccacaaggtcatcatcatggccgatgccgatgtggacggtgcgcatatcgccaccctgaacctgacgctgttcttccgctacatgcgcccgatgatcaccgccggctacgtgtacgtggccatgccgccgctgtaccgcttgaagtggaccaagggcccgcacgacttcgtgtacaccgacgccgagcgcgaccgcgtgctcgccgaaggcaaggccaatggacgccagctgcccaagggcgaaggcatccagcgctacaagggtttgggcgagatgagctaccaggagctgtgggagaccaccatggaccccgagcaccgcattctgaagcaggtgcacatcgaggacgccgccgcggctgacgagaccttctcgatgctgatgggcgatgaggtcgaaccccgccgcctcttcatccagcgcaacgccaagaacgtgcgttggatcgatgcgtaacggaatcctccaacctccctcgtcagagggaggtacacaacggacttagacaactaaaggaacaacagtggcagatgaaaacaacaccggcgacgagcagttcacgccggacggctcgatggagccgttgagcccgcaggaggcggacaccaccgactacggcctgatggacaccggcgaacgcatccagcgcaaggacctgcagcaggagatgcgcgagtcctatctggcgtatgccctctccgtgatcgtcgagcgtgccctgccggacgtgcgcgacggcatgaagcccgtgcctcgccgtgtgatctacgcgatgtacgacggcggctaccgccccgatcgcggctacaacaagtgctcccgcgtggtcggcgacgtgatgggtaagtaccacccgcacggcgattccgccatctacaacaccttggtgcgtatggcccagtcctggtcgatgcgcaacatgctcgtcgacggccagggcaacttcggctcccccggcgatgacccggccgccgccatgcgttacaccgaatgccgcatggccccgctggccatggaaatggtgcgcgacatcgacaaggacaccgtcgacttcgtgcccaactacgacggcaagacccaggagccgaccgtgctgccggcccgcttcccgaacctgctcgtcaacggttccgccggcatcgccgtcggcatggccaccaacatcccgccgcataacatgcgcgaggtggcggacggcgtccactgggcgctcgaccacccggacgccagccgcgaggaactgctggaaaacctgatccgcatcatcaagggaccggacttccccaccggcgccaccatcctcggccacaagggcatcgaacaggcctaccgcaccggccgtggcctgatcaccatgcgtgccgtggtcaacactgaggagatcaacggccgtatgtgcctggtggtcaccgaactgccctaccaggtcaacccggaccgcctcgtcgtctccattcgtgaggccgtgcgcgacggcaagatccagggcattgccgacatgcgcgacgagacctccggccgcaccggccagcgcctcgtgctggtcttgaagcgcgacgccgtgccgaaggtggtcctgaacaacctgtacaagcactcccagctgcagcagaccttcggcgccaacatgctggcgctggtcgacggcgtgccgcgcacgctgagcctggacgccttcatccgccactgggtgaaccaccagctcgacgtaatcgcccgccgcaccgcgtacctgaagcgcgaggccgaagagcgcgaccacatcctgcagggctatctgaaggccctcgacatgctggacgaggtcatcgccctcatccgcgcctccgaagacaccgacaccgcccgtacgggccttatggggctgctggacatcgaccaggtgcaggcggacgccattctggccatgcagctgcgcacgctgacccgcatgaaccgcgacaagatcgtggccgagcatgaggaattgcagcgcaagatcgccgactacatcgacatcctcgccaagccggaacgccagcgcaagatcatcggcgatgagctcgacgagatcgtggccaagtacggcgacgaccgccgcaccaagatcctgccgttctccggcgagatgaacgtcgaggacctgatcgccgaagagaacgtggtggtcaccgtgacccactccggcttcatcaagcgcaccaaggccgacgaataccgcgcccagcaccgcggcggcaagggtatcaagggcaccaagctgcgcgaggacgacgtggtggatcacttcttcctgacctccacgcacaattggctgctgttcttcacgaacaagggccgcgtctaccgcatcaaggcctacgagctgcccgagggttcgcgcgactccaagggccagcacgtggccaacctgctgcagttcgcgcccgacgagaccatccagaccgtgctgtccatcccgaactacgaggtggccaagtacctggtgctcgccacccgttccggcaaggtcaagaagaccccgctggccgagtacgattccccgcgccagggcggcctgatcgccgtgcgcctcatggccgacgagaatggcgagaacgccgacgagctcatcggtgccgcgctgtgcaacgccgaggatgacatcatcctggtctccaagctcggcatgagcctcaagttccaggccgacgacgagcagctgcgtccgatgggccgccagaccgccggcgtgcagggcatgaagttccgtaacgacgacagcctgctggccatggatgtggtccctggcgactccgacaaggacctgttcgtggtgaccaacgagggcttcgccaagcgcaccgccatcagcgaataccgtctgcagggccgtaacggcttgggtatcaaggccgtgcaactggtcgagggccgtggtgccctggtcggcgcgctcgtggtgtccgaagacgatcaggtcatggccatcatgaagtccggcaaggtgattcgttccaacgtggacgaggtcaagcgcaccgggcgcaacacccagggtgttaccttcgccaagcctgacaagggcgacacgattctctccatcgcccgtaacgaggagaaggacgagcccgaggacagtggcgatgccgcggcgaacggcaccgccgagaccgcacaatccggcgagaatgtgaacaacgcggacgaggcgtgagcagcgtcctgaaaagctggtagcctcgcatacagcagaggctaccgccaagcctgttaaggagaaacgatgagcgagaatctcgaagacaacgagccccggatcataccgccggcagtcggcaatacgcagaacgatcatgtcgagccgctgatcggtactgagcacgctccccgcgtggcacgctccgtgtccagcgatccggaagaatccacgttgccttcttcaggtgccgccactcccgtgcgtccggcacctcgccgtagcgcccccagggctcgccgcatgagcttgtcgctgacccgcgtggatgcttggtccgtggccaaggtgacgttcatgctgtccatcgccgtggcgattattcaggtcgttgcctccgcgatcgtatgggtgctgcttgatgtggtcggtgtattcagccagattacgcagattgtgtcttccaccggtcttgatgcaggcggtttcgatctcaagaacgtgttgtcccttaccaccgtggtctccggcgtcaccatcttctcgattgttgaagtggtgatcttcaccctgctggccaccattgcggcactgatctacaacgtggtcagctcgctggtcggcggcgtgcacgtcacgctcggcgacgactgatatagctatactggcagaactcccctcagtgaaccgcaccccggttgttggactgaagtaattcagattcgatgatcggaggtgcggtttcttatgtgtggggttcgtaggcgtcgttgctgggccgagacttgggactccggcgacgctgggggtggcaggcgtcggtgttgggacagattttgtatctctgacgacgctgtggagggcttaccgtcgtcagcggtacagatcttggagttctgccgatgctgagggtgtgttctgtgtcgtttgcgtccaattcttggccctctgccgacgctgggcacagcaagcgtcgttgctgggccaagttttggactgccgccgacgcagagaatgcacacagcggtgttggtctgccagcgtgtggcagcttggcgccgttgaggaaggtctatgtggtgtggttccgccaaaggactggcaggttggcgctactgaggggactttatgggctcttccggttttggcatgtaggggccgtgcggtttcattcactttttcaatcacacaccgaatcaaaccgcacggcccctacgcaccaaaatgcgaagagccggtttcgctaactagtgcctatatgcctgcaatcaggctgatttgtgctgtcaggctggctggcgtcagcggttgatctgccgatgttgctgctcgtcagtctggactgttgggctttcgttttgacagcggaaggaagatcctcctcgcggtagggcaacaattatcagtatcataattaaggtaatcgtgattacattaaccatgatactcttattattgggcggtaggcggatcggagggctgcaatgtttgtcgcacgagagcacgagttacaagtgctggaaaagctgtttaccagcgattcgttcgaaatggtggtgctgtacggtagacggcgtgtagggaaaacggcgttgatcgacgaatttgtcaaagataaacgcgtgctgtacttcacggccatacagcaaagcgccaagatgaatcttgaagatttctcaagagcggcattgtcgttctttggtatgccggattccaccccgtcgtttggcgggtggtctgatgcgttatcgtttgttgctgaacgtgctgcacagactgacgaacgtatggtgttcgtattcgatgagttcccttatgcagctgccgccgagccagcattaccctccatgttgcagatagcaattgaccatggattcctcgccacaaaagtgacgatgattctatccggtagtaacgagggattcatggaaaacgacgtattggggcgtaaaagcccgctatacgggcgtcgtacagcacagattcgactcctgccattcgactatgcggatgcggcaaaattcctaacgaacacatctccgcaagaactggtccaatactatgcgactttcggcggtacgccatattatctggcccgtatacaggaagccgatggctttgaatccaatgtgctgcgcttgatgttcgacaacttgggcgtactgcgtgaggaacctatgatgctgttgcgtcaggagcttcgtgaaccggcatcgtattattcgatattgcaatctattgcgggtggtaattcctcgccaaagcttatcgctgaacatgcgggtgtcggatctgattcgattggagcatatctgaaaacgctggtcgatttgcgcttaattgagcgaaaagtgccgtttggtgaagatccgagtaaatcgcgcaagggaatgtatgtggtgagcgatcccttctttgcatattggttccgctttgtggggcgcaacatgagcattttggatggtaatatcagcgaggaggttacgagcagactcgcttttggaccagcgtttgatacctatgttggtcaacaatttgagacgatttgcctgcaatggcttattcgaaacaacgctatgggcaacctcccctttgttgccactcagttcggcaaatggtggggcaatgatccgattgctcacgagcaaaccgatatcgatgtgattgctgcggattcgctcgataaaacgattctgttcggtgaatgcaaatggcgtaattcattcaacgaaatggaggctattgaaaagctccatcagcgtgctggcttagtccgcggctatcaggcaggtaatgcgtggcttatgctgttcaccaagaatccggtgagtgagtccacgcgaacccgctacatggatgatgaacgaatggtgttcgtttccgcggaagagttatacactgcgtgatgcattactgggtgattgtgacgcggtatctagagtcctgccgacagccacgtggcaattacgccgaatcacgcaccaccaaatcggtgttcaggtgcatcacgcgcggtgaagagactccgttgatggctttgatgaccacgtcggccatggtctagcgcgctgatccatgtgctgatcgacggtggtgagttccggggttatggaggtggaagctaagttgttatcgggcttacgtatttggggatagcacttgttgctcgttgtacatatagcaatgcccttgcctcctcacgggaagcaagggcattacgctactgcttagtactgctcagaggcaagcgtcacagcacgccctgggcaaccatggcgttggcgaccttgacgaagccggcggcgttggcgccgagcatcaggtcaccctcgtgaccgtattccttggcggcggccagggagttggcgacgatctcttccatgatggacttgagcttggcgtcgacctcttcgaaggtccaagacagacggtagctgttctggctcatctccaggccggagacggccacgccaccggcgttggcagccttggccgggccgtacagcacgccgttcttctggtagacctcgatggcctccggggtggacggcatgttcgcaccctcgacgaccacggtcacgccgttgtccacgagcttctgtgcggattcgccatcaacctcgttctgggtggcgcacggcagagcgatgtcgcccttgacggtccacacgcccttgctgccctcgtggtactcggagcccggaacgcgctcggcatattccttgatgcggccgcgctcgacttccttgatctgcttgacgacctcgacgttgatgccgttcgggtcgtagatgtagccgttggagtcggagacggtgacgaccttggcgcccagctgctcagccttctgagcggcgtaggtggccacgttgccggagccggagatcacgacggtcttgccctcgaaggagtcgttgcgcagcacgcgcagggcttcctgggtgtagtagcacacgccgtaaccggtggcctcggtgcgggccagggagccgccgaattccagacccttaccggtcaggacgccggagtactcgtcgcggatgcgcttgtactgaccgaacaggtagccgatctcacggccaccgacgttgatgtcgccggcgggaacgtcggtgaactggccgatgtggcggctcagctcggtcataaaggcctggcagaagcgcatgacctcggcgtcggacttgcccttcgggttgaagtcggagccacccttgccgccgcccatcggcagcgtggtcagggagttcttgagaatctgctcgaagccaaggaacttgacgacggactcggtcacggtcgggtggaagcgcaggccgcccttgtacgggccaatggcggagttgaactggatgcggtagccgcggttcacctgaaccttgccctcgtcgtcaacccaggccacgcggaacttgatggcgcgctccggctcgacgatgcgctccagcacaccggccttctcgtactccgggtgcttctcgacaaccggctgcagggtctcgaagacctcgcgaacggcctgcaggaactccggctgatcgccgtcacgggcaacgacctggtcgtagacacgcttgatgtactcgtcagtgagcatgattctcctcgatttgctagggaattaagacggttttattctatgcgcgcaggcccttgctgcatagagtctcgctcggataacgggaaagctttcggcgtggttatggagtggctcaagtttccgtttgttagatttttcgggcgattgttggatgtctgtctatgcgtgaatcgggtcgaaatggaagctgcatcacaccggaggcacgttcatatagtggacataaaggcggacttgggtgatgtcgggtgtgtctgttggggatcgtgcggtctgtggggtttgtggggtgtggctggaccgtggggtcgtatggtttttgtgacctgtggggtttgtggggtgtgtggccgcaggtcttcggcgcgcaggttaccgggttcgcggtcagtgtgcgaagtaggtctgcagaatcatcgtggtctcggtgcttaccggcaccgtgcggtggatgagattgagcagttcttcaagtgcggtaggggaagccacgcgcaccaccagcacgaaactgggggcgccggccaccgaatagcaggagacgatgccgtcgatattgttcagcttgtccggaatcgaggattcggctgagtagtcgagcggggtcacgttgacgaacgcgctgatgggcaagccgcgctgctcttggtcgatgatggccttgtatcccttgatgatgccgcgcttctccagcttctgcacgcgcgactgggcggcggagactgacagtccggtcgcctgggccagttgcgcgagcgtggcgcggccgtcggcctccagcatggtgaggatgcgctggtcggtctcgtcaatcgcggtcatgatgtcttctccgttcgttgtgctctgtgttcactgtacctgttgccggaatgcgatggctttccgattttgcctggtaatttcagtagttcttcctgtgttttctgttgtgtggtggaatgtttacgtttaaagtcctaattggatgtaataattccttttgaaataagagaacgacgaaataattccattgaggagggatgatatgcagaagttttccaacatgtctctgtccgaagttgcatctgctgctgcgcctgctactatgcctgctgccggtcgggttgctgtgccgaccgccgagcccgcgagcctgtccgccgaagccctgaatatcccgcgctccggcatccgagacgtattcgaccgtgtagagcgcgtgcctgacgcgatttcactgaccgtgggggagcccagcgccacggccgcgccgcatatcgtggcagccgcttgcgaggccgcacaggctggccgcactcggtacaccaacgtgcttggcatccccgaataccgcaaggccgtggccgattactccgcctgtgtgaagggacttacttatgatcccgaaaccgagattcaagccgttgacggtgccacgattggcctgtttctggcgctgaaagccgtggtgggcaccggcgatgaagtgattattccctcgccgttcttcacttcctatgacgccgaagtgatgctgtgcggcggccgcccggtcaccgtggcgctgcgtccggagcacggcatgcgcgtgaacgcggcggacatcgaagcggcgatcaccccgcgcacccgcgccgtaatcatcaactcaccgggcaatccgaccggcgcggtaacctctgccgccgaactggcgcgtattgccgaagtatgcaagcagcacaatatttgggccatctccgacgaggtttaccatccgttcgtgtttggggaaacgttcggggaaacgcttgggggagaggcagccgtggcaccatcgatcgccgcggtgccgggcatgaaagagcgcaccattgtggtggaaagcctgtcgaaaacctatgcgatgaccggctggcgcatcggctacctgctggcacccgaagcggtcatcgaacagaccggcaaaatcgccgaactcatgcactcctcggtgaactccttggcgcaatacgcaggcgtggcagcactggctggcccgcaagataacgtggccgccatgcgcgaggaataccgcgccaagcgccagatcgtgctggacggtctggccggatgcccggtattgcgtctgatcgaaccgcaaggcgcgttctacgcctttgtggacgtacgcctgactggccttgactccggtgaattcgcagaccgtctgctggacgaagagcgcgtggctgtggtccccggcgaggccttcggcgaggaggggcgcggcttcgtgcgcctctcctacgccggagatgccgacgagctgtgcgagggcgtcgcccgtctgcgcgcattcgccgaacgggtatggaaccccatcaccggccaccacaccgccacctatcaccccatggaggtgctggcctgaggcttaaagcgaggctaggccgccattcggcctcgtcggcgcgagcgatggcctgcttcttggctcgcagcaagatgtagccgagtaccagaacgttggccagagctcgatgttggcatcgcgtcaaaacaaccgcattaaggctgccgcgtctcgtatcgttacgcgtaggggctggctgaggcgtaatgctgaagagtaacattgaagcgatggcaatcaagccgatttgagggagagaggcacacgatggcgtactgcggccactgcggaaatagagttgatgggccggcacgattttgcccggcatgtggagcgtctgtagacagcgcaccagttgcgacggcaccagtaccggccgcatcgccagccgtaccgcctgcgtcgataccggcacctgctgtgccggcgtctgcggtaccaccatcgataccagccgcgccggttgccccatcggtttacgccgcgtccgctgccccacagccggcaccaaccgttcccctgccggctttgccgattcccgctcctgccgcatatcaggcgactgatgcaaccgccgtcctggcaccgcagcgcaaatccagcaagaagctgatcgccgctttctgcgcattgcttgcgacgattctggtggcggccttggcgttcatcatccccaacttcaccgccgtcaaagcgatgctgggcttccggcccaccaatccgctggtcgtcaccttcgacgcgatcaactcgctgtccactctgcgcagcaccaaatacgaactcagaacccacagcagcactggcgattctcttgacgcgcggatgtctggcatgtattcgctgggcaaaaccaccaacgaatcctccgcgtccttcactagcaaaacagacgaatatgcaacgaccttcgcttggtacaaaggcgcattcgccgggaaatccgtttggcatgacgacgacccctactacatctactacccggccgaccaatatgaagatgacttaaggaacggcgttggtagtgatgtggcggacttgatattgaacgtcaaggatgcgttggtcaagaacggtgcttgggacatcaccggcgcggagcaaacgttctacgatcagctggacaagatgaacgacgatgggtactcgaacgacatcgaccgggtcaagggcacgaaaacgtctgccgaggtgaaggccgaggccagcaaattcatccaacaatatttcggcgtggagctggaagataagaatgtgcgcagccagctgttcccgaagacatcgtctgccaagtctgccggcaatacgcagctgtcgtaccaaatcgatatcaaagcgttgtctcagcatttcgtgaattactggatcagtcatgaagcgcagtatccgcatctgaaatcctgggtgattcagcaaatcgaggatgccggcgtggacgatgctgaagatgagtaccgtcaggcgctcgataatgtgcgcaactgggatttcggcacggatgaagagccggagatgccgactatcaccgtggatctgaactacggcagaaagcgtctgatgaattcgattgccataagcgtgtccggcaaggacgaatacggcgactcctataatggctcgctatcgttgacgctcagtcagcagaacgcggtgtctgtggacgaccccgatttgactgatatggtgagcaaagccaaggacaacaacggactggatttgtcctgaatatggtgcgtgggatgttgcggcggcgctaatttcctcggtgggctatcacgcactcttcccgcttgcagcggtctgctcgctgattggcgcggtgctgatcgtcttcatcaagtcagtgaagtaaacatacttattcatccctcttccttccataacaaacgagcggaggggttgggccattgttttgcggtgtgtccagtctctccgctcgtttatttgcttgattctgtggaatggaaggggcatgctctatgtcaaataagataatgcggaagggctgttctgcgtgcatatatcttgctgaacgtatttgagggtactttctggttaaagacacgccctatggtgggcagaatgctgccgttgtgtctggcgtcggtcgcaggacatgttgtatcatgagggcacaagcttaattcagccgtcctcaatctgattagtcgtcgggtcggattggcgtgatcggcttgcagggaatcatccggctcttccggttttggtgtgtagaggggatgcttataggtgggcttgtatggtgtgtctgaagccgccggtgtggaggaggctgcgggtgacgtagttgtcgaggttgcggaagccgagggcgatgccgcgtagggtctcgggcctgccgttgatggcctcggtgggaccgttggcggtgccgtgggcgcggtcgtcggatcgatcgtccccggtgccggcaccgtggtcggcgcatttgtcggaacggcgattggcactggagccggatggctgataagtagcggcttagacgcactttacgacaatcaggtgcacagaggcggtggagatgacccgggcagtcatttcaaggataatctcgggttttggaagtgggggtatctgttggcgttgttcactcggtatgtgttggtggggcgtcttgaggacggggcgcaggtgttctgggacacgctggagaagacgccggtcaagcgcaagctggatttcggcggcgattccggctgggcgcgggctggcgcggcggccggcggcgctgccgccgcggctgcgcccggcctgatggtcatgatccacggcatcgcccggctgctcaccccggacacgaagacgcaccacacgcataccgatgacgtgacgctgctggcttttctcagaccggtcactatatcccgcgacgcatggaacacgtacgtggcggtcgccgtgatgtggctggccggactcctcctgtactggggtttctgccggctcgtgttcggccggccgaacacctacgtccccgcctcgctggaggacttggcattcgcctcctccgtgcccgccacgaagctgcgctacatgttcggcggccccatcgtcggcacgctgttcctcatcgcgatatcgggcttccccatagcgatgacatggatgttctggtcgagcgcgcaatgggtcgacaccggcagatccacacctgactggattggatggttggctttcttctgggcgttcctcgccacatgctccccgattctgttggccttgcgtttcgtcggaccgtgggactggcggggacgtttcagcccgcgcgcgggcgccgaacgctggagccggctgaaatgagcacactgctgatgggggccgggatgggcctcatggtcgcaatctcgctcgcattcatcctcgcgttcaacatgtcccggctccgctggctcatggaccacgacatccacccgctgctcgaggagcacggactgcgcgaacccgacgacgggttcacgtcctccggcgccaaggagcgcatggccgcgttccactcggacgtcgcggaggcgctggcagcgccagaacgggaacgcgaagcgagggaacggcgacgattcactgtgttcgacccgacggtcgacaagttgccgctgccggcgggcccctacccgttcgaccgtccgacggcgtcctgggcacgcgacatctacgaggaaggcgattgggcgtacgccgacgcatgggtcagggggcggaggaagccacgcgtggtgcgcgagcaacgctacgactcgtggcgcaacgaagtcctcgcccgccacggcctgaccgacgcgccatccgccacgctcgaacacatcgaacacgccgctgcacgcatccgcgccctccaccacaccagcccagccgaagcctacaaacaagcctgcaaggaagccaccggcaacacggtcaacgacgaaaccaccggagaaggaaaagaaaacggctcttccggttttggcgtgacccgcagcctcctccacaccggcggcttcagacacaccatacaagcccacctataagcatccccctacacaccaaaaccggaagagccaattatctgccggtaccttccacccgagaggaaggtgtagtcctccgggtccgggcgatatcgccgcaaggcgaaggattttcgtgtaccgttccgtgaagacggagcgacaatgaccacgcggttggtctgaatcctcgaggggtggtccttaacaggaccacccctttttcgatggagagggccatggcgcactgggagaatccctcgaacaagaacgcaaaaaccctcagaatcggtattattccaagggttgtctgtggagctagccgggttcgaaccggcgaccctctgcttgcaaagcagatgcgctaccagctgcgctatagccccgtgagaaaaaaagagcggctcgcagccgcttcattttttctgtgggcccgggaggacttgaacctccgacctcatccttatcagggatgcgctctaaccagctgagctacgggcccgatccatacgcttcaaaagcgcacaagtaattacaataccattgaacggcggtatgtcaataacggcgtgtcgtgattgtcgcttgcgccatgattgccggctcgacggtcaatgtccagcaacgccacagccaatgcccagctatgtaaccttgcgttctcacaccgtaatgctgcggttacacctccctctctgcgcagaaatgtccaatacatatgaggcttctgctgttttcgtgggttgggctcttggttgtggtgggcgtatgtcgagtccgccgcggcggagcatgacgagggcgatgggattgttcgcgtggtggaagccgtaggccatgcggatggtgaccttgatcctgttgtcggacgcctcgagcctggcgtttgaacagcccaattcgattgtcccgaggatgtcgggcccatgacggcggatctttcgggcgagttcgacgatctcggggatgcggctgtgggacgcccggaaca

SEQ ID NO: 3771 - DNA, 13116 bp, Unknown
  R35_2m  MAG No. k141_1101
ccacgcgagcggctcggtccaatggcgtacctcctgagtaggcgtggcggtgtgttccgtagcccactgggactcgtaatcgaagacgacggcgaccttggacttgaccagcttggtgctcagcaggccctcgtcagcaagcttgttgaggtcggcacccagctcgcacacatcgcggaagatctgggagtcggggcccgcgtgaggaaccatcgaagagtgccacttctcggcaccggccttggactggcgccactggaagtagcagatggcgtcggagcccatggccaagtgggccagggagtcgcgcaccaattcgccaggctcgacgcgatagttgatcgggcgccaattgacggcggagctggagtgctccatgaggaaccacggattcttgcgggcgatgccgtcacatagggaggccgagtaagccagctcgtcgaagtgagcttcgccaggcgtgaagtagtgatcgttggacacgaagtccacgtcgtaaccccacttgtcataatcgatgccggcaccgccggcggagaccatgaagttggtggtctgcggcttgggggcgatctcgagcagggcgtcgcgctcggccttgtaaaagtcgagcagggcgtcggagctgaagcgcttccagtcaagcagcttgcccgggttcatgaagttgccgtcgccgatgaagcgcggcgggatgatctcggaaaaattgttcatgcgctgcgcccagaatgcggtgccccaagcgtcgttgacggcgtcgatggtgccgtacttcttctcgcaccacttctggaaggcgcgctcggcgtcttcggaatagtcgaagcggttgtggcagccgtactcgttgctcacatgccaagagaccacataggggttgtccttgtagtgctcggccatcttgcggcacaagctgagcgcgtagtcaaggaagaccgggctggtggcgcgccagtgctggcgggcaccgggctggcagacgtcgccgcggtagtcgacccagaggatctccgggtgggcctgggtcatccacatcggcggggatgcggtgccggaggcgagatcgacggcgatgccggccttaccaagcttgtcgatgacgcggtcgagccaatcgaagtcgtacacgccttcttcgggctcaagcttggcccaggagaagatggctacggagacgaggttgacgccggcctgctgcatgagggctacatcttcgtcccacacttcctcaggccattggtcggggttgtaatcgccgccgtaccagatgcgtggcttgttgcccgcaagcggctgcggccacttgaactctttacgttccatgatgattcagctcctttattgaattttatcgataatctgcgtccgcgggaataaacagcccacagggctgtttgcctaacggctcagctcgtcagaggggaggcttggcactattacctccctctgacgaggaaggttgtctcggcggagccgggacggagggagagaccccgccgcgaggcggtgaagacaccgcgtcggcggagccgactccatcactccttgacggcgcctgcggcgagtccggactgccagtacttctgcaggcacaggaacgcgatcaccagggggatgatcgtgatcagggagcccgtgatcaccaggttctggatcgcctggccgcccgcggtcgaggcctggtccttccactggttcaggccgatggtcagcgggtaccagtccgcgtccttgagcatgatcaacggcaggaagtagttgttccacgtcgccacgatcgtgaacaacgccgtcgtcacaatgcccggagccaacaggggcaaggaaatctgccagaacgtgcggaactcggacgcgccgtccacgcgcgccgcctccagcagctcctggggcacggcctgctcgctgaagatccacatcaggtacaaaccgaacgggctgatcagcgacgggatgatcatggcccacggggtgttcgtcaggcccaatttggcgaacaggaggaactggggaaccgccaaagcgatgcccggcacgctgatcgcgccgatgatgaccacgaacaccgctttgcgccccgggaagcggaacttggccagagcgtagccgcccatgatcgccagcagggtcgcgccgccggcgccgaccaccacgtacaggatcgtgttgaacagccagcgcgcgaagataccgtcctgataggagaacaccgtcgcgatgttgtcgaacagggcgaacgtcttgccgaagcccaggccgaacgtactggtgaagtcggcctgcgtcttcgtcgcgttgatcaaaaggtagacgaacgggaacaggcagtacacggcgaagaccgcgcacaggacggtcaacaacgtggaacgcctcgggttgttcacgttcgcgaaccccgccttcgcgctgcgcctgcgttcggcggcctcgtcggcggcgatcctcttctggcgggccttctccgccttcctggcggccttctcccgggccttgagctcgccgtcggtcaggcgaccggcggccgaagtcgttgctgcactcatcacatacgctccttcacgatcatcatcgattcctcaacacgaacagcagtagtcgtcgtcacttcatctgctccttgaggctgttgagctggacgatgtaggcgatggccatggtgatcacggccatcacgatcgccaacgcggccgcgtagttcgactggttgccggagaagctcaggttgtacgcgtacatgttcggcgtgtaatacgtcgtgatcgcattaccaggaaccatgttctgcaaaatgctcggctcgttgaacagctggaacgagccgatgatgctgaagatcaccgtgatcgccaggctgccgcgcaattcgggaagcttgatgctcttcacgatctgccactccgacgcgccgtcgatgctggccgcctcgtacagggaatgcgggatggtcgacagcgagctgtagaagatgagcatgttgtagcccgtgaactcccacgtcacgatgttcccgatactggccaacaacacgctgggggcgagcacgtcgatgtccgtgcccaggaaatcgttcaacgaacccaccaggccgtacttcgcgccatacacgaaaccccagatcaacgtcgacaccaccgccggcaccgcgtagggcaggaacgtcgagatacggaagaacctcgtgccatgcagcttcatcgaatccaacgccagggccatcaaagccgacaggcacagcatgatcggcacctgcacgcacgtgaacagggccacacgaccaacactgctccagaactggccatcacccaacaggcgcgcgtagttctcgaagccgacgaacttggtgccgccgatcatctgcttcttgaagaacgaaatataaacggcgtacacgatcggcacgatgaacacgaacacgaacaccaccgcaaaaggccacatgaatttccatccacgccaatcggccttgtgcttattcacacgagccttgcccgaatgcacgggcgcagctgcgatatcggctgaagccattcccaacccctctccttcgaaggttgaccaaaatgtttgcgttatcatcataacaccatttgtaacattgtccaatcgtgttgagtaccgtgttgaattaagggtttctcagtcactctgctacaatggtcacgaagacaacgatgttatcgttaccgtaagcggccctaagataagcgttgcaaacgaaacaccgacattaatgagtcaagcgagggtgaaatgtcgaggccaacacaggtgtccatgcaagacatagcgaaagccgccggcgtttcgccacagacagtgtcccgcgtggcgaatggcagcgatgcggtgaaacccgaaacacgccagcgtgtcgaagccgcaatggaacgccttgggtatcgtccgaattatgcggcccgagccctaaagcacggccgcttccagaatatcggcgtggtgatgttcaacaccaccgcgttcggcaacgcccgcatccttgattctattgtggccaacgcggccgatgacgattattcagtcaccatccagaccatgcgccacggtgcggaacgcacgctttccgccgccatcgatcgcatgcagcgtcagccggtggatggtgtcatcgtagtgctggaggaacgcatctccgatttcgtcggatacaagcctccgcgagaacttccagtcgtgctcatctgcgaatccgccgccgaccactgccccaccgttgacgccgaccagtatggctgctcgaccgctatcgtcgattacctgatgagcaaggggcacaagaccgtctaccacattgccggaccgtccacctcgcgcgccgccgaaagccgcgcccgcggttggcgagaagcgttggaacaaatgggagcacgcgtaccgagcatgtacatcggcgattggtgcgcggattcaggctaccaggccggcgtggcgttggcccacgaccccgactgcacggccatctacgccgccaacgaccaaatggcatacggcgcaatgctcgggttgcagtcagcgggcaagcgcgtgcccgaggatgtcagcatcgtgggcgtcgatgattcgctggcagatatggttccgcgcttgaacctgacgaccatgaagctgcgctttgacgacattggcgccaccgccttctccatggtccgccgtcaatgcgaaggcgagaagataccggtcggcgtcaaaaccgtaatcccgccggaactgatcgaacgcggttccgtgcgcgacatcagctgacgagcggcatgtgctggcatccactggtacctgtcagtgattcacccgccagtgatccataggcaattccgcaccgaccaatcgactcggttgtgcaatattctgcacatttccagctatgtgcagaatattgcacactttactatactgtgatatattttgcacatgattgtcatggatatcgccgaatacgcgcggcttatcaaggatgaaaggcaacgccagggcatcagtcagaccgacatggcccaacggctgggcgtgtcacgtcgctggctgatcgaatttgaacacgcccgagtccccaatcccggattctccaccattctcagcgctctgactgagcttggcttgtcgctggatgtctgcaaaaccccgcagcccgccgaactctatgaatggtgacaccatgagcgaaaacactctcaatgcatttctcggcgaaacacccatcggccagtttcgaagaacaaacgatggcagcattattttccaatatcacgattcctatcgttggtcgcaatcacccacaccaatatcgctttccatgcccattaccgcagccgaatattcaggcgacatcccgcgtaatttccttgaggccctggtcccggaatcccctcaggcccgagatgaagccatgcgattgcatcatgcccgatcgacaagcgcatttgatctgttgcaagccatcggattcgatgccaccggcgcattacggctgtccgccgacccgcacttgcccatagatgacgattcgcttattccaatcagcgattcgcagatcgcgaatcgactacgcgcagccgcccccacaggcatccagtccgcaagcgtagacgagcattggtcggtcgcgggacagcagggcaagatcgcactgaggaaccgcaatggatcatggttctccaccactggaatcgcgcggacgactcatatcatcaagcccggcataccgacccttccacaccaagcattcaacgaacacatcaccatgcgcattgtggaggcgatgggaatacccgtggcccacacctcttttcacatctttgatggggtcccagccatcatcagcgagcggtatgaccgtatagtgtccgccaatggtacggtgacggccctgcaccaagaagactttacccaagcgctgggcattccctcatcgctgaaatacgaggaacacaacggcccaacgtccaatgcatatgcggaaatgttgcgcaagcacggtctgcccgatcaggccgaaagcaatatccgagccttcaccgacggcatcctcgccagttatctcgtcggggcaacagacagccacgccaagaactactcgctattgctcgatggcgcgtccgtgcggcttgccccgctctatgaccttgcttcggtgttcccttatttggggcatggcaagcagatcataaatgccactttggcgatgaacatcggcggacgccgagatcttcttcaattacgccgcaaacatctggaacgattcgcacagcggatgggattagatgaggaatccgtgattttacgattccacaccttggtggataggctgccggaggcattcgacagcaccgtgcaacccgctcacgacgttatcgcgagcattggtgcgcaggaattcatcgatagctatcgcaagcgcatcatgatggtgtacgacgatgcaatgagctggatggccagtcgaaagggacagtgattcggacgggcggggattggtctcgccatcccccctaagaaatcagatcttaagcggcacacgggaaacgaattcgcgcttctcgcctgttattggatcggtgaatcgtagcacacgcgccactaattgcagcggctggctgaaatcgtcgtaggggcgtgtctggatgcgcgggtagaagtcgtcgcccacgatgggcaggccgagcgaattcatgtggacgcgcaattggtgggttttgccggtgcgcgggtggagtgtgtagcggcagatggggtgatttcccggatggggaccaccctccggcgcttcgcgccacctcccgccagcgggagggaaacagaggtcaccgcgctcgatgagggtttcggcgttggccaaacccggttcctcgaatgcggccatcgtgccgtgttccttggtgatgtgcgatcggcgcagcaatgggaacgggcgtggcggttcgacctgcatgatcgtgccgaatcgtgggccgctgatcggccggcagggtgccaggcattcatagatcttgacggcctgccggttctggaacagcatctgatacgcgccgcggcaggccgaatcccgcacgaacaccaatacgccggcggtcatgcggtccaatcggtgcgctggcgtgatgtccggctcccccagccgctcacgcaatcggatcagcgcggtctgccgataccacatgccgcgtggcatggtggccagaaaatgcggcttgtccaccacgatgatccgctcgtcctcatacagcacgtccatctcaaacggaatatgaggctcgtcaatcacataccgatgtggcttactcaacggtcacggacttggcgaggttgcggggcttgtccacgtcgtagcccttgagctttgccatgtccatggcgaacagctgcagcggcaccacgtcaaccagcgggctcatcagcgttgggcaggcggggcgccagaacaccacgtcagcgtaccgttccacatccgggtcgccctgctcggccacggcgatgatgtacgcgccacgagccttgacctcctcgataccagagatcaccttggcgtgcaacacattgcggccgcgctgcggcggcacgatgaacaccacgggctcaccctcgtccaccagcgcgatcggtccatgcttgagctcgccggccgcgaagccctcggtgaacgtgtaggcgatttccttgagcttcaacgcgccctcaagcgccaccgggtagcccacgtggcggccgaggaacaagaaggagttggcgttcaccatgcgctcggcggccgcctggatggtcttgggctgggtgtcgagcacccactgaatcttgcgcggcatgtctttcagggagtcgagcatctgatgaatctcatcgcggaacatcgcgcccttgacctgcgccagatacaggcccagcaggtaggcggcggtaatctgcgccacgaacgccttggtggatgccacggcaacttccgggccggcgtgtgtgtagagcacggcgtcggattcgcgcggaatggaggcaccctgcgtgttgcagatggccagcaccttggacccctgttcgcgcgcgtggcgcagggccatcagcgtatccatggtttcgccggactgagaaatggccaccacgagcgtacgcggggtcagaatcgggtcacggtaacggaattcgtgcgcgagttcgatttccacggggatacgcacccagtgttcgatggcgtatttggctacctggccggcgtagctggcggtgccacaggccacgacgatgattttgtcgatggccttgaagtcgtgttcgtcgatacgcacttcatcaagggtgatgtcgccattcgtgtcgaagcggccaagcagggtgcgctgcactgcggcagggtcttcgtgaatctccttgtccataaaggaatcccagccgcccttttcggcggccgaagcatcccaatccacggtgtaggtcttcgggttttcgaccacgttgccgttgaaatcggcgacgatgaccttgtcggcggacacgcatacggcctgatcctggtcgacttccatggcgcgcttggtgtaggccacgaatgcggcgacgtcggaaccgaggaagttctccccctcgccaaggcccacgaccagtggcgaatcatggcgggctccgaccacgatgtccggctggcggcagtcggtggccagaatggtgaacgcgccttcaagcatgcgggccatacggcgcacagccttgaacaagtctggcttgccttcgtccgcgataatcttgtccacgatcttgccgagcagcttagcggccacctcagtgtcggtggcggaggcgaatcggtagccttcggcttgcaggtcgaaacgcagctgagaggcgttttcgatgatgccgttatggatgatggccaccttgccgtccatgctggtgtgcgggtgggcattcacgtcgctcggctcgccattggtggcccagcgcgtgtggccgatgcccaccgtggcgagcggcatcggcttgcgctcgatgtcttcgaccaggttcttcaaacggccggccttcttgcgcacgaccaccttatccatgccgggcgcggtcagcgccacaccggccgagtcatagcctcggtattccagacgttccaggccttgcaggcagacctccaaaggcttgccgcatgccgtttcaatatttcccgcgtatccaacgattccacacatggctcaccagcctagcggacgattattgcgcaaagcgaatccaacccgccgcctttgcaggattggaacatgccccttcgtgaaaagcgtacgctgagttcatcagcgtacgcttttggagctgcaacaacgagccttcctacagcacatgctgtaggcggagccgtaaagcggggagcccagtgggctccccgtaggcgacgccgaagcacgacagtgctgaggtaatataacagccttcctacagcacatgctgtaggaagtccttaaacctaggctcggtggggtggtcgatgatgtcggggccgcccttttctacgactacgccgccgtccatgaacacgatctggtcggcgacttcgcgggcgaagccgatttcgtgggtcacgcacaccatggtcatgccttccttggccaaggaacgcatgacgttgagcacttcgcccaccagttcggggtcaagggcggaggtcggctcatcgaagagcatgatctccggcttcatggccagagcacgggcaatggccacgcgctgctgctgaccacccgacagctgggaggggtaatagtccatgcgatcgcccagaccgacgcgctgaagctcggccacggccaggtcacaggcggctttcttggactggtgctgcacgtggatcggggcttccatcacgttctccagcgcggtcatgtgtgggaacaggttgaagcgctggaacaccatgccgaggcgagagcgctgtgcggcgatctccttatcgtccaaggtctgtagcatgtcctggccgtttttggtcacgtgcttgtagccgatgagttcgccgtacacctcgatggaaccgccggtcagggtttccagctggttgatcagacgcaggaacgtggacttgccggaaccggagggccccagaatcacggtcacagtaccgggcataacggttagatcgatgcccttgagcacatgcagcggcccaaacgccttgtgcacctgcacggcctcgacggcaggaatcacggaaccgtcagccgccttgcgcacgaccggagcggagttggtgatgtcattcgtagtcataatcgcgctcccgccttatgcattcaatccgacaaatgtggtctggttgagcttgtccacgtcatccttcggttcaccgtcggtcttacccggcaatggcgtctgcttgcccttggtgcccaccggtcgggcatcgaagcccctgccgaagtgcgcctcgaggcgggactgcacaaccatcagaatggaggtgatcagcaggtaccagaagcaggccacgagaagcagcggaatcggcttgtagatacggttggcgatggcgttggtggcgaactgcagttcgagagtgaacggcacggcggtgaccagcgaggtggtcttcagcatgccgatggtctcgttgccggtgggcgggatgatgatgcgcatggcctgcggcagcacgatgcggcgcatgatgagcgtgcggttcatgcccagcgccttggccgcctcggtctggccggggtccacggcttcaaggccggcacgcacgatttcggacaggtaggcggcctcgttcagggccagaccaatccatgcggcgttgaatgcggtgaccaccacgttggagtcgatgctccagaactccaccgaggtgaacggaatgccgaggctgatcttaggaatcagcacggcgaacagaccccagaaaatgagctgcgtgtacacaggcgtgccgcggaagaaccagatgaagaaccagctgacgccgcgcagcaccggattgatggatttgcgcatgatggcaagaatcaccgacaggatgatcgccacgaccatggagatcacggtaagctccaaggtatagcgaatgccttcaagcacgttctcgttgaacaggtacttccagacggtgggccaatccagtcgcggattggtaatcaagccttgaatgagcatcgcggcgagcagtaccacgatcactgcggccacaatcgggccggggcgcttgaccggcaacgccttgatgcggttggggatgttcagcccctcaccgtcgacttctttcttcgccataatctggttccttggatgtgttaggcagcctgaactgcaagttgcaactagcgttgaaccttagtgcacgaatggggcgactgtgttacaaacagtgcgccccattcgaattttcgcgacagcttgtcgactattcgacggccgggttgatttcggccttgtccagtgcgccggattcgacgccccagtgctggagaatcttagtgtaggtgccgtcgtccatgagcttttgcatggccttctgcacggcttcggcggtctgggaatcgcccttcttgatggcgatggcgttcggcacttcatcgaagtccttgccgagctgttccagctgaccatcggtctgggcgatggcgtagccgacaaccggggaatcggcgaagaagacgtcggccttgccggtcaccacagcggtggtggcgtcggtctgctgcttggaggactggatggtgatgtctttcttgccgtccgccttgcactgcttggcggtcttgttgatggcctcttcctcgacggtgccggtctcgacggcaacgttcagaccgcacaggtcgttctcatcgacgttcttgggggtgcctgtggccactgcatagcccatgcctgcggtgaagtaggagacgaagtcgacggattccatgcgctccttggtgatggtgaaggcggcgatgcccagatcgtacttggagccgatggccggaatgatcgtatcgaagttggaggagacgatttcggtctcgagaccgaagatgttgcccatggcgcgggcgagatccatgtcgtagccgatctgggtcttgccgtcggcgtcgaggaattcggccggggcgtaggaggggttggtgccgatggtgagcttgccgtccttggtcacggattcaggcagcagtgcggcgatggtgtcatccttctccacggagctgacatcgtagctggtgatggtggcggcatcggagcccttggcggaatccgtaccggcatcggccttgtcggaggtgccgcaagcggcggtggcgaacagcatggccgagctcagtgcaatggccataatggacttcagtttggtggactgcataatcgtttcttcttctctcttacgccgcttcaacggcaacgatcaacggttaagcatatttatacactacagtgcatacatatacaaaaagactcccgccgcagggcaacgggagtcttcatagtaaccgaaactactcgacggacgggttgatctcggccttgtcgacggcgccggaagagacgccccacgtgtcgaggatcttcttgtacgtgccatcatccatcagcttctggatggccttctgtacggcctcggcggtcttggaatcgcccttcttgacggccacggcctcaggggtcacaccaacgtcctcgccgagggcctcgagcgtatcaccggtctgcttgatggcgtagccggcaaccggcgtatcggcgtagaagatatcagccttaccggaagccacggcggtagtcacatcggtctgcagcttggaggactggatgtcgatggcatccttaccgtccgccttgcactgctcgttatccttgttgacttcctcttcctgggtggtaccggtctgcacagccaccttcacgccgcacaggttcgaggagtcgaccttgttcgggttgcccttctgcaccacgaacgtggaaccggccttgaagtaggtcacgaagtccacagcctccatgcgttccttggtcacggtgaaggaggagatgccgatgtcgtacttggagccgacggacgggataatcgaatcgaacgtggaggagacggtgttttccttcagtccgaacactgcggccagcgccttggacaggtcgacatcaaag

SEQ ID NO: 3772 - DNA, 9532 bp, Unknown
  R35_2m  MAG No. k141_1297
cgcacgcggcggcttcaagctgcccgaccagaaggaagacgacatcgaggccgtgctcggccaggactgggaccgcccgaccggtgccggcgtgggccgcgtgagccacgaccagaccaccgccaccaacctgtacatcgatcatctggtggccaccatcgctccgctgaacgatgacaaaacccagcccaagccgctcaagggcctgaagatcgtggccgactgcgccaacggcgccacttccgtggtggctcccgaagccctgcgccgtgccggtgcggatgtaatcgtgatcaacgcctcgccggacggctacaacatcaacaagaacgccggttccacccaccccgagcagctgcaggccatggtcaaggccaccgatgccgtgatgggcgtggccttcgacggcgacgccgaccgttgcctcgccgtggacgaagacggcaacatgatcaacggcgaccagatcatgggcattctggcccgtgccaagcagcgcgaaggcaagctcaaccacgacaccctcgtggtcaccgtgatgagcaacctcggtctgaagctcgccctgaaagacatgggcatcaagaccgtggaaaccgccgtgggcgatcgttacgtgcttgaggaaatgctcaagggcgattactcgcttggcggcgagcagtccggccacgtgatcaaccgcgaattcgccaccaccggcgacggcaccctgaccgcactgaccctgtgcaacgaggtcgtcaagtccggcaagagcctgaaggagctcgccgccgacttcccgcagctgccgcagaccctcatcaacgtgccgaacgtggacaagaaagccgccgccaccaacaagcgcatccaggatgccgtggcccgcgaggaggaactgctgggagacaccggccgtgtgctgctgcgcccctccggcaccgaaccgctcgtacgcgtgatggccgaagccgccacccaggcctacgccgacgaagtctgcacccgcctcgccaagatcgtcgccgaagaactcgcgctgtagcacccttccctaaggaaaagcaatgtttggaaagaacgccaaagtcgacctcgaactcaaccgtgatgtcgaacaactcatcaaaaccggcggcaaggagaagctcctgcccatcgtgcaggccggcgaaccggtgttgcgccaacggacggtggcctaccatggccagctttccaagcgtacgctcgccaaactcatcgatacgatgcacaccaccatgctggaggcgcccggcgtggggctcgccgccacccagatcggcttggggctcgcgctcgccgtggtcgaagaccacgtgcgcgacgacgaggatgatccgcgcgaaatcgcggaattccccttccacgtgatcatcaatccgagctacaaacccaccagcgacaaaaccgcctcgttctacgaaggctgcctgagcttcgacggataccaggccgtgcgcaagcgttggctcgacatcaccgccgaatgggatgatgaagacggcaagcaccacagcgagccgttgcacggctggcccgcacgcatcttccagcacgagaccgatcatttgagcggcgaactgtatatcgatcgcgccgaaatccgttcgctgaccaccaccgaaaacctcgaggattattggtgcgacgacccggtacccaccgaggccgccgaagaactcggcttcgcactatgatcgaccgcacatggctggacgccgccaagggagacattccccaatgggcggcgtccatgcccaaagacgccgacggcaccaccattgactgggactgggtgcgttcgctggacctgatgcatggcatcagcgtattgctggcgcttgctgcagatggtgagcaatatggcgaaaccgcagcacagcctcagctcgggttggaccaactggaactgacgccacaagctatccacgacgcattgaagatcgattacgccacacgcgagcatctggaatcaatcatcgcccaatgcaacagcacattcatgaccgattacgatcgattcatcggctcctatcgtctgcctcgcgcgctcgcctacgccaatcgtcggctcaacgacaacatcaacacgctgttgcatctgggcgaacagcaacacctatgggtggtcagtcgcgaacggcgggggaggactaccgttgccgtgctcaggccgtactccggcagccgcccatcgaacgatgaccaaggcatgctgaatctgagcggtgaaaccggtgacgcatctgccggaaacactgctgccgaaaacagcgatgtcaagttccccacaacagtcgccttggacgatatccaagaccgtacggcggcgattcttgacgcacgcgccgaacgacgtaaggcccagcgcttccagaagcgtgcgggcgatgcggcgatggcccgcgccaatctctccggcgcgacttcgccgggtggtgccgcctcgtctggcaacgctaccggccaccatcccaagcccgactggcgcgacgcctatctgcccggccgcgacgtggacgcggtgatgggcatcgacatcgaaaccaccggcatcgatccggcgcgtgactacatcatcgacgtcggcttcgagttcatgaacatggccagtccgcgcccggccggcgaacctgagacatacgcctatgagcagggctattacgccgccggcgacgcctacggccagtcccgtctcgcttttggcgtgccgccggaaaacgcggcgctcggcaacgccctcatcgccaaactcaccggcatcgatgtacgcggccgcagcagcgaggccgggtaccgactcttcgacgaatggccccaagcccaggccggcctgctcgcgcggcttacccagcagccgtacgtggcgcataacgccaccttcgaacatagctggttcatgctgaacgtcgccggatacgcggaaagctaccgtgccgggcgcatcaccatcatcgataccctgccgatgagccggcagtgggaccccggcgcggtacccaccaacgagcatccttacggagacaacacgctcgacgcctacgccaaacgtcagggcgcgcttgattccgcccacaacgaacgccacttgggccttgaggattcgcacatcatgctggtggccatgaaacaccatctggcggcgctgaaagcgcaaaggaaagggccgtgggggcccgccggcagggctggcgtcggcggcaagtcctgcggtcgtaagcggtgagtacactattggtctcgtgagtaactatcaggacggccgacagcagcgtgagaaccgccgccgcaccatcgtgcgtgtggtgtgtgtcgtcatagctgtggccatgctcggctccctgatcatcccggcgatttacgcggggctttgacgttgccttcgcatattcgtgcccgcagttgaacacgtctgatgcgagggatttgtgaggtcgcccggccggctatcggcaaggcaggcccggaaccttctggcagcatggattgcaggcggatgcgtgtgtggcgcggcaatgcccgccaacgccagaggaatgtgcgaaggctgtcaacaaggacgtgacttcccaaagaatctcaaagaatcaacagtaaggtaaaccacgatggcagaatttgactttacccaggcgatcggcgaagcccgcgccaaatacgaatccatcgccaaggcgctggacgtcgaccggctcaaggccgatatcaaggatctcgaaacgcaggccgcggccccgggcctgtgggatgatccggaaaacgcccagaagatcaccagccggctgtccgccgcggaatcgcagctgaagcgtctgaactccgcctcccagcgcatcgacgatgtggaaacgctcgttgaactcggccacgaggagggcgaccaggactctctggacgaggcgcaaagcgaaatcggcgagattcagaaggatctcgaccagatggagatccagaccctgctcgatggcgaatacgacgaacgttccgccgtggtgaccatccgctccggtgccggcggcgtcgacgcggccgacttcgcgcagatgctgttgcgcatgtacctgcgctactgcgagcgtaacggcttcaaggccaaggtcatggacacctcctacgccgaagaggccggcatcaagtccgccaccttccaggtggacgccccctacgcttacggccgtctgtccgtggagggcggcacccaccgtctggtacgtatctccccgttcgacaaccagggccgccgccagaccagcttcgccgccgtggaagtggtgccgctggtcgaggccaccgaccatatcgacattccggatacggacatccgcgtggacacctactgttcctccggccccggcggccagggcgtgaacaccacgtactcggccgtgcgcatcacccaccttcccaccggcatcgtggtgaccatgcaggatgagcgttcgcagattcagaaccgtgcctccgccatggccgtgctccagtcccgactgctcgtgctgcgccacgaggaggaggccaagaagaagaaggagctcgccggcgacatcaaggccagctggggcgatcagatgcgctcctacgtgctgcacccctaccagatggtcaaggacctgcgcaccggctacgaaaccagccagactcaggccgtgttcgacggcgacatcaacgcgttcatcgaggccggcatccgctggcgccatgaacagcgccgcgccaccgaaaccgaggagtaaacagcattatggcactgatctcactggacaatgtgtccaagatctatcccaaaggcacccgaccggcgcttgacgacatcaacctcgatatcgaacgcggtgatttcgtgttccttgtgggtgcgtccggctccggcaagaccacgctcttgagcctgctgttgcgcgaggaggaggccaccagcggcgagattcgcgtggccggcaacgatctgcggcgcatcaccaaccgccaagtgccgcagtaccgccgttcgctgggcttcgtgttccaggattacaagctgctcaataacaaaaccgtatgggagaacgtggcgttcgcccttgaggtgatcggcacgcggcggtccaccatcaaatcgttggtgcccaaggtgctgaataccgtgggactcaccggcaaggaaaagaactatccgcatgagctctccggtggcgagcagcagcgtgtggccatcgcccgcgcctacgtgaatcacccgcagattctgctggccgacgagcccaccggcaacctcgacccgaccacttcgctgggcatcatggaagtgctggacgccatcaaccgcaccggcaccaccatcgtcatggccacgcataacgaagagatcgtcaactcgatgcgcaagcgcgtggtcgaactgcacaacggcaagatcgtgcgtgacgaggctcatggctcctacgattccgccctgttcttcccggatgccgaagtcgaagccaagtccgacaccgcccatcatgtgctggcggcggcgaccaaggccatcgagggcagtgacgagccgtctgaaggcatcgcccgtttggccaattccgtgcattccggccgcaccggccgctatggcgagacgtttgcgccgctggaagacacgctgacctggggcaagggcatttcgttggatgagcaggccgccgccctggaaagcacccaggcgttcgacccgttcaaggacgagtccgccgcgaccgccgtggttgccgatacgtccgtgtcatccgccgccgagccgccggccccgccggagccgcccgcaccgccggaaccacccgcaccgccggccaacgagcagtccgccgccgagcagcctgctgacgagcagtccgccgacgagcagtccgccgcagaccaaacatccgacgatcaacccgctgagggcgcgaaggagtaagggggatcatcatgcgagcacgattcattctgtccgaaacgtgggccaacctcacccgtaacctgtcgatgctgctgtcgctgacgctggtcaccttcatctcattcctgttcatcggcgcttcggtgcttactcaggcgcagatcaccaaagccaagggcgactggtacgacaaggtcgaggtcgtggtgtggctatgtcccgacggcaccagccagtccgcgaactgtgcttccggcaaatcgccctcagccaatgagatcacggcactgcagaaaaccattcgcgatgaactcaacgacgtggtctccaacatcgactatgtcagcaagcaggatttctacgacaacacattcaccaagcagtacccgaacggtgaattccaaggccgtacgctgaccgcggacgatatgcaggactccctctggctcaagctcaaggaccccaccaaatatcaggtggtctccgaagtgctctctggcaaggagggtgtggaagacgttaccgatcagcgccagatcttcgacccggtgttcgccgtgctcaaccgagccacggcggttacggccgtgctcgccggcgtgatggtggtggtcgccatcctgctgaccggaaccaccattcgtatgtccgccgcatccagacgaaccgaaaccgaaatcatgaggtacgtgggtgcctcgaactggacgattcgtctgccgttcattctggagggcaccatcgcctcgctgattggctcggtgctctcgtgcctgatgctttcggctatcgtcaacgtgttcgtcaccggctggctggcgaaatccgttacctggattccttatgtgaatcagctcacggtactggtgatatcgccgttcctggttgtgggcgcgatactgctgtccatcatcgcttcaaccatctcgttgcggcgttatttgagggcgtaacgcgaccggcttacccgcgagaaatgtgatgacatcgtgtgcaagcctctcaggttcgcatgttatggtattggcttaagtgagcgaaaggactattcacatatgacgaacgtacgtgtgatcaagcccgcactggcggcactggtggccgccgcagcctgtgtgggaggtctggcgttcagctcggcacagcctgcccaggcagacacctattccgacctgatcaatgcgcagaaccagcacgccgcgtcggtacagcgcgaggccgaactcaagcagcagctggccggtgccagccaggacctggcgaataaggtacttgagctggacgatctgaccaacaacaagattgtcgccgcgcaggccaaggtcacgcaggccaacgaggatgccgccaccgctcaggacgaggccgacgccgcatccaaacgtctttccgccgcgcagaaagacaaggagacgctcgaggagcggatcaagcagaccggcaaggactacgatgacgcgcacgccgccgtggcccagctggcccgtgacgagatgcacggctcgaatgcttccgacgtgatgagcgtggtgacgggtgccaccagcacacaggacttcgtcaactccatgcagtcccgggacgcgttgtcccgcaacgaggcgaatgcggcttcctccgccgcgacctcactgagcacgtcgaagaaccgtggcgaacgtctggcggccatcgaaaagcagatcgctgtgctcaagacccagtccgatgagaaggccgcttccgcacagaccgccgccgaaaccgcgcaaagcgaacgtgacgctttggacaagctacgccaggagggcgaaacaaggcgtgacgaactgtcttccatgatcgacagtctggattcccaatccgccaagcaggcggcccagaccgtactgatcgcttcccaggtcgattcctacaatcgtcagtaccagaaggaacagcaggacgccgccaaccgggtggataccggtaaccagggcggtacgccgtctactccggtgacccccgctccggcgcccgctccggctccggctccggcgccggcccccgcccccgcccccagcgtcggcggccaaggcacgtcgaacggtgattacggcaacgcctatgccgccggccagtgcacgtattgggcgtatgaacgccgtaagcagatgggcattggcacgccgtcctatctcggcaatggcggcgactggtggcgcaacgccccctcgtacggcttgcgcgtggaccacaaccctcaggtcggtgcggcgctctccttcctgcctggtcaggatggtgccgacggtacctatggccatgttgccgtagtcgaagccgtgtatggcgacggcacattccagatctccgaaatgaactggggtggtccgtggaacatgcacgaccgcaccttgaccaatttgggtcagtactggttcgtccactgaccggttggttcggccgatatatgcggttgaagggttcctcttgaagaggaacccttttcgtattcgaggccggtccgtgatatcgtcggatgttgcgttgctacccacgagttgctactcacgagttattgcccacgaaaggaggagacatgcccaaggaaaccggtgagaaactcatcgtccagaacaagaaggcccggcatgactatgccatcgaagacaagtacgaggcagggctggccctgaccggcaccgaggtcaagtcgttgcgcgaaggccgcgcatcgctgtccgaggcgttcatctccatcgaccgccgcggcgagatgtggctggagggcgcgaacatccccgaatacctgaacggcacatggaacaaccatgcgcccaagcgcaagcgcaagttgctgctgcaccgactgcagatcaccaagctcgcccgcggcatcgaggccaagggatacacgattgtgccgctgagcctgtacttcaaggacggtcgcgtcaaggcggagatcgcgctggcccgaggcaagaaggaattcgacaagcgccaggccctgcgcgaagagcaggacaagcgcgaagccctacgcgccatgcgctacgccaacatgcgccactagtcccgcctcttggctcccctccggaggggagccaagagtaggatgtccgcgttgtgggtcatttcgcccacgattaacgcttccgtagcattgcactcctacgctctggaaccatctgggaaacatacccgcccagctgactatccggagagaggaaatccaatgtctctaagcaagggaatacaatccgctgcggccgccgccctgagcgcggccatgctgatcgccgtggcggcctgtggcacgactgacagcaccgacaccgcatccaagagcggcgattcatccaaggactcgtccagcacttcgattcaaggcttcgacaccagcagcatccagaaggacgacgagatcgccgcactgctgcccgattccgtggccggcgacggcacgctgaccgtcggcgccgatacttcctatgccccggccgagttcctggccgaggacggcaagaccccggtcggctttgatgtcgacctgtccaaggcgctggccgcagtgttcggactgaaggaaaacaccgtctcctccacgttcgattcgattatcccgtccgtcggctccaagtacgacatcggcatctcctccttcac

SEQ ID NO: 3773 - DNA, 4203 bp, Unknown
  R35_2m  MAG No. k141_1427
ggtcgccgtgccatgctcgggctccggggtgtccagcagagcgaagatgcgcttggtggaggtcatgccgttcatcgccacgtggaagaacgagccaagctgacgcatgggaataaagaattcggcggacagcagcacaatcagcagcagtccggcgagggtgagcgggaagcccgcaccgaacggcatcaggtattgcaggccgtaggccaggtaggcgaatgcgccgggcaggtgggcggcgagcatgatcggcgaccagccggcggtgccggctcctgcggcggctgcggtggtatgcgcatactgccatagagccacaccaatgccggccgccgcaccgccgtaggccacgatatccatggcggtcagcgagcgcagctggatctgcagcacgcgcatggtcatgaccctgcgctccacattccgcgcaatcccattcaccttaagcgaacgccctcgcacacgccagacttttaaagtgagagaggccacagaattatcgattgcggagtgcgcatgctagacgcgccaaccagaaaaaatatgcttcgatatcaggggctgaagcatccactacacccaatacgtgcatttatccgtttcgaggaggctaatttttgcgtttgccggaggcctacttccgtttcaaggggctggtttcgcatttgccggaagtctatctccgcttcgaggggctcctcatccatgtaatcggaagtataaacggctacacgtcaacgtcattccgccgttttagggccgtgtctacttgggcatcagccccttgaagtggaagtagacttccagataaggcaaaatcagcccctcgaagccgagaaagcacgtttctacggtgtcagaagccgacggaacgcaaaagggtcatctgcacgcagacgacccatatgatcaattcgccaatagacgcagcaaacgcggcctagtgctgctttttgcgcggcgaccagtgcttcgacggcggccgtacttatcggacaggaagccggagaagccggcgccgatcacgccgccgatcatgatggagctgatgaccagaccctgcagggccgggctcagcgcgtacttgtcctgcaggaagtcgatggctcccgaaatggacacggtgtcataaccgtagagcaaaccggttagacacggcgttgtatacaatccacaaaaccagacagacaacttctccattgcccacaacgcgcgcaaccttacgccagcgtaacctaacttgtcagaatggctcgattttgtcaacagccatcacgcaacgcacgtaaggacacggcccgcttatgcttgaccactacaccacgcctggcgaatccatcgaaatccgcgacaaccagaccatctactccctacttaccgatcgccttgcccgcaccggcgcggacacggtaatcgccgccaagaaaatcggccccggccgctggcagaacgtcaccaccggcgaattccacgagcgcgtggtctcggccgccaagggcctgatcgcgctcggcatcgccaagggcgacgcggtgaccatcttttcctccacccgtctagaatggtgcattctcgatttcgcactggccgcggtgggcgcggtaagcgtgccgatctatgacaccgactccgccccgcaggcccagcgcatcatgaacgattcggtggtcaagctggcctttgccgacaatcgcgagcgcttcgaccggctcgactcggtcaaggaccactgccctgccttgaagcagattctcatgctcgagggcaacgcactgggcgcgctcgaaggtctgggcgtggctgtttcggacgaggaactgaacgagcgcgtggccaccgtgcgcaccgacgatctggccaccatcgtctacacctcgggctccaccggcaacccgaagggtgccgaactgacccacaagaacttcgtgtccatcaccatcaccgcttcgcaggcgcttcatgaagtggttctcgacgaccatccgcgcctgctgctcttcctgccgctggcccactgcttcgcacgattcatccagtacgcctccatcgcctccgatgacggcgtggtcggctatctgccggacaccaaaaccctgctgccggacctgcgttcgtttgaaccgacctacctgctgggcgtgccacgcgtgttcgagaaggtgtacaacgccgcctcgcacaaggccggtgccggctggaagggccgcctgtttgtcaaagccgccgaggccgcgcgcgtctggagccgcaaggagcaagccggcgagcagcacacgtttgccgaaatcgccgagcgcgccaaatacgaaacgctcgtctaccgcacggtgcgcggcgctctgggcccgaagatcaagtacgtggcctgcggcggcgcaccactgtcgcttgatctggcgcatttctacaacggcatcggactgccgatgattcagggctacggcatgaccgaaaccgccgccccgttcgccgccacgcgcgtgaccgacaatgtgatcggcaccgtaggccagcccgcgcccggctcctcgattcgcatttccgacgaaggcgaactgcaggtcaagggcccgaacgtgttccgcggctaccacaatctgccggagaagacggccgaggcgttcaccgccgacggctggctcaggaccggcgacttggccgagatcgatgacgccggccgcatcatcatcaccggtcgaatcaaggacattattattaccgccggcggcaagaacgtctcccccattccgctggaggaggagatcgccaagtgcccgatcgtggagcactgcgtggtggtgggcgaccagcgcccgttcatcggcgcgctggtgacacttgacccggagtcgctggccatttggctgcccgcgcacggcctgtccacggagacgccggtcgaccggctcgccacgaacgccgcggtgcgcgaggagatccagcagtacgtggacaaggcgaatgcgacggtctcgcgtgccgaatccgtgcgcaagttcgccgtgctgggcacgcagttcacgcaggagaacaagtgcctgacgccgtcgctgaaggtagtgcgcccggccgtcaaccgcgtgttcgccgatgtgatcgacaacgagatctacaacggcaagcggtgaaacgcgcggttcgtaatccgacacaaaaaagggccttttgaaccgcacccccgatcatcgaatctgtattactccagtccaacaatcggggtgcggttcaacctcgccgggcacttcatcattcatcactggcatggttccattatcacgcacattatggcgcagagcgaatacggcaccccggcaacgcgagtgggtcgccggggtgccggagcgcgggggtgccagaatgccgaagggccgggataccggagtgcccggtcgccggggtgccagaatgccgaagcggtgtatgggtgccgcccggcccaggtgggtcacgcccgggtcagtttcttgctcctgagacgcagcacgacatcggcggagtcggcgacacgcttggaatgcgtcaccacgattacgcatttgccgagctgatgggcggcatgctgcagcagatgaatcacctcgtcggtcatctccgggtcgaggctgcccgtcggctcgtccgcgaggatcgcgcggcccggggcgaccagcgcgcggccgaccgccacccgttgacgctggccgcccgacaggtgcatgatgttgcgcttggattcctcacggctcaaacccagttcctcgaggatcttcatatcggccttggtgctgaccagccgcaggttctcttcgggggtgaggtagtcgatcaggttatggtcctggaacaccagggacacgtgctcccgacggtgcttcgcatagcccgatgcggcgatgtcctccccctcgaagcggaccactccccgggagggggcgtccaggccggccagcagagacagcagcgtgctcttgccggcgccggacgggccggtgatcgcatacatcttcccggattcgaaatccgcgctgacatccgaaagaacaaggatcttcgccgcgccgtaagcgtaatcgacatggtccagttgcagacagttagacatgattggtgactcctaacgcatagaggaaagaatggatttcggggatttggacagcacggcggcgcatgacacggcaagggccacggcgatgaccgcgcatccgagcagcaggatgagca

SEQ ID NO: 3774 - DNA, 9283 bp, Unknown
  R35_2m  MAG No. k141_1448
agcgcccgtgccgaactggccggcggcgcacagcggcacatggttctcgccggtaccgtcatcggccggagtcggacggctgaaatcggccaaggccggctcatcggcggcggtccacggcagcggcacgcggcagccgtcgcggcccttgtccatcgtggcctgagcagtgtggaaagcggtcggatcctccaagtgatcccacggaatatcggccacctcaaacaggcccagctcctcgccctgatagatataggcggcgccgggcaggccgagctccatcaaagcggcggcgcgggcgcggcgagtgccaagctcgcgatcctcgggataggtagtgccgttgcgcagcagccagtcgtgcggcagctggtggtagggcgcgcccttgatctgcggcaggccgtaacgggaggggctgcgcggcacgtcgtgattgttcatgacccacgtggtggtggaaccgccggtttcggccgccgccttgagtccggcggcgatggcctcgcggaactcgtcggcataccagttggcttgcgcgaagtcgaagttgaaggactggcccagctcgtccatcgaagcgtacaggtgctggtgctcgggcaccacccacgcctcggccacggcaaagcgcggcgggttgtactcgttgaacaccttgcgccattcgcggtagatatcgtgcacctcgcgacggtcgaacagcgggtggctgaagtcatgattcagcacgccgaccacgctgtattcgcggccgagctcttccaacggcttggattcgaggtccttggccaggccgtgcgccacgtcgatgcggaagccgtcggtgccgtggtcggaccagaaacgcagggtcttcttgaactcctcgtggatgtccggattcttccagttgacgtccggctgcgccttatcgaacaggtgcagataccactggccgtcggccacgcgcgcccaggccgggccgccgaagaaggattgccagtcgttcgggggcagttcgccatgctcgccgcggccgtcgcggaagatgtagcggtcgcgcgccggggagccaggctcggcggcgagggcctcctggaagaacacgtgcttgtcagcggtgtggttgggcacgatgtccacgattaccttgatgccggcctcatgcgcggctttggccatggcgtcgaagtcgtccatggtgcccagtcgcgggtcgacgttgcggtagtcgattacgtcgtagccgccgtccgccagatcggaggggtagaacggggaaagccagatggcgtccacgccgaggctcttcaggtagtccatcttctcggtgacgccggcgatgtcgccgatgccgtcgccgttaacgtccttgaagctgcgcgggtaaatctggtaaacgacggcctgcttccaccagtcgtcattgaggttatttgcggtcatgccgattccctcctgttccgggtgcgttgtggttgggttgttccggtcgcgcccgaactgctgtgtgaaggcccgaccgttgtattgatgatgacaacgatatcatgtgaattacgcatgcaaaaatcgatttatcggcgttttgcggtggtaacgtgctcacgcctgcgcgggcgctgctgtcgcggcaggcggcgcggtggtttcgcgcagtattagcggagtgtccggccgtacgaatgccggttcgattgacttgccggcaatggcatccaataccatgtgcccggcagtcgcgcccattgcgaacgggtcctgatgcagcgtggtcagtcccacggcggcggacagggtggaatcgtcgaagccgatgatggaaatgtcctgaggtacccgccgcccgtattgacgcaggcgatacagcacgggtgcggccatttcatcatcctcaaaacagaaggcggtgatgctgggggaggcgttcagtacggcgttcaatgccgcgttgctttcgccaagaccgcgttgaatgctcaggggcgttagctcgatccccggatgggcggcagcggcatcaatgacgccctgcaaacgagcctcggcactgtagcgcatattggtttcggtcggtgcgctgccgacgaacgcgatatgccggtggccgagtgcaatcaggtgctcgatagccgaacgtgtggcggcgtaatcatcaatgctcacgcctgcgtcgaacccatcggtggaggggatgttgatgccgacaatcggcacgtgcatatgcttcagtcgctccacctcagccggttcgatgtcgaaggagctgacaatcaccgcatccgcattgcgccgcacgggcaaatccgcaaagaagtcgtggcgctcggcggcgttgcgcatggggtagggcacagtgtcgtagccggaggggcgcagcgccgagtcaagaccggcgaagatgttcgaattgaaccaactggcgatggtctcgctggcaagtagtgcgatacggaacgattggccggattttagggcggcggccgagcgagagactgaatagtcgagcttttcggccgcggccatcactcggtctcgagtctcgggaagcaccagatccggcttggcgaaggttcgggacaccgtggatacggaaacgccggcctcgcgggccactgcctgaatgcttgccttggtcatatgccgtcgctccttcgccgtcgcgaacaatcattgtcatgacaacgataacatgcccataacaagtcgtcgtcttcggctatctcgattacgaggggctgatttagggcattccggacatctacttccgtttcaaggggctccttgccggtgaagccacaagtgcaaacgactttgtgccaacgtcattccgccgttctcgcgctgggtctacttgggcgccagccccttgaagcggaagtggatgtccgggaaaggccaaatcagcccctcgaagccgattcagaccaatttcccattgccggaatcgatcaccgcttctctcggcgcatcacggcggctagggactgcacgcgtggcaggtcgaagacctcgtcggtatgcaccacgtggcctgagctgtccgccagcggcacgcgccagttcgaatattctctggaagtgcccggctgattctgggagcggcattcgcccacgccgtccaccagcgctgcctgcagcagcagcgacggcgtatcggtgagcatggcgtgcatcgcttccacgatctcctgcacatggccttccacatcatccgccacggtctgtgagatatagccgttctccaccagacggttcatcatggccgtgcgttcggccatcgccgaggcggcgaacgcctccaccggctcgctcaggagatgcagctcttcgcgcagcttgacgtgttcgaagttcaggtagccggcggtgggtggcagatcgtgcgtggtcaccgaggccaatgcctgtttgcgatagtccttgggtgcacggtacgggtcgccggcgttcggcgaatcatccacgcggttgaaccattccacgtcagtgccgagcacgccgtgatcggacagaatgcggcgcacgtaatccggtacggtgcccagatcctcgccgaccaccatgcctccggcgcgcgtggcctcgatggccagtactcccagcatcgcctcgtggttgtacgtcacgtatgcgccgttgcgggcaccgagcccctgcggaatccaccacaggcggaacaggcccagcacatggtcgatgcgcaccgcgcccgcgtgctcgtacatcgaatgcaccatctcgcggtacacctggtagccggtggcctccagatagcgtgggttgaacggcggctggccccaatcctggccctgctggttatagaagtccggcgggcagccgaccgtgacgccgccggaggcgaagcgttccggattggcccaggcatccgcgccgagcccgtgcacgcccacggccatgtcctgcatcagacccagtgtcatgccgtggtccagcgcctcctgctgcgcggcgttcacctgctcggcggcaatccactgcagccagcggttgaactcgaacaggtcgtggtgctcctcgacgagctggcgcacggccgggtcgtcgatggtcttctcgaagaaccaacggttctcgccccacggcgcgccccatacctcgaagcacaggcaccaggtggcgaaggaatcgaggtctgggccggcggtggtcttgaaatgctcgaattcgagctcgcgcttgttgttgcggcccgcgtcgaagatcaggcgcagcgccgggcgtttggccgcccacgccgcgttgatgtccatcgggttcgattcgtcgttgcgtgcggccactgaatcatgcagcgcatccacctgcgctcggatatcggccggcagcgtgccgtattcggggatgtcctgcgggcggatgtacgtcacgttgaggaatcggcgcgattccggtagatacggcgatggctcaagcggcggaatcggcgcgccggcgtgaatcgggttgatgagcatgaagtcggccttggacttgtcggccgcgtccgccagcagcagcttcagatcgccgtaatcgccgatgccccacgattcgcgagaccgcacggaatacatctgcgtcatccagccccaccgctggtgctcggcgaccgcctccggcacgggaatgcgcgcgggggcggcgatgatggccgccttgccctcgcgcccgtccaccgtgacggtcagtgtgtggtagcccatcggcagatcgggggcgatggtcaagtccggcttgccggaattgaggttcggcagcagggcaaagtggccaaacgcggtgctgtcctccagctcgatggaggcggtgatgtccgcgtccgacgggcaattcagggtcaggcttgtcggcttgccggtggtggccacgatggtgggtggtagcaaacgtttgctgttttcggcctcaagttcggtcatggaacgttttatggcctcgtcgctggaggcgtccacatcgagggccttgagcacggcgaccaaggcctcgtcgctgatttcggtgtaggtgccgagctggtcgatgaacgaggtggaaagcccgcatgctttggccagcttgaccagcggacgggtgagtcgttcagcgctttccgtacgctgcgaggcaccggaagcggcgtcgttggtggcgtctgcgatggtgccggtgctggtcgctgcgtcgttgccgtgcgcgtcggtcatgatgactccttgcttgcagatcgggtactgctagtcgtttgcattgctgttcgagggccgctctgcgttgaggttccggcaatctggcagaccaatgtccgagctgttctgtctttaccgtaactcatattgacaacgattgcaatacattcggtgagttgggcaattagcgggttatccgagcacgacgaacgactgcggggagagcgttggggggggcgtcccagcgccagtcgaggtagaagtccatgtcgaatccggcctgcatcgattcgttcggtcggcccacattcggcgacgaacgccgcctcggggaattcggggcggattttcgagaacatgtactgccaggtgcggatcgtgtatggcttgccggttcatgcggcgatgatgccgtggcccgattcgacgaagaatgttcatccggcgttcttccggcggtatccggacgttggcttgtgaggcctaccgtgaaatccggaatcgaaagatccaagcaatgcaggtgcggaacggttccgtgaagctggaaggcgtgacgacgacggacgtggccaaacgggtgcggccggaggagtgcgggccggacggcgcagatgacactgcatggaagaaggaagaacaatgggcaatcacaaggctttgacgagcgccgtcgcggcggtcgcctccatcgcgacgctcggcgcgctcgccgctccggcgtttgctgtcgatgccgcaaacggcacctacagccccaacggcaagtcggtcgccgagctcgccaagcacggcgcggcgcagcgcatcgccgccatcggcaacaagagcgcgaagaacgtcgtgctgttcatcggcgacggcatgggcgattcggaaatcaccgtcgcccgcgactatctgaaaggcgccaacggccacttcgatggtctggacgcggtcggtcagcccggcgcgcttgacgacgtgcaggcgggcaccggccagtacacgaccttctcgctcggcgacggcagcaaggacagcgccgtcggcaaggatggcgccggcaagctggtcgccaaccccaacccgggcaagctcacccccgtcaccgattcctccgcgtccggttccgcatgggcgaccggcaccaagacctacaacaacgccgtggatgtcgacatctacggcaacccgcagctgaatctcttcgagcttgccaaggccgccggcaaggccaccggcaacgtgtccaccgcggaaatccaggacgccaccccggccgtgctggaatcgcactccaccgagcgtgcctgctacggcccgcagggcaagaccgacggcacttccaacaacgcctccaagcagtgcctcgccaaccagctcaaggagaacggcggcatcggctccatctccgagcagctgctcgacacccgcgccgatgtgaccatcggcggtggttccaagtacttccgccagaccgtgcagggcggcgaatacaagggcaagaccgtgtgggagcaggccaaggacatgggcttccagaccgttgagaacgacccggccgcgatgaacgccctgcagtacaaggatggccagccggtgctcgccctgatgagcgacggcaacatgccgaccaagttcaacccgtccaaggccaccgccaaggatccggccaaggacgccaacccgaccgtgtgcaccccgaatgacgcctggctcggcaaccgtggcgcctcgctcaaggacatgaccaagaaggcgctcgatctgctcaacgccaacccgaacggtcagaagaacggcttcctcctgcaggtcgaaggcgcttcgatcgataagcaggaccacaacgccaacgcctgcggccagatcggcgagaccgacgacttcgaccaggccatcgcctacgccatcaagaacgtggacctcacgaacacgctggtgatcgtcaccgccgatcatgcgcacacctcccagatcctcaacgcccagccggcctacgcgctgtccaccgtgctcaagtccgccgacggcaacaacatggtcgtctcctacggcaccgcccaggaagcctccaccgacgccgaaggcggctacaacggcggcgacatggagcataccggcacccagctgcgcatcgccgcttccggccccggcgcccagcgcgtcatcggcctgaccgatcagaccgacaacttctacaccatcgccggcgccctgggcctggccacctcccccgacgagcagaacgcgctctccaaggacggcaccgtgaaggtcgcccgcacgcagaccggcaagtacgtcgccaatgtcgacggtttcaacggcgacgcgctgctcagctacgagctgaaggacaaggacggcgccgtggtgtccaagtccgattccagcaccccgttgtccggcgtgcgcgtcaagcccgcgcagaccacttcgatcgcgctcgacaagatgtcggaaggcgccgagtacacgctcaccgtcaccggtcgccagtccggcaaggtcgcgaccgtcgccatccaggcgccggccgccggctccgccgacaagaagccgggcgccgacaagaacggcgtgatcgcttcgggcaaggtgccgaacgattccgcggtctccggcccgctgggcgccaccggtaccgccgttatggccatcgccatcgcggctgtgatgctggttgcgatcgcgatgctcatcaaggccgcgcgtaacgccaggaacaactgattcggccttggccgaccggtaatcccgagtcgtccagccgccggaaaacgatcgcccgccgagccgatgcccggcgggcgatcgttttccggcggcttttggctgtgacgcgatacgtgccgtgtgccgcgcttcgcagaaacctgagtgagaatcgctcaagtttttttgccgaattcgggaatatgcacttgcggtttaaagttgagtggtgtaggctcaagtttcggaagcacgggaatgggcggctgcgaatgcaaaccccacaaccgagaggaaccgcacaaggaaccgaccgaaacccgggcgaagaacgaaagaacgaacacgtgcgagacggctcgcgcacaccgcgcgtcacaacccgaacaggtcgtggcgaacggcggcaccggccgggcaatcgcaagtcccacaaaggagcacacattatggcacgcgcagttggtatcgatctgggaaccacgaattcctgcatcgcaactcttgaaggtggcgagcccaccgttatcgtcaacgctgaaggcgcgcgcaccacgccgtccgtggtggccttctccaagtccggcgagatcctcgtcggcgaagtggccaagcgtcaggccatgaccaacgttgaccgcaccatctcctccgtcaagcgccacatgggcaccgactggaccgtcgacatcgacggcaagaagtggaccccgcaggagatttccgcgcagatcctgatgaagctgaagagagacgccgaggcatacctcggcgagcccgtcaccgacgccgtcatcacctgcccggcatacttcaacgatgcccagcgtcaggccaccaaggacgccggcaagatcgccggcctgaacgtcctgcgaattatcaacgagccgaccgcagccgctctggcctacggccttgagaagggcaaggaagacgagcgcatcctggtcttcgacctcggcggcggcaccttcgatgtctccctgctggagatcggcaaggatgacgacggcttctccaccattcaggtccaggccaccaacggcgacaaccacctcggtggcgatgactgggatcagaagatcatcgattggctggtttccgaagtcaagaacaagtacggcgtcgacctgtccaaggacaagattgcgctgcagcgtctgaaggaagccgctgagcaggcgaagaaggagctctcctcctccacctccaccagcatttccatgcagtacctggccatgactcctgacggcaccccggtgcacctggatgagaccctgactcgtgcgcacttcgaggaaatgacctccgacctgctgggccgctgccgcacgccgttcaacaacgtgctgcacgacgccggcatctccgtgagcgacatcgaccacgtggtgctcgtcggtggttccactcgtatgcccgcc

SEQ ID NO: 3775 - DNA, 32303 bp, Unknown
  R35_2m  MAG No. k141_1538
ggccttgggggtcgggtccacgatgtcgatgaggcgcttgtgagtgcgcatctcgaagtgctcgcgagaatccttgtacttgtgaggagaacggataacacagaagacgttcttctcggtcggcagcggaacggggccaacaacagttgcgcccgcgttcgtcaccgtttcgacgatcttcttcgccgattggtcgatgacctcgtggtcataggacttaagcctgatgcggattttctgtcccgccattgccgtccgccctttctagcgatgttcgttgtactgtttaccaacctgcttctagggcaccggcacgcatggcctcccttggacatacgtcctctggcggtcatccgacatcagtgcgcggtttccggctgtcacttcacttgaagtggctcccggcccgcgctcgcttttttaattccaatttgcgagcccaaatcaggcaacttgtttattcaagcattgaggtgggacagcgcggaggaattcgcgcgtgtcgcgctcatgccgttcgtattacctcgcggcatagccgctcggcgtcgcctaccaacatccttctgagacttacctatatatagtggcacagctcacgttggcgaatatggattgattaattgagttggacggtaacgcgaattactcttaaggctcgtgacacaatcactggcaaagaacatcaaacctattcgtgagcacggtgccaacgtgttatatcagcacggcactttggccttactcgtgccggggctgctggaaggcaccaccaccatcggcgaattgctcaagcatggcgacaccggcatcggcaccggcgagggcttggacggcgagctcatcatcctggatggcgtggcatacaagataggccaatccggtgtggccgaacgcgtgccggacgacttcaccatgccattcgctaatagccaccgcgcggccttccagtaccagtgcgagcgtcatgatatcggcctagaagagctcaacgaaaagatcgtcaaggcgaacggccgcgcgaacacgttcttttcggtaattgtgcgcggcacgttcagcttcatcaagacacgcgcggtcatcaagcagcaggccccctaccccacgctggtagaggtggccgaccggcaggccgtgttcctgcgccacgacgtcaagggcaccatgctcgggtacttctcccccgtgatgtttcacggcgcggctgtggccggattccacgagcacttcctgtccgacgacaagacgttcggcggccatgtgctcgatgcggtgctcgagcgcggcaaaatctacagtcaggtgttcgataccttggtgcagcatctgccggtggacgaccctgattatcgcaaccacgacttcagccaagatccgatagccgaggccatttccagcgccgagggcgatactcaacgagattagtctcacataaacacaatgtgagccaaatgaacatttccgaacaatcgcacatgttgcataatggcggaagcactggcttctcgcacttcctatgttcgattgtcgcaatgcaggtctcacatctttcttattgagaaccattcgctgcgatatcatgacagatatgacttcccgccgcaagactcttaaacgcgattggttcgacaaccaacctggcgcatgggtaatggttatgctgcccgctgcggctggcttctttatcggcgggcctaatcttgatacgctttggctgttggcgacatgggccgtgtgctattgcgtgcagttcagcgccgcgcactggttcaaagcacacttttcacgccgttatctgccgccgatgctcacttatgccgtagcgctcatcgtcatcggcttgccattcctgattacgcataccggcatactgcgttgggctcctttatatatagtactggttgcgctgtcgatgctgtcctcgtggctgaggaaggagcgctcgctgtggggcaatgccgtgtcggtgattgccgcatcggccatggccacggtgatcgcgtcgtttggcaacgctgttgagacggcatgtgttattcccatcaacgcagcacatgcctcgtgcgcagccgctgatgtcaccgccgcacgcgccgcgattcggaatatgccggatttgagccagatattcgaccttcacgcctggtggcctgcgggttcattgcccgtgaacgggctgattgccaccgtgctgtttgcgctgacgcagtatgggtcggttttggtggtcaaaaccatgatccgggaacgcgggaagcgttcgtacgtggcggcttcgtgggtatggcatgtggcgctattgctgctagccgccgtgccggctggacgcagcccgtatctgattgcgatgactgtgctgctgttggcccgcgccgttgcgttgccggtggttacacggcgcacaaccttgaagcccgtggtgaccggcgttaccgaggcgtttgccagctttattgcttttggctgcattattgcggtgatttagcgacgctcagcgattccatggggcggtaattccctcatggggcggtaattagcccatggggcggacggtaaaattttaccttccgcagaatagagccgttttcgtacaccgccccatggggttttcaccgccccatgggcaagttaccgccccatgagtaggttaccgccccatggaggcacctgccggctgagggagcgccacatatgcaaaggagcccggcccctgtaatggggtcgggctccttgtgtccgctatgcagccactaagctgcaacaccgcggttggtggctactgctggtgccagcagccgccaaccgcctgcaatcagcgctcggaggcttcctcagtggcggcctcaccctcgcgctcgatgcgtagcttgtggccttccgcctgggagacgccgtagtaagcaccgacggcgatgtccttcatgtcgttgatcagcgggatgcgcgggttggccggggtgcactggtcctcgtaggcgcgcatgccgatctgatcgagcacggaccagaagtaatcctcgtccacgccgcaatcctggaagctcttgttcataccgagcttgttatcgcggtagtcctcgacagccttcgccaggttctccacggcttcggccggggtcttgccggtgtcgatgccgaggttgcgggcgatgtcctggtagcgctccggggcgatgtacttgttgtacttcggccaagaggtgggctcctcaggaatctggccgttgtagcgaatcacgtacggcagcaggatggagttggtacggccgtgggcgatgtggcacagggcaccgatggtgtgggccatgccgtggcacatgccgaggaacgcggagccgaatgccatgccggccatggtggcggcgttgtgcatcttctcctgagcgtcggtcttggccaggccgggctcgccgttgacggactcagccaggttgtcccagatgagcttggccgcgtgcagggccatgccgtcggtgaagtcgttcgcgtacacggacacgtatgcttccatcgagtgggtcagggcgtcgaagccggcgtcggacgccagcttgcgcggctgggtgcgagccagcaccgggtccacgatggccacggacggggtcagcgcgtagtcggtgatcgggtacttgtagccggtcttgtgatcggtgatcacggcgaacggggtgacctcggaaccggtgccggaggaggtcgggatgcacacgagcttggccttcttgcccagcggcgggatcttgaaggcgcgcttacggatatcgaagaacttctcgcgcacgtcggagaaggcgatttccgggtgctcgtagagcagccacatgatcttggaggcatccatcggggagccgccgccaaccgcgatgatcgtgtccggctcgaactcctcgcgcatcatctccgcgcccttttcgacggtctcgacggagggctccggctcgacgtagtcgatgatgcggaaggtcacacggttggagcgggcgcgcagctggtcgatgaccttgtcgacaatgccgagctgctccatgaccttatcgcacacgatgacggccttctcgatgccgtacatgtcgcgcaggtacttgatggcgttcggctcgaagtaggtcttggccgggatcttgaaccactgcatgttgttgttcctccgagcaatgcgcttgatgttgacgagattcacggcctgcacgttgccggacaccgagttgccgccgtaggagccgcagcccagggtcagcgacggggcgatggcattgtagatgtcgccgatgccgccaagggaggaaggctggttccagatgatgcggcaggcgtgcatacggacgccgtactcacgcacgagctcctggttgttggtgtggatggcggcggtgtggccggcacccagcttgagcatcttctcgcacatctcgaaggcctgctccttgttgtcggccttgagcacggcctgcaccggagcgagcttctcgtgggtcagcggctcgtcgtcggagacttccttgcactcggcggccagaatggtggcgtcggccggaatctcgaagccagcagccttggcgatgaactgcggggacttgcccggcaccacggagttcagcacgggcttgacgccggaaccggcggtgcagccgaacatgtactgctccagcttggccttctcttcggcgttgacgaagtaggccttacggaccttgagctccttgatgagctggtcgtagacgtccttgtgggcgatgatggcctgctcggtggcgcagatcatgccgtaatcgaagtgcttggagagcaccagatcgttggcggcacggacgatgtccacatcggaatcaacataggccggggcgttgccggcacccacgccgagggcgggcttgccggaggagtaagcggccttgaccatgcccggaccaccggtggcgaggatcgtggccacgcccgggtgctgcatcagcgcgccggtggcctggatggacgggtgctcgatccactggatacagttctcgggagcaccggcctcgatggcggcgtcgcgcacgatcttggcggcctcgacggagcacttctgcgcgccggggtggaagccgaagacgatcgggcagcgtgtcttcagggcgatgagggacttgaagatggcggtggaggtcgggttggtaaccggggtgacaccggcgaccacgccgacgggctcggcgacctcatcgatgcccatcacgtcgtcttcgcggatgatgccgacggtcttctggccggccaggtagttggtgacgtgctcacaggcgaagatgttcttggtggccttgtcttccacgagaccacggccggtctcgtcgacggccatcttggcgagaacgaggtgcttgttcagagcggcgatggaggccttggcgacgatacgatcaacttgcttctggtcgaggttctcgaattcgtcgagagccttcttggcgcgggcaaccagcgcgtcaacttcggcctcagctgcggcctgcttctcttctggggtcggattggcagcttcgactttcttctttgcttctgccacttggggtcctcctcgatcttcttggggtatatggcaaagttctgggccatcgcctcgtcacctcagttgcaccagcgggataccgcctcagtaaccgaaaatggccggtgatgcgttgtcacattgcatatgtgacttgagtcacaatataccgaacggtccggcgcgatgcatacgcacaaaaccgacggcgtttcacgtgcgatattgaacagtttttgttaagagttgtgcgaaatatcgaacaaatcctcactttattcggcgatttggtactttttgttcactttttaccgaaaatcacatgcttgcaaacaacgcaatccgacaactttcttaaatcaagtttccaaaagtactcattttccccacatttctagaaaattggtttaaaaaagtgcccaaaatcgcctacaaatatacgattgttgcctcataatctccgcgtcgaggcacatgaaagccactttcataaagtatacttacatatatctcatcgcacaaaggggtaaatatgagggcaatgccatcgaccgcagtgaaagcgcacaaccgcagtgccatgacccagtatctgtatggccatagccatgtcaccaagcaggaactggaacgcgaactcggcctcagcctgcccaccatcacccaaaatctgcgcgccctagaagatgatggactcatccgcaaaggcgaactgcaggattccaccggcgggcgcaaggcgcaaaattatgagttcaatcccgatcatcgcactgccatcggcgtagtgatgcggtccaacgaactgcgcctgtgcgcgattaacctgtacggcaacgtcatcgaaaaacgcaacgatgccctgccttaccgcaacaccaacgtttactaccagcgtatcggcggcatcatcaacaacttcgcctccgacgtcgaaaagaagcacggcaaagtgctcggcgtctcgttcgccatccaaggcatcctctcccccgacgccaccaccatcaccttcggcaccattatgggcaacacggggcttacgctcgaaaccatcagccagtcggtccattacccgtgcatgatgatccacgattccgatgcctccgccatggtcgagctatggttcgactccacgctcaccgatgcggtgtgcgtctatctggagcgacgcccgggcggcgcggtgatcgtgggcggcaagctgtatcagggtccgaatatgtgcaatggcgccatcgaacacatgacgctggtgccgggcggccgcgaatgctactgcggccagcgcggttgcatggacacctactgctcgccggagaccttgcccgaggattacgaaagtattcccggcttcttcagcgtgcttgagcagggtgaacggcatcatcgcgagcgcatggacgaatggctggattacgtggcgcaggccatcgtcaacgcgcgatccatcatcgcgggcgacgtgattgtcggcggtgaagcagcccagcatcttgaagacagtgacatcgaggatctgaaggcgcgcgtcatcgcacgcagtccgttcggcaccgaccatttcaatctgcgcaagagctactgcgccgaagaccagaacatcatcggtgccgcattgcgattcgccgagaattatctcgacgatatctgtggtgctgcggaacgcggcaggaaatcaagggcttccaccagaagtgacaacacgtctacaatggaggtatgaaaaacccaccgttgcatcgttacgccactcgcccagggctgtacttcactgacgacggtggggctgacgtcgttgttcgttccgaaactgccgatcaggtttggctgtgtgtgctggagcccattgacgagcccggcgccttcttccaagacgccatccgcctgttcgaagacccgaacgcctcgttcatccagcagatccatgagtttccggtgtgcacgcgcattatcgaacatttgtatctgcgcgagaccctgttccgcatgaccggaccgaactacggcctgtggtacgtgcacctgcccaaagcatgggacggcatgcgttatggctaccgcgtggacggcgcatgggacccgaaacacggcgtgcgcttcaatccatacaaattcctgcttgacccgtatggcaagggcatcgacggctccatggagctcacccccgccgccttctcctatgaatgcgatgtcgtggaccacaaggtaaccggctcggcatacggtgccatgagcaccgtagactcgctcggccatgtgccggtatccgtggccatcgacgatcgcgatatccataagcatgagggcgacccgcagcacccgcatgtgccgtggcgcaaaaccgtcatctacgagatgcatgtcaaaggcttcaccgccaacgcgccgtggctgcccgaagcgttgcgtggcacctacgccggactcgcccaccccacaacgctcgcctatctgcagggattgggcatcacctccatcgaactgctgccgattatggccaagcaggacgagctcttcctgcaagaacacggccacaagaactactggggctactccaccctcagctacttcgcccccgaaccctcctatgccaccaaagcagcccaagagaagggcgcggccgccgtgcgccaagaagtcatagacatggtgcgcgcgctgcacgaggccggcttcgaagtcatcatggacgtggtctacaaccacacatgcgaaggcggcgtcgaaggcccgacggtctgctggcgcggcctcgacgacctggcctactatcgtcatcaaaaatccaataccggtcgactcgaagacaccaccggttgcggcaatacgctggacttcaccaacacgcatgtggtcacctttgccatcgactcattacgatactgggccaagcgtatcggcatagacggtttccgtttcgaccttggcgtcacgctggcccgcctggaaggcgaattcacccatcatcacccgttcctctacgccctgcgttccgatctgctgctgggcaacctgaagctcattatggagccgtgggatctgggcaacctcggctggcgcaccggccaattctccgtgccgttcgccgaatggaatgaccgcttccgcgacacggcccgcaccttctggcttgaggatgtggatggcggctccgatttcggtcgtatcagtttgcaggagatggccacgcgactctgcggctcggccgatctgttcgccaccgaacccgggcgcggcgctccggcctccatcaatttcgtgtcctgccacgacggtttcacgctgacggacctcaccagataccgctccaagcacaatgaagccaacggcgagaacaataatgatggctcgtcggtgaaccattccgccaatttcggcgtcgaaggcgtcaccgatgatccagacgtcatcacggcacgcgaacaggcggccatgaacatgatcggcatgctgctgctctcgctgggtacgccgatgatgctcgccggcgacgaattccgcaacacacaggacggcaacaacaacgcctactgccaagacaacgacatcacgtggctgaagtgggattggatgtattccaccaacaagacacgcgaaatgcgtcgcctgaaaaccgtgtctcgactggtggcgctacgtaaatcactggacctgtatcaccacgaggacttcttcacccgactgacccaactcggcctactcaagccctcaagccgcgtgcagtggttcctgcccgacggcaccacgccgatggagcgtgactggttcgatctgggcgtacgtagcttcaccatgcgattgctgtccaacagtgaggtggacgtgtgcattgtggtcaacggcaccgctgacgaccgcacattccgcctgccgccagacactcactggacgcctaaatggtgctcggccgaaatcaacggccgccgagccgggcatggcattcaggtcgaggaatgcgatttgaacgatgacaccaccgtttggacgcagcatgtaccggacgccagcgagacggtacgcacgctggtcgaagaagtggccatgcagcgcacggaatcctcgactgaggatgaagcggataccatcgaattcgcgatgccagcaacggatcacgccgcaaacggcacctcgtccgcgcctcgggatgaggtatcagctgatatgcctgatgcccctgtggatgatacgccggacactcccgtcgacgacaatgtctggaccatgccggcgctgagcatcacgctgatgaaacaggtgtgagtcacactcaaaacagcacgacacaaacacaaaggctctccgcggaattccacggagagcctttgtatgctcggtacaggacaagcgaaattaacgcttggagaactgcggggcgcgacgtgccttgtgcaggccagccttcttgcgctccacgacgcgagcgtcgcgggtcaggaagccagccttcttcagggcggcgcggttggcatcacgatcgatggcgttcagagcgcgggcaacgccgaggcggatagcgccggcctggccggtggtgccgccgccgtcaacgaggacgatagcgtcgaacttgccttcgagcttgagcagaacaatcggagagttgacctcacgctgcagcagcttggaggggaagtactcctccaaggtgcggccgttgatggtccacttgccgtcacccggaaccagacggacacgggcgacagcctccttgcggcgaccggtgccgtagcccggctcgatcgcggaggtgccggtgccagcgccagcgttggtctcggtggtgtagttggtgagctcctcttcggtctcgacaacctgggagtcgttggtgttttcagccatgattcttatctcctctcaggtttcacttggcctgctgcgagacctgggcgatctcgaagacctggggcttctgcggggtgtgcgggtgctcggcgccgcggaagacacgcagacggtcgagctgcaccttggccagacggttcttcggcagcatgcccttgacagcgttcttgatgatgcgctcggggttcttctcgagcagctcggcgtaggagtcacgacgcagaccaccgggacgaccggagtgcgagtagagttccttgcccatcttgttgccagtcagagcaatcttgtcggcattgatgatgatcacgtggttgccggaatcggcgtgcggagcgtaggtcggcttgttcttgccgcgcagcaggattgcagcctgggtggcgagacggccgagcaccacgtcggtggcgtcgatgacataccagtcatgagtcagatcagctggcttcggagtgaaagttttcactggattaccttttctatattgtgttccgggtcttagctgcttggtgtggcttggtcagggccgcatccaagaggcatcgaacctcattatccgtgggctccctgaaagtcctcgatggcgagtgggatagcgctttgaaggaccccttagggaaacacaacaatccactagtatatcgccgggcttgacatagggcaactggggacactccattgggtttatggcttctcttcccctatttatggtttctcttccacccacttcggctaaccgactcgcctacggtgaggcaattccctgccttctctcagctatcgcttcgttcaggcctcgtctacggacagtccactggactgtccgcttaacgactcggctcgtcagagggaggtaaagtgggtcaggaattgaagatttgggcgaagcgttggacgccgggggtgtcgaagagggtttcgagcggtaccacgttgcccttggcgtcggccagcgggatgcgccagttcgggtattcgttgttggtgcccggctggttctgcgcgcgcttctcccccaccgcgtcggtgatcgaggcggcgagcagcttgcacggcgaacccttcagtgcgcggtacagcgcgtcgatgatatccgcctcgtgatcctcacgatgttcggcgaagtcggcatcaagatagccctgctcgaccagcatgaccagcatcgcatcctgctcggcctttgcggaggcttcgaattcctcagccgggccggtcagcaagcccagacgctcacgaatcttgacgtgctcgtattccaggtaaccggcggtcggcggcaaatcgtgcgtattcacggaggccaatgcgtacggacgccactgggagggggcgcggaacacgccgtcgcactgctcgaaccattcaacggcgcaaccgagaataccgtggctcgacagggaatcggccacatggtccggcaccacgccgaggtcctcacctacgaccacgccgccggcgcgagaggcctcgatggccagaacgcccagcatgatgtctgagtcgtagtacacataagcgccatccatagccgaccggttctcgggaatccaccacaggcggaacaggccgagaatgtggtcgatgcgcaccgcaccggcacgggcgaacatgccatgcaccatattgcggtaggtctcgtagccggtggcctccagattgatcgggctcagcggcggctggctccagttctggccttgctggttgaacatgtccggcggtgcaccgaccgtggctcccttggcgaagcgctcgggattccaccacacgtcagcgccggaggggtgcacgccgacggccatatcggacatgatgccgatatgcatgccggcgtccttggctgcctgctgggcggaggacagctgctcggcggcaatccattccagccagcggtagaagtccaaagtgtccgggtactgcttgcgcagattggcgatttccggggagttgcggttgaacttgcgctcccagttgctctcctcgccgttgggtgctccccacttgtcgtagcacaggcaccacgtggcatacgcctccaagtcggaaccgcagtccgccttgaattggtcgaacgcgctttggcgttcggcggtacggccggccttgaagataatccacagggcgtgcatcttgctgcgccacatggcgtcacggtcgatgagctgggaatcaccgttcagcggttcggtgtcggcatgcagtccgtcgacggcgttcttgtcgcccgcgctgagcgtggcatattcggcgatcgcctcggggcggatgtacgtgaagttgatcaggcgacggcttaccggcagatacggcgacggggtgagcggggacaccggctcggcggcatgtaccggattgatgagcacgaagtcggcaccggtcttctgcttggcgtccaccagcatggtcttcagatcctcgtaatcgcccacgccccaggagttggaggagcgaatcgagtacagctgggccatccagccccacagactgccgcccttcatcgggtcaagcagatcgacgcgatcaggtgcactgatcaaagtggcgtcttgcacacggtcggcgaccttgacgtgcagcgtatggtagccaatcggcagatcggcgggaatgaccacagccgcattcgaaatgaacgtgccatccaagtcgtaggcctgggatccatctccaggaccaacttcaacggtgccctgatatggctcgccgttctccagcgtgatgctcgccgaaggcacgtccagaatgccggtgttcaccagcacccggtcctcgctaccggcgatatgcagcacggtgggtgccaccaatcgggagtaacgctcgttcagaatgcgtcggatggcgatgagttgggcgttctcgctggaggcgtcgatgcccagcgctgccagcacctcgatcaggacgtcatcgtctatctcgtggtagtcatggctcatgcccacataactcgtgccgacaccgaccaacttggccagtcgaatcaacggacgggccagacgctcttcactctcggtaatctcactcatagccccagtctaacgccgtttgattgcgccacaccgtaagcaaaatgccgtgattccgccaaattatgtactttttaccctcacatagtgagatgtgagcgctcacaatggtggatagagggtgattgccggccaaatttgcacggcaaaacacagcaatagtgtgcttagcggcggctttccacggcgtgccgcacctcggccgaggggtcgttggccaatttggcaagcatcgcttcggacgtattggggttcagcgccacggcacggcggaccatcgaggaaagcactgccggtgctccctcttcggattcggtgccaagtacgcccaagaaatccaatgtctccgcatccgcagtggggtcctgcgcaccctcaagccgcatcttccagctggtgcgcttgtttttcaacgccgtatcccggaccgcaggtaccggatccttggtcaggcggccgaccagccaattcttgtcatccccgttggcggccacggcttggcgcacggacggttcggggtcttcggagagtttgaccaatacgttcgggaacggcatggtgtcggcgaggaacacgcgatcggccaccggggtgtgcgggttgccggccacagcctccaaaagtgcggtggcgcgggagaacgccgcctgatcggcacggtcaggcaacggccgacgggcgaattcggacagttcggccgggtcggtggaatgacgcagacgttcgtatgtagcggtcagcggttcgaaatccaccggagcggcggactcggctgcggcctgcgcgccttggtcccgctgctgggcgcccgtgtcggttgcagtctcggttgcggcctcggtgggctgggtctgctggctggtggtgttctcgtcggtcatgatgcccagcttagtcatacaggcgtcacgcgagcggaaccggaatgttgaccacgtcaatcggatccggcaccaccgcggcattgaacgcttcccgcacacgctcctcgaatcgcgcgcaatcatcctgcggcaccaccgcggtcaactcgacgttcaccgcatacgattcatcctcctgactgccaccgagctgcgccagaatctgctggaatcgtgccagctgcgggtattcgagacggacccggtatcgcttggcggtcatgatgcgggcggcgcgggcggctttcatcgccaatgatgcggcggatgagtacgcgcggaccagaccaccggagcccagcagaataccaccgaaatatctggtgacggcaaccacgcaatcggtggtgccggactgcttgagtacgtcgagaatcggcttgccggcggtaccggacggctcgccgtcatcgctcatgcgttcggacagtcgcccatccgcgcctccgcacacggcggcatacgccacgtgtcgggctttcggatgctgctcgcggatcgcggccacgaacgcgagcgcctcgtcgagcgtatcgacatgggcggcgtcgccgatgaattcggactttttttcgacgagcgaatcgtgggcgggatcgtcgggcgtgttgagaatcgtctgcataagcgtgttccggtggtcggctgactgggtgttcgattgagcgcgaggctagacaggactatcagtgttcggagacgacgacgttatagtcctcgccggcgaagtaggcggtcaggcaggcgatcatctggcgggtgagctccttgaacgcgccgtcggtacgccagccgacgtgcggggtcaggacgatgccgggcacatggcagatggcgtcgtcggcggtcagcggctcgtggtcgaacacgtcgagtgcggcgggaacatcgcccttttgcagtcgggcaagcagcgcaccagattcgatgacttcggagcgggcggtgttgatgaacagggtgccgggcttcacatgcgcaaggttctcggcggtgacgatgccgcgcgtggcgttgttgagcggcagatggacggagatgacgtcgctggtttcgatgagctcgttgagatcgtcgaccggagtggcgccggagcgttcgaaatgctcgggcggcacatgcgaattccatgcggcgacctccatgccgaaggcacgggcgatgccggccacggtggcgccgatgccgcccagtccgatgatgcccatgcgacggccggcgagttgcagtccatcgccgccggcccacgcccagttgccggccttgacatccttatcgagttggccaacgcggcggatgagctcgaacaggagggcgaaggtgtgctcggccacggcgtgatcgccataatgttcggcgttgcagacgcggatcttcagctcgcgcgccttatcgagattgatgtagctggcgacgccggtaccgcagaacacgatgcacttgacgtgcccctgctcgctgatggtgcgtagcagatcatccgaaatgtggtagccgcccaccagcagggcgtcggcatccttcagacgctcggctatggtcgcctcgtcggacgtgaattcctcgaacatacgcacgcgggcaacgtcgtggagcgcggggaactgggccttgatgggctcgatcatcgcgtcgagcacggacggcatcacgacgaggggcagatcggtgcgttcgctttgggtttcgtaaatctcggtcatgggctccacattaggaggccgacgggaaaagcgtcaccttgcggcttcccctccttgagaccaagccgagcaactattgctttgccgcctgctcctgcgtgatgttccattccttgacgacgttctggtccgcgcccatcgaatagatgacatcccagatgcgttggcgtatctgagcgtcgtaggcttcgtcccaacatgtgcctatgggatggtcgctggatatcgggcaccattggtagttgccttgatgcacgttggcggtgggcacccagtcgatgcggttgacgcgccacgcccccttgacgcccttcttgccggcgaactggatgcgtgcggtcacaccctggttgttgaccaaggtttccggcgtgttcgccgactcggtgacggtgttgcccagaccgtagacaatccacgtgccgttatagttctcgatgggctgcgcacaatggcagccggcaccgtagataacgtcgaaggcaccagtgtcggcaagctcatgggcttccgaaatctgccaggaatcggcgtaatcaaggtattcctgcaccgagtgcatggcgatggccaccacatcggcaccttgctcgcgggccttgttggccttgtctaccgcgcgctggatgtcgctgccgtgattcgggtcgccgtcttcgcgcagacgatccacctgccagtcctcgtcggcggtcatgccgttgagggagaccgtgccggtgaccagacccagcttgccgccgccggtcggggaatcgatgactaacggtttggtggagtcggcttcggttttgtacgagccggtctgggcgatgccatcggcctcaagcgtgtcccacagacgggcgatgccatccgccccctgatcccaggaatggttggtggcgtgtgtgcaggcgttgtatcccacgttgcgggcggcatccgccacttccggcggaatgttgaagatcgggtacgcggcatatgggccgccgcgctgggcgatcggggtttcgaattcgcacacggcgatgtccgaagcctgaatgtactgcttcatcggcgcgaacagcgggtcgaagttgaaggcggtgccatccgtggcgttggggttcgggccttggaaatggctccacaatccctcatggaacaacaaatcgccgttgaccagcatggcgatgcagtccgtatccgggcaatccggtgaattgccgtgatgttcggtcaccggtttgggcgtgttcttcgctttattcaacgcgacgtccgacactccggcgcgtgcggggccattgccgtccgtgcgatgggttgcgaaccatgcgccgatgcccagcgtaacggcgagcgcgatcacgaacacgataatcagcgccgcacggttggttcgtgtcgagttggagcgatgttgcccctgcccagcgatatggctcatctttgcccgcccttcggaactcttcttctctctctaggataccgcccatctcagtcaaacactgcggggaggaaggcgatgggcaagcgattggacaagcgacataaaccggttaatcttcaatcaccattcacgaccaccacgcaaaagtctcacttagtggacattcttctttcgtttgttagcctttccccgaggtgccgcactcgttcacccgctaaaatggcggtttggaggcggacggacaatggcgtacctccgactccgcttaccacaagcggagaccgaccgtcctcggttatttcggttatttctagcgacacattcccaggaaagtttcgcaaaacagacccccaagcaacccactagaaacacattcccaggaatgcgtcgcaaaacagatatccggacaacccaccagaaccgtattcccggggttcgaatccctctgactccgcgaagtgcgaacaggcccatcatcaggagtttccggaaaacaaaaaagattccaagctttcacccggaaccttaatcggcggagtcagagggattcgaaccctcgagccgtttacacgactaacaccttagcagggtgcccctatcggccactcaggcatgactccacgttacgcaataatgcgcaacagcaaattactgtaccacgtcctgcggatacggcgtgccgaacgacacattattgaccgtccgcgggcgcggcatcgccggagaacgtaacaataaccgcgcaaatcaccaacgccacaccgatgatttcaccaacgccgggaatctcgccaaacgccagtcccacggccaccgccatggcgggattgatggattgcattaccgaaaatgcgccggatgtggtgcgtcgcagcgtgatctgctccaccacatagggaatgaacgaggccatcagggaaatcacaaacagcagagccagcagcttcagcgagccgccgggctcaagcgcccacgtggcatcggccttggggtgaaccacatgagccacagccggcacgccaaggaacagggactggaccagccagccgatggtcacggcgatgcacagattatccagcgaattgccgccagccgccacgcgccggccggtgatgatgtacatgccccacatcgacccgccgatcaaaatcgcaatcagaccatacaaaaacgtgccattgccggacggattggccaatgatatgccggccaacagcaccacaccgaccgccgcgatgccgataccgacccgctcacgccagcttttgccggtaatcaccgccaccgaaagcggtcccaaaaattcgatagacacggcaatgcccatatccatattgctgatggccacataaaacagggtattcatcagcaccagcgagcagccgagcagtacgaccagcccccagccgcgggcgtcgcggtgaaacagctgcgctcgcttagccttgctccagggcctgcaccacagcagcaacagcaccgccatgaatcccacgcggtaccacaccgaatacagcgggtcgagctgggtgaacgcaagtttggcgacggccgtagccaaataaatcaccagtgcctcaccaatcacgataagcaccacgggaacacggttgaggataccgaccactgccttcttcacgaggtttacgctactcggagagtcgggacagcgcgcagcgacttggaaggcgttacggacagtgacgcaatgtggacgattccgtggaatcgcaaccaccatgcgaaacagccgcacagtgcgcaaacccttggaattccggcgatatttggcattacgacaatgagcgccgcgccatgcgcgccacatagtgagcatgacctcgttcagcattcctacaatggtggcatgagcaccgcaccgagacttgaggccgccaaacgcgattggggccacgacgagaccggatgcaccgtgctgcatatcgacatggatgccttctatgcctcattggaggtggcgcgcaaccccgggctcaaaggcaagccggtgatcatcggcaccgggccgcgcgcggtggtgtccgccgcgagctacgaagcccggagatacggcatcaattcggcgatgccggccgcgcgcgcccatcagttgtgcccgaacggcatttttctgccagtggatatggcgtattaccgcatgatgtcgcaccgaatcatgcatgaggtgtttttgaccgtcaccgaccggttcgagcaggtttcggtggacgagggctatatggatgtgtccgccgcactgctggagtgggggcggccgagcgcgatcggcgcgtggattcgcgctcaggtggccgagcgcttccacgtgacgtgttcagtgggtatcgcctgtaacaaactggtggccaaaatggcctcgaccaatgccaagccggacggcatgctgctgattccggcggcccgctcggctgagttcgtgcagatgatgccattgcgtggcattccgggcatcgggccgtctttggagaagcggcttaatgcttggggcgtgcattcggtggctgaattggctcagctggatgaagctgcattgactcgcgccactggctccccggctgcggcacgtggattatgggcggcctcgcacgggttggattcccgtgaaatcaccacggtgcgtgaggagaaatccattggatccgaggaaaccttggccgaggatacgcgcgatatgcgcgtggtatgtgggctactgcgttcggcctgcgacgatgtggccagcacgctgcggcgcaagggactggtggcgcgcacgctgacggtgaagttgcggttcgccgacctgagctatcagacccggtcttttacgatggagcggccgaccgatacggccggcgtgctgtacccggaatgcgtgcggcagctgaaagtcatgctggggctgccagcctcggcggagtctgccactcccctgcccaaaactattcgcttggccggtatgagcacgtcttcgctcagtgaggcggcggctacggccgtgcagccttcactggatgacatgctcgaagaggccgacaatgcccgcggccagacctcacaggcgcgtttgcatgatgccgaggccgcactggacgctgtgcgccgcaaatttggcagcaaggccgcccagtttggggcgtgacggccctgcggcgtggcttcccgccagccgcgcgggctttccacgttggacattaacaaacaccgggcaggcaccaagcaggcaccagcctcttggcgtacgtttccccagaccaatttccccatcatctggaacaacgtacgccgagacgaagcaaacgtacggcacctcagacaagaacgaaaacagtccggaacaacatacaccgagctgaagtaagcgtacgtttccccagacaaggacgaaaaaagtctggaacaacatacgctagctcacacgcggacggccgcgccctcccaggggccaagctcacggttggcgagggagaccacggcgtgcgaggcgtcgtaggtggaaatcacgatatccggttcggtcaccccgtgctgcaccagttcggcggcgtcgcgcggcagatcgaccgttcgtccggacaggttgaccgccaccagcagcttctcgccgccgagcgtgcgagtgaatgcgtagacgtactggtcgtccgcatcgatcagttgccagtcgccggcggccaccaacgcattctcgtggcgaatggcgatcagccgcttgtagaacgtgtacacggagtctggatcgtcgaattcgcccgccgcattgatctgggtatgattccggttcaccgaaatccacggctccacggcggcgtccggcgcggtgaaccccgcataggcggaaccatcccactgcattggcgtacgcgcgttgtcacggccgcgggcggcgatgccggccatcatcgattccgcggactgcactttggcttcctcgacccgctgatggtaggcattgagggattccagatcgcggtactggtccagccgggtgaagtggacgtcggtcatgcccagctcctcgccctgatagacgtagggggtgccgcgatgcatgtgcagcatcagacccaacgccttggcggaacgtacgcggctgccctcggtggagtcgtctccccaacgggagaccacgcgcggctgatcatggttgccggtgaacaggctcgcccagccggcattcttgacggccgactgctgcttggcgaaaatacgcttgagctggggcaggtcgagcggcagcggcttccatttgacgttgtcttcgcagtcgaagtccacgtgttcgaacaggaagagcatgtccagttcgccgttggcgggattggtgatgtgctcgttgcgctgggcggtgatgccgggggcctcgcccacggtcaggaagccctcgcgcccggcgaacacctcgcgacgcatttcggccaggaattcatcctgacgagggccgtccgcacagaacgggttcgggttggagtagccctcctcccccacgggcaggtcctcaagttcggaaccgtattcgccgggcagacggccggccgaatcgatacgcttggaaatgagggtgatgacgtccatgcggaagccgtccacgccccggtcgagccaccagttcatcatgtcgtacaccgcacgacgcaccgcaggattctcccaattcaaatccggctgcttcttcgagaactgatgcagatagtacttgccgcgttccgggcaatactcccacgccgaaccgccgaaataggaaccccaccggttcggctcggcccccggctcacccggggtggttcccgggcgggccggacgccaccagtaccaatccgcatgaggatcggacttgtctttggacgcctcgaaccacgcatgctcgtccgaagtatggttgaccaccagatccatcacgatcttgagcccccgcttgtgtgcctcggccagcagctcgtccatatcctcgagcgtgccgaacagggggtcaatgtcctgatagtcggaaatatcgtagccattgtcgtcctgcggcgacctgtacaccggcgacagccatagcacgtccacgccaagatcggccagataatccaaacgcgaggtgatacccttcagatcgccgataccgtccccgttcgaatcctggaacgaacgcggatagacctgatagaccacagcattcgaccaccacggattcggcgtggtgccattggttcgaacggaatcgggaagcacgacacgctgcgcagtagtcatgattgcaacctttctaacgaatgtgacgggaatcccggagggcggcaagaaccctccaggattccacagactgatgacgggatgagacggcttacttgttcgcgcctcgcatcacgccgctgatcacccacttctgggcgaagatgtagacgatgaggatcggggccatggccatcaggtagctggcaaacgccaccggatagttggcggtgaactgcgagctgaacacgaactgcgccagcgggatcgtctgatccgcggaattggacagcaggatcaacggcaggaggaagtcgttccacgcccacagcgcggtcaggatcgcgatggtggcgttgatcgggcccatcagcgggaagatgatggtccagaagatgcgccaggtggacgcgccgtcaatgcgggccgcctcttccagcgacaccggaatcgaacggatgaagccgatggcgatgaacaggttggtgcccaggccgaagatcatatacaggatgatcaggccgaacttgttgtcgaggttccacccgcccatctgcttggccagcggcagcatgatcacggagaacggcacgaacatggctgcgatgaagaagtagtacaggaagcggaagaaccgcttgtccatgttacgggccaccgcataggccacgaacgtgttggtcagcagggtgagcacgatggcgcccacggtgatgatcgccgagttcagggccgcgcgcggatagttcaccatgttcgaggcctcggcgaagttgccccactgccagctggtgggcagggcgaacgtgccggcttcggccggggttttcagtgcggtgacgatggtgaagtagagcggcaccagaatggtcaggctcagcaccgcgaccaccgcggtcagccaccagttgatcttatggtccttgcggaacttgtttttcttgggttgtgcagcaacagcgctggtcatgatcacaccttctccttgctaccgaagaacttgagctgaatgaacgcgatgatcgcgaggacgatgaagaacatcaccgcattggcggtctggtaggcgtattcgccaccggtcaggccgccctggtagatgaggtaggtgaccgtttccgtagcggagttcggaccgccaccggtcagggcgaccacctggtcgaaggtgcctaaggcgcccttcatcgtcaggacgaggttgatggtgaagaacggtccgatcagcgggaaggtgatctgccagaacttctgccaggcgttgacgccgtcaagggcggcggcctcgtagatgtcggtgtcgatggtctgcaggccggcgaggtagatcagtgtggtgtaggccacgccctgccatacggagagcaccacgatcggcgcccatgccagcgattcggaggtgatcatcgattcggacagccaccctatgcccaacgccttgccgagttcggggatcggcatcatgaagatgtacttgaacacgtagccgaccacaagcacggccagggtgtaggggatgaagtagatggcgcggaacccgttgcggaacgcgatcttggagttgagcagcacggcgatgaacatggacagcaggttcaccagaatcgtcaccacgatggcgatgaagaacgtgaacaggtaggcgcgcccaatgcgctcatcctggaacatggccttgtagttggtcaggccgatccatttgtatttgccgtagcccttggaattggtgaaggagtacatcacgccgcgcaggaacggccagtacaggaacaccatgaacaggatcatggccggaacggtcatccagtagtatgcgggatcgaccttgcgatgggagaaagcggagacacgcttcttgcgtggtttttcggcaatggcggacatggtgaacctccttactgtacggtcctggcttggatctgatcccactgcgtctgcattgaattggtgaacgcctcaacgttgccggtggtcagcaggctttgcaggctgccggccatggtcatggacgaggggatgtagtggtcggcgaaatcagcgatgcgtccctccttgtagaagtggaggatgttctgcagagcctcgtcgccggcgtaggtgtccttgaacggggtgaagcagaactgcgattcggcgtattccttgagccggtcctcgtccatcaagaattccacgaacatgcgcgattccttgggatgcttggtggtggccgaaatggtgagcacggtgtcgtcgccggcggtgagcacctgctcgtccggatcgtcggtggcgggcagctgggcgaacttcacgttgatgtccgggttgaccatgcgcacctgcggcacgacgtaggtgcccaggggcaagatggccgccttgccgttggcgaagtcctgggtggcctgctggtaagtaacgcccggattgtcctgcgtgtactggtagaactcgacttccttttccgccacgggaccccacaggtcggcgaatgtggcggtgccgccgctgagcttcgagtattcgctgatcggcacaagtgtgccggccagggaggcgaacggcgcctgagtggtccacggttcggcgaggctgccttcgatcggcgtgatgccggcctgctggatctgcttcatcgcggcgatgaactcggaccaagtttcgggcaggttgtccgggtccagcccagcctgacgccacaggtccacgttgacgacgtagccgttggcgttgccggcgaacgggatgccgtacgcgcggtcggcgctggtgtcgtacagtttggccagatccttgagcagcttgaccatctgcgggttgatgttgtcgaggatctcgtcgtcggtgaagtcctggaagattcccgaggcggcgaattcgccgaagtaacggccgccgtccacggtgaggacatccggcaccttgttcttgacgaagcgcgtgcgcagatcggtggcggcatcggcggtgttgatgatgtcgatggtgatgttggggtgttccgcctcgaatcccttgaccagcttcttgaactggctgactgcctctaccttgtactggaagaattcgagagtgacgtttccggcggtggatgtgccacaaccggcgagtgcggccacgcatgcggcgccggcacagacggcggcgatggcgcgggatatgctgcgggtctttgccgccatacggttcgggcgtcgatcatgcccggaggacgaccagcgctcggtccaagacgatgcggacttcatctgctgcttctcctttcatttacacttcacgacttcgctactccgcgactgtcgtgatgtatacgttaacacccatatttattgatattaaacggcataattacaggatttctgtaaacggttacattccgtcatggtatgattgtggccattatcgagcacccatgaggaaggttcgcgcgtgatacattccacgatctacgacgtagccgtcagggccggggtgtccgtggccacggtgtcacgaacattcgccaaaccggatatcgtcaccgaggccacgcgcaagaaagtgatcgaagcggccaacgaactcgacttcgccatctcccggtccgccaccgcgctgaaatcgaaacacacgttccgtatcgctatgctcaccggcgaggcgatcgccacctggttcgactccaatctgtacaaggggctgaccgaggtgctgcagacccatggctacgacgtgtccctctacggcattgcggacaccgaacagcgcatgtcgttcttcgacgagctgcccctgcgccgcaatgtcgacgcggtgatcgtggcctcgttcaacgtaaccatggaggagatctccaacctgcagggcatgggcgtgccgctgatcggcgtcaacgtgccgcacaacgaggggttcaacgccaccgtgtccatagacaacgccaagagcatgcgcatggccatcaatcacctgcatgccctggggcaccggcgtatcgcctacatctgcaccgacgtctcggaggcgccgatggaatacagtgcggactcgcgcctgcagagattcgaatcggcctgtgcggcgtatgaggatatcgaaaagttgaccatagccctgccccgcaacgacttcaccgtggacgaggcgatcgcgcgcatcaccgtcatggaccagccgcccacggccctatgctgcctgagcgacgggacggcgctgcccctgctgtacaagctgcccaaagccgggatcggcgtgccgaacgacatgtccctgatcggattcgacgacagcgactatgcggccgagttcgggctgaccaccattcatcaggatccgcaggccctggggcgcaaggcagcggaaaaggcgctgtcgctgattgattccgcgacgttcggcattgacctgggcgagccgttcgagaccgcgcgcacgttcctggccatccgcaataccacggcggcgccccggcggtagtcggtgtcgtcaggcgcgggccgattgcagacgttcgcaggcggagcggatggcctcgtcggtggcggtggcggagaaacgcaggtaggcgggagcgccgtagaattcgccggggctggggatgatgccgatcttggcgagctcggccatatcggcccagcagtcgccggacttggccttgacccatacgtacagcgcgccggagggcatttgcgccgaatagccatacgccttcagcgcgtcaaccagcgcggatagacggcgacggtaacgaccccattgctcgtgcacggcggctgtgtccttcagacccgcagccatggcggcctgcactgggccagggataatctggccgatctgcttgcggtattcggccatttccttgaccagccggtaatcgccggcaatcagagccgtacggtagccggccatgttggactgcttggacagcgagtagagcaccaggatgccagctgccgaaccttcacacacatgtgaattcagggcacatggcgtggcggagagactgaatgcggtatcggaggcgggctcgttggattcggccaccggtgcggcaggcacagacgcagcagatgcagacgtggcaggcgcagaggacaaggctgtattgcggcgcaccgaacgccagtccatcaacgcatagcattcgtcggagagcaccacggcaccgatgcgacgggcagcagccacgatgtcggtcagccagtcagcggagatgacctcgccggaaggattacacggcgagttgatccagatggccttgacgttcggaatattcacccaggaatcgacgtcggtcacatcatcgactttgaccacggtggcgccggcaagttgggtaccgatttcgtaagtcgggtaggagacggccggttggacgaccacatcgccttcgccaaggtgcagcaggctggccatcagtgccacggcctccttggaacccacggtgggtacggcggcagcgttgatggacttcagatccacaccgcgcagttcgcggaaccatgtatcgatagcggccttaaggtcggcgctgccggcggtgaccgggtatccatgggcgttgggggcgtctgcgccggcaaccagcgcctgctggacactgctcggcaccgggtccacgggcgagcctacggacaggtcgatcatgccacccggcacggttttggcggtggctttgaagccggcgatacgagaccagtcgtatggcgacgaatatgcgtggaagcccatgagaacccctttcttggacggtatgttcctaagatacgacgaaccctcggccgtgatagaccgagggttcaatccgaactatgcgctgtgtgcagcgcttatccgcaaatcagcttactggttctgcggcggcagcgcggcgacctgttccgggtctttgccgattgggccattggcggaagcgccgcccaaatcgccgacttcagcgaagaagttgatagcggcatccttgtaccaagcccactcgtccggcagatcatcctcatagaagatggcctcggtggggcacaccggttcgcatgcaccgcagtcgacgcactcgttggggttgatgtacagcgagcgggaaccctcgtaaatgcagtcgacggggcactcgtccacgcaagccttgtccttgacatccacgcaaggctgagcgatcacatatggcatggaatcctccttaacagatactggtacgagggtacgcgcccgttgggacgctcctcgctctcagccgttaacggccttatcggtttcggcggacagcgtttcggtcaggtcgcccttgccgaggcgcgcatgccagtagccgtagccgaagtagatggcgacgccgaccacgagccacaccacgaaacgaatccaggtgagcacggacaggttgagcatcaaccagaagttggccacggcgatgaggatcggaatccacgggtcgccgggcatcttgaaggcgcgcggcaggtcggggcgcttcttgcgcataatcgggatggagatggccaccagcgtgaaggcggacagggtgccgatgttgaccatgtcggagagcacgccgatgtcgaagaaggcggccacgagcgccaccaccgcgccgacgacgatctgcagagcggccggggtgccatgcttgccggtcttggacaggccgcgcggcagcagaccatcgcggctcatggcgaagacgatacgggtcaggccgagcaacagcaccatgaccacggtggccaggcccagcacgatgccgaagctgatgatcttggcggcccagtcggcacccaccagttcgaaggcggtggccagcgaggggctgtcttgcttggcgagatcggcataggagaccatgccggtggtcaccacggccacgagcatgtacatgacgatgatgagcagcatgcccacgccgatgccgagcggcacgttcttgtgcgggttcttggtctcctcggaggcggtggccaccacgtcgaagccgatgaacgcgaagaacacgagcgccgcgcccgaaaggatgccgggaacgccgtacacggatggggtcatgccggtggcgaactgccacagcggctgggtcatcacgccggtgacggcggaggagccttccacggtggaggccggctggctcggcggaatgaacggggtgaagttggaggccttgacgtagaagaagccgacgatcaccacaaagaacacgatggcgatcttgagcacggtcatagcaccgtccacgcgggcgccgatcttggtgccgaatacgagcagcgtggtaaagaacgccacgatgatgatcggggcgatatcgatatggaaggagccgaacgccaggttggtgttggcgttccagcccatcaggcgcatgaaatcgttgaggtatacgccccaatatttggaaatcacggagccggccatcagcatttccagaatcagatcccagccgatgatccaggccatgatctcgccgaccgtggtgtaggtgaaggtgtaggcggagccggccaccggaatcatcgaagcgaattcggcgtagcacatcacggctgcgccgcacacgatgccggcgatcaggaagctgatgatcacggccgggccggcgtggaaggcggcggcctgcgcgcccaccgagaagatgccggcacccacggctacggccacgcccatgattgacagatcccaccaagtcaggttgcgcttgagcttgcggccctcttcacccgtttcggcaatggtctgttcgacggatttcgtacggaacagttgcatagtgctcttctttttctctgttgtttgcgcaccgaatgcgcacaataccgacaatcgagtatagaagagcccgcgtgtcttgtctattaataagacttagagtccgcaatatatgggattaataccccactccatcgatcaatagcgcgattacagcacgccgacgcagaccggttcgggcaccaagtccactccgaacgcgctcttgaccgcctgctgaaccgcacgcgccaaagctgcgatatcggccgcgctcgctcccccacgattggtcaaggccagcgtgtgctgcgtggatagactggccggcgcgtacgcatcgaccttatatcccttatggcagccggcatggtcgatgagccaggcggcggacgtcttggtgccgggagtgccgtcaggcagagtcgcgtcgaacttcggcgcatcttcgggcagggccgccgcttggccggcggtcagaatcggattcataaagaacgagccgcagctgtggcgattgtagtcgggagcaggcaggccgtcatcgccaacgggaacgccggcggcctcattgagggaggccagacgctccagatcggtcaggatattggcctcgcgcttggcggtggccatgtcgggcaaggcgtagcgagtgggatcctcaagcatgcccttggcggcacgtactgcgagcacggctttgcggatgtcggcggtggccatacggtcgcctacttcgacgccaagcgctttggcaagctgtccgtaacctaccgtgccttcggccgagtgggtcagggcaaaggtgacggagagcaccacgtaacgtggcgtcgggaagaatcggtcggccggctggccgggaccggcgtacatgctggccttcagtgcggagtatcgatagccgaatcgaagatcggcgggtgtgaggtcgcgcgttgttttggtgtctcgatcccagacttccaccgattcgaccgaagtggcgacttcctgtccgtaggcaccgatgttctgcaccacggaagcgccgactgtgccgggaatgccggacagtccctcgacgccctcgagcccgagctctacggtgaaggccacgaaatcatcccaattggcaccggcctcggcattgacatgcacggtgcgatcctcgccctctaccggtgcagcctcgtccggcacagtgatgaggcgtcgggcgtctcgaaccaccacgccgtcaaaaggcttatcggaaacaagcaggttggagccgccaccgataacgaccaagggcaggcctttggaatcggcatcctccacggcttcgatgagccccacgcgcgtggtcggctcgatgaaatgggcgatggggccgcccacgcccatggtggtgatgtctgcaaagcttgtcatgacttcctatcttagtggcgcaggtgcgatatcggggcaatcatcggctgaaacggcagaacgcccgcgaggggttcgttcagacgcgggatttctgccatttctcacgcgatgcggatactgattccgcaccctaccactcggctctggagtcaatacgcaaaaacccggccgaatgggccgggttttgtaaagctgtgatgcttgcgatcaacgagtctcgcggtgcacggtctgcttgccgcagcgcgggcagaacttcttgagctcaagacggtcgggcgtattacgacggttcttagtcgtaatgtagttacgctccttgcactcggtgcaggccagcgtgatgcccggacggatgtcggcgctcttagccattgtcattcacctctgtgttcttaggtatagtgcgcgcccaccggttagcgggcgcgatttgtagcgaggaagaggctcgaactcttgaccttacgattatgagtcgtacgctctagccagctgagctaccccgccagagagccccgagtgagaattggactcacgacc

SEQ ID NO: 3776 - DNA, 14463 bp, Unknown
  R35_2m  MAG No. k141_1807
caacggacgcatccgccgctacctgcccaagaaaaccagtttcgacggcctgacagacgaggacctgcaggccatcgtggacgagatcaacgacacccccatgaaggtcctggaccgggaaacgcccaacgaggtttggtaccgcgagctcggcaaggtactctcgaagacaagccacccaaagacgggtgttgcacttacaaattgaatccgggttgcgtatcgaccagcttggcataggatgtgacttgaagcacgtcggtgtcgttcagcgtatgactgggcttctttgcatcgataatgacttcgggtcggtcatccacaagaatttcgatgtcactgaataaagtgacttttcgactaccagcttgagcggtaatgggattctcgaatcgcatttcgttttcggagtatcccaatgaccgcaaatacggcatgatgattttctgcttcgcgtcttcctccgaatgaacagcaacaccgggagcatgtgcgggccgtcgactcgccgccagacccacgacatcggctcatcgttggacggcgaccgggccgaccgcgatggatggtctcaagcggatccatgcgatcatcgagagcgtcacggtgcattgaacagggaagggaatagacgatgattgcaatgattggtgccgcggtgactccggtattcgcgcaggcgctcgatatggcgatcgacggcgaggtgtgcgtgaacggtgagtgcaggccgatggccgagcgggatctgtggattccgttcgcgatcgtgggcggcgtgttcgccgtcatcatcctgttcgtcgccgtcatcatcctgctggtacggcgcatgggacgcgcgaaggcgcagggccgcgccgccggcaaggtgagcgtcggcgtcacctacgaatggccggcgaagacggtgaagcgcatagcgggggtggtcggcgcccgctacgagccgtctatcgttcgacggtcaggaacgcctggctggcgatgaggttcatcataggattctggctgtcggatgtggtactccttgcggcgtacctgtatttcaaggatttcgcctttctgttctgcctcattctgatgacgatgatatgcatggtcacgatgatggtgggacggcccgtcgcctggttccgcctcatcgcacaggcgaaggccaacatcgtcgatgatgagacacgcccgtaatcgtcgttttcgctctgttgggggagcacatatgcggttgcgatgacggcgcgtccacggccatgatcattcaccatccttgatgatctcgggggcggaggcgtccgcgctggcggtgaatcctcccgtataccaggagtcccacgcgggcgtctccgtcgaatggcgcatagcgtcccgtgcggccccgatggtgaatccgtcgccgtcgatgcgtgtgatctgcgcgatctcgtagtggacgtccagcccgtctttccgcatggcggtgatgaacgccgatgcgaatgtggcgaaccgctcacggtccgtcacggtttccggggagatgtagatctccatgctgccaacgaaatacgaggcgagatcgtcgacggcggcggacggcgacaaccgccattgggtctcgttcttcggaccggtggggtcgctgatccggtagacgcagtcgagatcgggatgcgccgcgaggaaccggtcgatccgttccgtaagatgaccgttgtagtcgtcccggcgcagcgccgtgaaatacgtgtccgcgacatacggaccgagatcgttcccgtcggcaccattgccttccacataatccacttcgaacacgtcgccttgcaacggccccgatgcgggcgtcacgttgatccaccatgtcgggtcaagcagttccggacggtgaaatccttctgatgcacggaattccacgccataccgttccgacatccggtcaagcagcgtctccgccagcgtgaccagacggaacagttgcgagtcgggccaaccgtccttcatgccggcgacgttcgcgtcccgctcctgtcgatcgttcagcagcgcctccgctatcgagatctgcctcgctgtgggtgtggcatccatgtcgtatcctttcttcgcgtatggcggccagtccgaaaacgtcccatttccggtaccgccggcgcccgccccgttcgcatccgcatcggcgtgatgcgtgagccatacgggaggagcgcatccggtgagtcccgcggcgatggcgacgagcgccgccaatgccgcggcgcatgccgccagccgtcgtctacccgcccaactcattgatcttccccgcctcttcggcatccgactgttagaaccgttgcgacgattctacagcaagacgcatcgaacgatcccgggaattggcggcacccgctgacctgatgtaggctgttcccactgggtaatcgcattcggggaagaggcgtcaatggctgtactgacagatgctgaagctcgtcgtatgctggaactgctgaaggaagctttgtctccgaagtccatcaccctgaataaaggcgagaagcaattccaattgcatcagataagtttgtagtcaaatgaatcgtagtatttacgacgagaagaaagtatgacgagttctgattttgactcattaattcgtagttacggaaaatggctgtctgataacacgacttatacgcaactggatgagtggtatgaagttaatgttccgcttctggatgaagacaacgattatacgcagttctacgtgaagcccgggaagaacagcgtaacgttctctgatgactgtgccacattacgccgtttggagtcgcatgggatgactgtgacggaatcgcgtttggcagtgctcaaagatattctgaatcagtttggtattgaacgtaacggcgacgagcttactctgacgagcgatactgctgattttgctgatgccaagaatcggttcctgcaagctatcatcaaagttggtgatatgtctatgctggccaatcccatgtgcagacgtattttgcagatgacattcgtatgttccttaatgcgaacaacatacggtatgtggaagacgttcaattccgtggcaagtctggtttgctgtgcccgtatgactttgtgttgccgttcacgagtaaacagccggaacgattctgcacatctattacgcggccttcccagcgactcatttccggtaccttgttttcatgggaggatacgcaggcggcacgaaagacaccaagtgaactggttgttttcctcaatgattcggatcggcgcattgacaatcagctaataaccgctttggaaaagtacaatgcgtatcccattaagtggagtgagcgggaatttaaggagaacttgtacaagcttgcttcgtgagtggtgcttgtggctttggtcgggagcgaggtttctgctgtttgccgtgtcgacctcccctcagtcgcctacggcgacagctcccctcggggaggggagttgaggaagcgcttaacgagcatagggcttcagccgctcccaatacgcccgaatcgcgccgaacgaatacaccgcgatcgcgacccaaatcaccatcaacgccgcatagccctgcgcgcgcatcggctcgtgcagcaggagcacggccacacagaactggatcagcgggttgagatattggatgaaactcacggtcaggtaatggctgtgctgcacgccgtaggagaacatggccagcggaatcgcggtgggcaggccggagaaagccaccaacagcgcgaccatggccgccaacgtggcgaccaaacgatacgcgagcacgctgatggcattcatactggacagtgcgcgccagtacagcggcagcacgccccagccgatattggacacgagcggcgcggctatccccattcgcgtctgctcgacggtacgaaccgaagtcacgtctcaccaccatagcgactgatcacatgagtgtcccgcacctggtcacatggcatattggacttgctgatgatgaacagtaccggttattgttagagtcttttccacaggacacggagattgaacagatgattcggccttttctgagggcgcgaatcagattcgtaacgcagtggtttgccctggactctgttacggtgataataacttcatcgttgataagggagtcttcatggcaggcaatggcaacacggcatttcgtttccgagtcactttgcgccttgacgggcgtgaatgctggcgggagattctggtgccggcatcattgacgttcttcgatttgcatgcggtattgcaggaatgctttatgtggtacggcgagcatctgttctgcttctgcgccacattcccggatgggaagcaggtgcaagtggaagaattgtggggagaagagccctcataccatgaggcgagatacgaacaatatatgccggtggagccgttgccggaagttcgcattgcttcggaaaccgagctgggcgacgtgtttcccaaggcgcgtgccgctcgctattactacgattatggtgacgattggatccatgacatcaagctgctgcgtacctaccgcagcgtgcacgttgcggatcctcagctttgggatggggcgggggatgcgcctccggaggatgtcggcggggtgtatgggttcgagcggttccttgataccttgggcaatcccgaagatgaagaacatgatggcatggttgagtgggccgaggaccagatgtgggatcgtttcacgctgaaccgccatcgtgagcgtctgttccgttggcacaagcaccgtgacatgatgttgcatgggtgatgctgaacagatgatagccgaactgcattaggctactacgtcccacaccgtaatgtatgaccaatcattaggaggcccgtcatgactgcccatttcgacgagttcgaagaggagatgacctcccgcagcctggagcgagcatatgattacgtggacgagcataggatcggtggattagaggaagtgtcggccggactattccacgccgaagtgcacggttctgaactctacgatgtcgatattcgacttcgtggcaacgatatcgtgttcgcatcctgcacctgcccctacgactatgacggatactgcaagcatattggtgcggtgctcttgacgttgcgtgattacaaacacggcggtaatcatcagcagaacgtgacatacgatgcgatgattgcaaagcaggacgactctcggccagacatacccgtagcagcaaatcctctcgcatcgaaacctgaagtgttcaatcgagtgctgcaacatattcgagaacgagtgggactgcgcaaatcagaacggtggacgcccgctcagcatttctatctggtttggaatcaggacgaaatcaatgccatcgtgactgcgaatccggcaatcgcgagcggcatggaaccattgatgcccgaaagcaccgtggatcgcgtcatggaatctcccatgcggcgacatctcggcaaggactacggctggaaattcaaatggggagatgccgccataaacggcgtgatggccgtattcgaggaagcagaacaatcgaacgactatccgctggccataagacgcatgtgcgcggctttgcgaaaaacagtgtggttcgcgagacaagtcgatgatgaagagggtacgttacagacatatatcgaacacctcaatgagcggatcctcgcttatacgtatgccgcggcaccaatcgttacaggcgagcaagcgcagcagatgctgattgcagcgttgggattcatacgtgatacccctatgatcgagatgctgttttggccgcacacgccgctggaatgcgtcatcccattcgcggatattcacgcacgaggtacggcggacatagaacagatggagcatcagccccgcgagattggcacgacctcgttcatgtgccgcacctatgcgcagtccacattgaatgttgcccaacaattccttcatgacaagaagggggattccattgacggccatcgaacgaacctgaccgattacgattggcgagctgcacaggactatctgctgaaactccatcatgactttctgctgtacggcggcgacgcaattagtgccgatgagctactgtccaaaaacacggacgtggccgaatgcagatttgccgtcatcgcacgtaaattcctggacggggattatgcctgggccgccgctttcttggaacagacttacgattgggatgccgcgcaaaagcatgcggggtattgggggctcaccgctcaactgccgcatggcgagcttaccatgctggaggcctgctatgaacgactgaacgatgagaacggcatcaaacaattatatgagtactacgtcgctcacagtgattcagtggcggacgaacgttgcattcccatcctcaaatcgatggtcggcaaatcgggctggcctcaaagcattcagaacatcctgcgcaactatcatgagcatgatttcggtgggaaagtccttgcacgactcatgactgaagagcgcctatccgatgaggccttgaccttagccgaacagcggccggaactcctgcgtgatttgctcaagcccatcagcctcaatcacagcgcggaagcagaacgactgatcagaaagcagctgccgctggatcgcgatctgcaacagggaaatcgcgacgaataccgattcgttgccatgtggatcgagcaatatcgcaacgttttcggacttgaccaagccaaggctctcgccaaggagatcatggcaaagtacccgagacggtatgcactcaaagaggaaatcggccgcgtgctaaagtaacttactgatgccaaaacattctagcactactccgacgatgcccgccaccgcggccacaagaatgcacgcaataccgaatacgcgcagcgcgccgcctttgacctgcgcattcgggcggaagaaaatacaccaccaaatcagatacagcgcatgaccccacatcagctgccgcgaacggctaaatctgccgagttcaccgagttcaccggccctattaagtccctcaactccatcaatcgccgtctgacccatcacatcacgctttcatacacattgccgattgacagtcctagaacacagtctagaactgtcatggtatgttcgcgcagataggggctccaacaaaattggctaaaagagaactcggcaacctataacaaggacgcgcccgtgtacccttaccgttcagctccgctcacgaatgaaatcgaaaatcacgtcgaagacctgttggctccagaaatcgtactcatgttcggcgccgtcgactagcaccagctgcgcgtccacgccgtgctcggccagccggtcgcgcatcttgacggattgatggtaggggaccacggtgtcggcggtgccgtgcaacaggagcatcggtggatactgctggtcatcccgcacctgcaggtaggggctcatgtcagccgcgcgctgacggacctcggcattgatgccggtctcatgggtcgcgcccaccacggccgcgaacgggccgaaataatacagccggaatggattggtctcatcgtcgaatgcgtcgactgcttcaagcatgtcggtgggcgggaagcagctgaccacgtacttcaccgcatcgctctcatcggcattggtgccgtcctcataccgcggattgtcggcggtcaaccccaccagcagcgacgtgttgccgccggacgacgtgccccagataccgagacggtcgggggccacgtgccattgacgtgcgtttgccctgagatagcggatggctgctttgacgtcctcgagatatgcggggaacacgtcgtggggatcgctcgaggcgtcgcgatgattcaccgtagccaccacaaagccttcgcgggccaaagccgagagctgcgggatctcgtagtcgcgatgcggcgtggtccaggcgctgccttgcacgaataccacggtggggtagcggcggttatcgtcatcgccggtggattgcggggcgatgatatccattaccagatcatcggccccggtcttgtacgccacgttgcgggtcagcgaggccagcccggcaagcgtgggattagatggaatatggatggcaccgtccgaaccagtgacgttttcggcggctttggatgagtcgatggtctgcatggaatccccctggttctgttgcaatacaggacatcatacagatgatacgaggccgatcgctgatgatcgctcgactaccgatacaacgccagaaatacggaacaatcggagtctcctacgccctgctcggactgtccgcctgaatgattgcgattgttggtggcgagaaacgcgtgtatctcatccctagctaccgcgagcgctgcatcccgcggatagccgtaaatcccggcggaaatcagcgggaatgcgatgcttccgcagccgagcgacacagcaagctccatcgaattgcgataacaggcgcgcagcaattgttcctcaccggcatcaccgccctgccaaatcgggccggcggtgtgaatcacgtatcgggcggacaatgcgaagcctggtgtcgctaccgcgcaaccggtgagaataggggaaagtcggtcacaggcctcctgcatatcccgagctcccgccgcacggaaaatcgcgccgcacacgccgccgcccatcaacaaccgcgtgttcgccgcgttaacaatcgcatccacctgcatggtggtgatgtcctgatgcacaattcgcagtggcatgactgctatccctttattctttagaacgacggcatatcaagcgacggtgcttgacctgtagggctagccgatgcgctgccatcgtcatgttcgcggaaccaatcgataacctgcgcctcgctcaccggcatcaagtcccatgcatccaatccgacgttcagagcctccggacgggccccatcgggcgaaagctgatgcgtgtgaccatacagcagctttcgcccgtcaaacggcagggccttaccgctgaactttgccacatcgtcgggccagctgtacgacaaatcctcccgatatgggaagtgggacagattcactatgccaagtccttcgatttcgaccgtatcgttcggctcaaggctctcgaacaggttgagtgcgggccgatcttcaagccaccaatcatcgtgattgccgatcacaccatgcaaatgcttgcaattgagcgcgcgtagacagttcttcaaatgcgtcagtgacgtgcgaaaaccgatgtcgcccagaatccacaactcatcgtccggcccgaccatcgcattgatattgtccacgatcgctttgtcgtgagcatccgtatcggctgccgtgcggaacgtcggccccgagtccagcgtcgtctccttggcccaatcctcagcggctttgcgcccatgcgcgcgcagtatttcctcatagcttgagcgcgttggatcgaatgtcgtaaaacctcgtagcacggtgaccagcggatgcccgaaatgcgtatcggtggtgaaatacttcattgacggtcctcctgcggtgctgtccttgccgcaaccggtgcaaggacattacgaatgactccatcctaagtccataagcgccatgtgaggagtcgcaaggatggccgtcagcccgtgtctgttcgtgttgccataataaggcgcattgcaggggaacccgtgaaccaagccgataccagccgagccggtacggtgccattcgcgccgagaccgaatcaatcgccgacatgcgggttgagaaaaggcataaggcctgacccccttggagcctgttggccaacaccatcggagggagcaaatgatgacttttgacgccgccgcgttcggcccgatcaccttggaccatctgccgccgttcgcgcaacgactgcgcgaggccgccaacttggtctgggaggagggataccggcagccgttcctgcgcgagctgggcaacgggacgctcgatcgcgagcgcttcgcattctatctgctgcaggactaccgttacctaaacgactacgccaaggtccacgctctggccctcaccaaaacccaggatcccgaagtcatgcggttcatggccgacgtgcagaacggtatcttcaatgtggagtccgcgatgcaacgcaaatacatggcaagttacggcatcagcgagcaggaaatgaactcggttcgtcagtccgcgttcgcccgcgcctacacgtcgaacatcctttcgatcgcatatggcaatcctttagtcgatgttctcgtggccgtgctgccctgcgcatgggtgtacgccgactacgggcagcgtctcgccgccgaattcacggacacgcttgattccagcccgtacaagagctgggtggacatgtacaaaaccgaggagttctggagcagctccgcatggctgatcgaacatatcgagcagctgaccgaacacctgagcgcagaacgcaaggacgaactcgtggacgtcttcgtgaccggcgtgcagaacgaatacatgttctggtcgagtgcctacgacatgcagtacacatggaagccggaatgggatgtgtgaggaacacgatggatgagcggtgggcgcgtgccctgcgtgccaaaggcatcaatgtcggagagggcagtcaacacggctccagcgataagacggaaacagggaaattcctcgaatccaaaatcgttgcgaaaatcgttgcggctaagggcaagtctcgacaggcagcggcgaataccgtatctcgcgccacaccattcaaagccaccggacataaggacggcatcagtcggcaggggaattgaccctgttgcggggctgtttcgagatgaatgggctcgggatgggtgcagccaatgggctactccagcttcaaggggctgattgcgtgctttccggaggtctatctccgtttcaaggggctgatgcccaagtagatggagggcaaaaacggcggaatgacgtgggcatgaggctgttattatgcttcgtccggaggatgaccagccccttgaaacggaagtagacctccggaacggttcagatcagcccctcgaaacggaagtagacctccggaacggttcagatcagcccctcgaaacgtgtgttgtagattaaaacgccggtaactcggttcagagaggtacattcggcgctttgcagaatggtaactgccttcgaagaggtactttgttcgcgaaaccatgagtataatcggttagacaccaacgccattccgccgtctctgagctgcttccacttggctcggtacccctttgaacggagatggcattccgcaagaggccaaatgtacccctttgaatggagatatccaatatcgggctatgccgacatcatattgcgcgcagaaaatcacgaatatcagcaatttcctcgtcgcaaatggcgtgagccatgtcgggatactcgcgataggtcagaagcccggcccgttcaaggacctgatgggccgtctgctggtcgggcgcggggattgtgcggtcatacgcgccataggccagaaagaatcgggtaagggagtcaagcgccgcctgctcctcgcccatgaacgaagggctgagcagaatcgccgaatcgaacacggtcggatacgccttgaccagacggtacgacaggtagccgccttgggagaacccgataagaatcttcttacggtttgcaaacgccgaggcgtccagcaacgaggtcaccgcttcgccgaccgccgcgcattcccgttgccgttcttccacgccgcagccgtccggataccagtaattgccgcccatgtaaggccttggataggtggcgcggaatgagatgtaactcggcccggtctcaccatgtgcggattcagcgtgattgactgagtagtcggaatcagcgaaatcagaggaaccaacgggagcggacgaaactgataaatccgtatggaaccgtgccggcgcatatacagcgtcgagaatccgcaccatttcgctctcatcgttgccatacccgtgaaacatcaagaaaatcgggtcgtcgccgtcggcattgattcggctcgtcatctgcagtcgcatcgtcatcacctcactcaacgagcttacatgcattcttacatgcattagacttgtatcgtttgaccgaccaagaacacgcaaggagcaatcatggggccgaggcgcggggcgctgaccgcaggcgagaaggtgcagttcaccgaccgcaagggcaagaagatcaccgatcagctggttgccggcggctccacacaaaccgagcatggcttgattctgcacgatgatgtgatcggcaggatcgaaggcacggtcatcctcaccgtacacgccaaacgagaggctcaggtcaatcaggtccaccccgaaaaggacaggaacaagccgtggaagtcctcgcgcgccatcggcggctgggagtatgcggtgatgcgcccacgtctggccgactacgtgctctccatgccgcgtggcgcgcagatcatgtatccgaaagacatcgcccaggtcatccagcttggcgacattcgctccggcatgcgcgtgctggaatccggcgccggctcgggagcgatgagcgtcaacctgctggacgccgtaggacaggatggccacctgaccaccatcgagctgcgccccgaattcgccaaggtggcccaggccaatgccacgctgtactacggcgagcagccgcaatggtgggacctcaaaaccggcgacttcgattccgtggccgccgaactgcccgaacattggttcgaccgtatcatgctcgacatgctcgatccgtggaacaggctcgaacaggcctgtcgcgtgatcgcccccggcggcgtgttggtcagctacgtaaccaccaccacgcagatgagccgactggccgaagccctgcgcacggccggctgctggaccgaaccgcagatccaggaaaccctcgaacgcacatggaaggcccaaggcctcgccgtacgccccgaccatcagatgatcggacacaccggtttccttgtcgtttcgcgcgccatggcccccggcttcgaggcactgcgcaaacgcgaccgcgtgaccaaggacacgtccaccgacatcgactccctcaccgaagagcagcgcgaagcccagatcgaagagctggaactgcgtgatatctccgatcacaaactacgtaaggtgctgcgcgatctcgaccgtcaggtcggccggctcgccgacaccgacgaataagcgccgaatgatgggtcgccggccgtttcgacggccctatactggaagcaatacagggccgagcagcggttcgtgaagggagccacggatgggcatcaagctgaacaaggtcgccaaggcagccaagaaatatgaccatgtcctcatcatcatgaggcatgccaaggctgagccgttcggagacaagggcgatgtcgagcgtgagctcaccgagaaaggcctcaaacaggccaaagccgtgggcaagggtgtcgaagcgctgggattggtgcccgaccggatttcctgctcgtccgccacccgcacccggcagacgctggatcgcatgctcaagacgttcggtgacaagccgatcgtcgattatcgcatcagcctgtatgacgggggagtgcaggccgtgttcgacgaacttgcccacgtcaaggacaagacccatgtgttcatggtcgtcggccatgagcctaccgtgtccatcagcgcgcaatggctcgcctctgccgactccgattcggaacgtcttgatctgctgaatctgggtctttcgccggcctccatcgtgattatgggctcagataagccgttcgatgaatggcaggtgcacagtggcgaactgctcgccgtcatcaatgcgaaggacttcgactgattccatcgcgtcggctggtttccatggtccggtgccaccagtgatgatgaggcaagtccgccagcaatctggcggaccgttcgtgtttttcggcatgaggtgtagtctcggctttacgcgatgacgcgaggccagtacatgatgctataagttccatctataacgacactctacgatcatttataagctgtgaatccgagtgttttgctaccctaagtcgggttacgaacgcttacattggaggattcatgtccactctgacttccgtctccggctttccccgcatcgggcagaaccgcgaactgaagaagatcatcgaaggctactggaagggcgccaacgacctggccgccgtcaaggccaccgccgccgaactgcgcgccaagcactggaagctgcagcaggccgccggcatcgacctcattcccagcaacgacttcagctactacgatcagatgctggacaccgccatcctcctcaacgtgattccaaagcgttacgagcgtctcgccctcgataaccaggaggacacgctcttcgccatggcccgcggctaccagggcgacaagggcgacgtgaccgccctgccgatgaagaagtggttcaccaccaactaccactatctggtgcccgaagtcgagtcggccgcggaga

SEQ ID NO: 3777 - DNA, 6120 bp, Unknown
  R35_2m  MAG No. k141_1818
taagtccctcaactccatcaatcgccgtctgacccatcacatcacgctttcatacacattgccgattgacagtcttagaacacagtctagaactgtcatggcatgttcacgcagacaggggctccaacaaaattggctaaacgagaactcggcaacctataaaaaggactcgcccgtgtgtgtccttaccgttcagctccgctcacgaatgaaatcgaaaatcacgtcgaagacctgctggctccagaaatcgtactcatgttcggcgccgtcgaccaggaccagttgtgcgtccacgtcgtgctcgaccagtcggtcgcgcatcttgacggactgatggtaggggaccacggtgtcggcggtgccgtgcaacaggagcatcggcggatactgccggccgtcccgcacctgcaggtagggactcatgtcagccgcacgctgacggacctcggcattgatgccggtctcatgggtcgcgcccaccacggccgcgaacgggccgaaataatacagccggaatggattggtctcatcgtcgaatgcgtcgacagcttcaagcatgtcggtgggcgggaagcaactgaccacgtacttcaccgcatcgctctcatcggcattggtgccgtcctcataccgcggatcgtcggcggtcagccccaccaacagtgacgtgttgccgccggacgacgtgccccagatgccgaggcggtcggggtccacgtgccattgacgcgcgtttgccctgagatagcggatggctgctttgacgtcctcgagatatgcggggaacacgtcgtggggatcgctcgaggcatcgcgatgattcaccgtggccaccacaaagccttcgcgggccaaagccgagagctgcgggatctcgtagtcacgatgcggcgtggtccaggcactgccttgcacgaataccacggtggggtagcggcggttatcgtcatcgccggtggattgcggggcgatgatatccattaccagatcatcggccccggtcttgtacgccacgttgcgggtcagcgtggccaatccggcaagcgtgggattgtgcgggatatggatggcattgtttgcgccggcgttggcatcactgactttggctgaatcggtagtattcatggaatccccctagctctgttgctatagaggtcatcatacaagaaatgggcatgattacggcacaacgatgtctcggtcacagcgaggacatgaaggcgcgaagacgcgcccggcagcgcgcgctgcctgcctgcgagttgccttcaagtgcacttcaagcgataaggtgacataagcagcggcaatggagattgctgcccggcaacgaagcggacagtgcccgttcgccgattcacgataacagaaatgagacactatgaagactcaggaaatcggacaatccggcatgattgcgtcacgagtggcgctgggcgtgatgcgcatggacgcgttggatgccgccgatgcggcacgtaccgtggccgtggcccatgattctggcatcgactatttcgacacggcggaatgcatacacagatgctcgacgctgaaatccaattcaatatggcgagcgatcccgcagccgatcgcaccggtggcatcctgccttattcacgactgaagcatatgaccattcaggcatggtgcccattccaatccggcacggaatacggtccgttcgtcggcaacgagcatttccccgagctgaacgccgaattgacccgtcttgccggcaatccgttggtgtgagcgagagatgacgagaccaaggccgttgaggcgcgtgttcagcgtgcatacatctcaacggcggtcaatgctgtgtcaatgccaacattcagtgcctccgggcgtgcaccatctggcgaaagctgatgtgtatgtccatacagcagtctgcgaccgtcaaacggcaacgccttgccgctgaacttcgccacatcatcgggccaactgtatgtcagatcctcccgatacgggtaatgcgaaagattgaccgtgccgagtccctcaatctcaaccgtatcgtacggctccaaactttcgaacaggttaagtgcggggcggtcttcccgccaccagtcatcatggttgccgatcacaccatgcagatgcttgcaattgagcgctcacaggcagttcttcagatgggtcagcgatgtgcggaaaccgatatcacccagaatccacagctcatcatccgggccgaccaaagtgttgatatgatccacaatcgccttgtcatgcgcatccgtatcggcgacctgacgaaacgtcagacccgcgccgaacgtctcctccttggcccaatcctcggcggtcttgcgatcatgcgcgccgcacctcctcatagcgcgagtgcgtcggatcgaacgtcgtgaaccctcgcaacaccgtgaccagtggatgcccgaaatgcgtgtcggtcgtgaaatacctcatgacagtcgcctcccctttccggcgtgcagcaatcatttcccatcctaggcgcagccggcgcctgtcggttcgtgttgccataatgaggcgcattgcaggggaacccgtgaacgcaagctgccggtcatcgtggcggcgaatgggttgagaaaggcgctgtgcctgacccttggaacctgttggccaacaccatcgaagggggcaaacgatgtcttttgacgccgccgcattcggtccgatcaccctgaaccacctgccgccgttcgcccagcgcctacgacatgcagtacacgtggaaacccgaatgggatgtgtgaggagttcgatggatgagcggtgggcgcgtgctttgcgcgccaaaggcattgatattgacgaggctgaaggtgctggtgagaaacgggcacacgacggcaaacggcataccaacatcacgggtactggtcgacgctccgagtcccagccggctgccgggctccgcggtcgatccaataccagtacgaatctgccggggccgaaggtgacggcacgcgccacgccattcaaggccaccggtcataagggcggcatcagccggcaggggaattgagctgatcgcagaaccatcgcgcgatgaatgggcatggccaacgccattccgccattgttgagccgcttctacttggaccggtacctctttgaacggagattccatattgaagctattccggcatcatatggcacgtaggaaatcccggatatcggcgatttcctcatcacagatggcatgggccatgccggaatactcgcgataggtcagatgcccggcccgttcaaggacctgatgggccgtttgctggtcgggcatcggaatcgtgcggtcctgcgcgccatacgccaggaagaatcgggtaggggagtcaagcgccgcctgttcctcgcccatgaacgaaggactgagcaggatcgcggcatcgaacaacgccggatgcgccttgaccagacgatacgacagataaccgccttgggagaaaccgatcaatatcttcctgcgatgggcgaatgccgaggcatccagcagtgaaaccaccgcatccccgaccgccgcgcattcgcgttggcgctcgtccacgccgcagccgtcgggataccagtaattgccgcccatatagggcctcgcgtaggtggcacgaaacgagatatagctgggtgcggcggcaattgcggccggggccgtatcggctcgcgtcggcgcatatacggcgtcgagaatccgcaccatctcgctttcgtcgttgccgtaaccgtggaacatcaggaaaatggggtcattgccgccggcatcaatctggcttgtcatctgcattcgcatcgtcatcacctcaccaacgagcttacatgcattagacttgtagcgattgacccaccgagcatgcaaggagcaagttatggagccgaggcgcgggcctctcaccgcaggcgagaaggtgcagttcaccgaccgcaagggcaagaagatcaccgatcagcttgtggccggcggctccacgcagaccgagcacggcctgattctgcatgacgatgtgatcggcaagaccgaaggcaccgtgatcctcaccgtgcacgccaagcgtgaggcacaggtcaatcaggtctaccccgagaaagacaagaacaagccgtggaaatcgtcgcgcgccatcggcggctgggagtatgcggtgatgcgcccgcgactggccgattatgtgctttcgatgccgcgcggtgcgcagatcatgtatccgaaggacatcgcccaggtcattcagctcggcgacatccgctccggcatgcgcgtgcttgagtccggtgccggctcgggcgcgatgagcgtgaatctgctggacgccgtgggcgagcgcggccatctgaccacgatcgagctgcgccccgaattcgccaaagtggctcaggccaacgccacgctgtattatggtgaagcccccagctggtgggatctcaaaaccggcgacttcgactccgtggccgccgaactgcccgaacactggttcgaccgtatcatgctcgacatgctcgacccgtggaacagactcgagcaggcataccgcgtgattgcccccggcggcgtgttggtcagttacgtaactaccaccacgcagatgagtcgactggccgaagccctgcgcgcggccggttgctggaccgagccgcagatccaggaatcgttcgaacgcacatggaaggcccaaggcctcgccgtacgccccgaccaccagatgatcggccataccggtttccttgttatctcgcgcgccatggcctccggattcgaggcgctcagaaagcgcgatcgcgtgaccaaggacacgcagaccgacatcgactcgctcaccgacgaacagcgtgaggcgcagatcgaggaactggaactgcgcgacatctccgaccacaaactacgtaaggtgttgcgcgacctcgaccgtcaggtgggagaactcggcaacacgcatgaataaccgcccgacgatgagtttgtgaacgctcacacacctctatactggaagcaacaccacaccgccacaccgggcagacggttcgtgaagggagccacggatgggcatcaagctgagcaaagtcgccaaagcagcgaaaaaatacgaccatatcctcatcatcatgaggcatgccaaggccgagccgttcggcgacaagggtgactcggagcgcgagctcaccgacaaaggtctgaaacaggcgaaggccgtgggcaagggcatcgagtcgctgggactggtgcccgaccagatctcctgctcgtccgccacccgcacgcgccagacactggaccgcatgctcaagacctttggcgacaagccgatcgtcgactaccgcatcagcctgtatgacgggggagtgcaggcggtgttcgacgagctcgcccacgtcaaggccaagaaccgcgtgttcatgatagtgggccacgagccgactgtgtcgatcagcgcccaatggctcgcctccgccgactccgacggcgaacgactcgacctgctcaacttgggactttcgcccgcatccatcgtgatcatgggatcgaacaaaccgttcgacgaatggcaggtgcacagcggcgaactgctcgcggtcatcaatgtgaaagacttcgactaaagcggatataaattccatctataacgacactctgcggccatttataaggggtggaatccggatgttttgctaccctaagtcgggttacgaacgcatacattggaggattcatgtccactctgacttccgtctccggcttcccccgcatcgggcagaaccgcgaactgaagaagatcatcgaaggctactggaagggtgccaacgacctcgccgccgttaaggccaccgccgccgaactgcgcgccaagcactggaagctgcagcaggccgccggcatcggcctcatccccagcaacgacttcagctactacgatcagatgctggacaccgccatcctcctcaacgtgattccgaagcgttacgagcgtctcgccttcgataaccaggaggacacgctcttcgccatggcccgcggctaccagggcgacaagggcgacgtgaccgccctgccgatgaagaagtggttcaccaccaactaccactatctggtgcccgaagtcgagtcggccgcggaga

SEQ ID NO: 3778 - DNA, 5572 bp, Unknown
  R35_2m  MAG No. k141_1841
gtgggtgttcaggttcatcgacggggagccgatgaagccggcgacgaagacgttggccggacgatcatacagctcggtcggagcaccgacctgctgcaggataccgagcttgatgacggcgatgcgatcgcccatcgtcagagcctcggtctgatcgtgggtcacgtacagggtggtgacacccagctggcgctgcagggcagcgatctgggtacgggtctggacacggagcttggcgtcgaggttggacagcggctcatccatgaggaagaccttcggctcacggacgattgcacgacccatggccacacgctgacgctgaccaccggacagagccttcggcttacgatcgaggtactcggtcaggtcgaggatctcagcggccttctcgacgcgcttgcggatctcttccttcggagtgccggcgatcttcagggcgaagcccatattgtcggcaacggtcatgtgcgggtacagggcgtagttctggaacaccattgcgatgtcgcggtccttcggctgcatcgtggtgacatccttgccaccaatgaggatgcggcccttgttgacctcttccaggccggcgagcatacgaagggtcgtagacttaccacagccagaagggccaacgaggacgaggaactcgccatccttgatatcaagattcagatcatccacggagggcttatcgttgcccgggtagatacgagtgacgtggtcgaaaacgacttctgccataattactaatcctttcagaggcaggtacgtgcctcacgatccgttgtaaagggatttgttctttactgcgcttccgccctcgccaccgacgtacaactttgctttcggaaactgcaagcttcagcgtttacttttttccggttcagtgaaggttctcttcgttgagccgagaactactatacacggaccgtggaccaaggcaagtggcgtgtctgaaaatgtagttaactttatgggcgtttctgggggtgttgtgtggttcggcccatgacacgcctgtttctcgaacgtgcgaaccggcacgcccggcgtagagcaggcctgctcttcccgaactgacggattccatcagtcgccgactaatgcaatacagactcgaaggtgacgccgttgcgggcggctttgcgctcggccttgcgctcctcggcgttttcgatgcgctggatgcgcagctggcgccagtcctcgcgcatgtcgcggaaacggtcggccagcgttacgtcatcgttctcggcatcgtcatcagtaccgctgccatcggccttaccgaacgtgccatcggccaccttggtgatgcccagcttgagcagtccgagcaactcacgcaacgtttccggtacgggctcatcgccctcatcggcggacttggtcaggccctcgatgcgacgacgaagcgcgtcggcgtcctcgggatcgatcttgagcccggcgatcagcgactggcgcatggtctcgtaatcgaggttggcaaagaaattcagctgttgcagcgtcatgaagcccttgagctcggggaatcggtggacgatgtattcctcgcggtcgtcggcggcgcgggtccagtcgcgggtgagctgcggatcccagttggcggtaatcgatccctcgcgcatgcggtagtggtacagcgccttgggcagacggaccacgcgcgtggcctcgccgatcacgttgcagatacgggagagatcctcgattttgcgccccaccgggaaggagaatccggtgccctgataggtggaggcgggtgccaggaaggcccagaaatagccgtcgatctcagccttgacctgctttttgatggcctcgaccggggtcaggatctgcacctcggtgaagtcgttgtggcgatagttggacagcagcggcttgttgttctcggagatggtgtcgaactggaacatcacgaggtcggcgtcatactcgcgcatggcgttcaggcagtcctccaccaacgtgggggccacggtgtcgtcggaatcggcgaagtatatgtacgcaccggtggccccggcgatgccggcgttgcgggcgtcggacaggccgccgttgggcttgtgaatcacgcgtatgcgcgggtcgcgggcggcccaggcgtcgcacatggccgggcaattgtcgggcgagccatcatccaccagcagaatctcgaggttgcgataggtctgcgcaaccacagacttcacgcattcatcaaggaatttctcgaccttatataccgggatgatgatgctgaccaacggctcctgttccatgcctccagcgtagcgccgtcgtgcgaacgcggcggcgctgcgggttcgcggaccgcgaaacccttagaagtcccagtcgtcgtcatcggtttcttcggctttgcccatcacgtaggaggagccggagccggagaagaagtcgtggttttcgtcggcgttcgggctcagggcggccaggatcgcggggttcacatcgcaaatctcagccgggaacaaagccgggtagccgaggttcatcagcgccttgttaccgttgtaccgcaggaacttctcgacgtcatcggtcaggcccacgcggtcgtacagcgactgggtgtactccacttcattgtcgtacagctcgttgagcaggtcgtacgtgtagtcctgcagatccaggcgctcggcatcgctcagctgggcgatgcccttctggtacttgtagccgatgtagtagccgtggacggcctcatcgcggatgatcagacgaatcacgtcggcggtgttcgtcagcttggcgtgcgcggagaagtacatcggcagatagaagccggagtagaagaggaaggattcgagcagggtggaggccaccttgcgcttgtacgggttgtcgccctcgtagtagtcgagcacgatctccgccttcttctgcagaaactcgttgttctcgctccagtcgaatgcggcatcgatctgttcggtggagcacagggtggagaagatggacgagtagcttttggcgtgcacggattccatgaaggcgatgttggtgtacacggcctcctcgtgcggggtgagcgcgtccggaatcaggctcacggcaccgaccgtgccctggatggtgtcaagcagggtcaggccggtgaagacgcgcatggtgagcgtgtgctcgtcctcggtcatcttctgccagctagggatgtcgttggagacgggaactttttcgggcagccagaagttgccggtcaagcggtcccagacctcaaggtctttctcgtcttcgaggcggttccagttgattgcggagacgcggtcgatgagtttcagcggtttgcgcggaatggagataggtgccatgagtgttccttattactcgttgtcgttgtcgttgtcgttgtcgttgtcgttatcgtcgttggatttgttttcgaactcctccggcgcggtcagccggagcagtgctctatagatggttcgtgacattgttggttccttagatggtggagcccccctcagtccgcttcgcggccagctcccctctctgaggggagctgtcggcgttagccgagtgaggggagtaacaacggctctctggttgttcaatgcgtgcggagaccgccgtctgaggccgaaggcgtacgaaggtacgtcgagtgccgaagaaaggcggtatacgctccctcgaacgatcagagcatgcaggagacgcagccttggacttcagtgccttccagggcttgctggcggatgcggatgtagtagagggttttgatgcccttgcgccaggcgtagatctgggccttattgaggtcgcgggtggtggcggtgtccgggaagaacagcgtcagcgacagtccctgatccacgtgctgggtggcctcggcgtacgtgtcgacgatggccttccagccgatctcgtaggcgtccttgtagtacccgaggttgtcgttggtcatgtaggcggccgggtagtacacacgcccgatcttgccttccttgcgaatctcgatcttggaggcgatcgggtgaatcgagctcgtggaatggttgatgtacgagatcgagccggtgggcggcacggcctgcaggttctggttgtagatgccgtccttcagaatcgcgtcgcgcagggcctcccagtcggccgcagtcgggatcgcgatgccgtactgttcgaacagcgcacggacccgttcggtgcgcggagtgagcgaacgacgaccatcggtgtacttgtcgaagtagttgccctggccggccggcttggcgtagtcgctcgtagcgaagctggcgaacgtgcggccatgctccacggcgagcgcgtgcgaggcacggtaggcgtggtaggccacggtcatgaagtacatgtcggtgaagtcgaggccctcttcagaaccgtactggatgccttcgcgggccaggaagccgtgcaggttcatctggccgagaccgatggcgtggccctcctcattggcgcggcgaatcgaaggcaccgcgttgatgctggtgtgctcggccaccgaggtgagtgcgcggatcgccgtctccaccgtgtggcccaagccgccatccatcgccttagcgatgttgagcgaacccagattgcaggagatgtcgcggccgacatgcgcatacgtgaggtcctcgttgtatgcgctcggctcctgaacctgcaggatttccgagcacaggttggacatggtcacgcgaccttcgatcgggttcgcgcggttgaccgtgtcctcgaacacgatgtacgggtagccggattcgaactgcagttcggcgatggtggtgaagaacttacgggcgtcgatgtaggtcttcttgatgcggtcgtcggccaccatctcgtcataatgctcggtaacggagatgtcggcgaacggcttgccgtacacgcgctccacgtcgtacgggctgaacagggccatctgggccttctgtttggccagttcgaacgtgatgtccggaatcaccacgccaagagccagcgacttgatgcggatcttctcgtccgcgttctctcgcttggtatccaggaagcgcaggatatcagggtggtgggcgttgaggtacaccgcgcccgcgccctgacgtgcgccgagctggttggcataggagaaggagtcctccagcagcttcatgaccggaatcacgccgctggactggttctcgatgtgcttgatcggggcgccgagctcgcgcaggttgctcagcagcagggccacgccaccgccgcgcttggagagctggagggccgcgttgatgccgcgcgaaatcgactccatgttgtcttcgatgcgcaccaggaagcagctgaccggttcgccacgctgggccttgccgaggttcaggaaggtcggggtggcgggctggaagcggccggcaagcatttcgtcggcgtattcgatggcctgctgctcattgccggcggcgagctccagggccacagcggcgcaacgctgcgggaagtcctcaagatagaggcgaccatcgaacgtcttgagcgcgtaggacgtgtagaacttgaacgcaccaaggaaagtgccgaactcaaagccggcggattccacgtgctcgtagatgcggtcgaggaa

SEQ ID NO: 3779 - DNA, 108289 bp, Unknown
  R35_2m  MAG No. k141_1919
ccagttgcagacagttagacatgattggtgactcctaacgcatagaggaaagaatggatttcggggatttggacagcacggcggcgcatgacacggcaagggccacggcgatgaccgcgcatccgagcagcaggatgagcatcgtctgctcaggcggcaaggcctccacatgcaacgattccagcggcgcgacgcccgaatcgcgcaacagtcgggaagacacgtatcccgacagcatggcgccggtgcccagcgaacacagggcggcgaccgccgccatgagtccggtttcgatggcgagttgtgcgacaatccgcatcttgccgatgccgagggccagaagcgtgcctatctcatggatgcgtgaacgaatccagaagaccagcgccatcgccagcaccagtacgtccgcgaggcagacggacagcagcaccatgcgcaccagatcacgcaccgtctgcacggattgcaggacgccggagagccgggccgaatcgtcggtgacgtcgtacttgccaccggccatggtcttggcctgactgaccgccgcggacaggtcctgcggattatccgacaggcatcggatcatgccgatctggtcgtttccggtcagagcggaggtcactcgcctgcccgaatagatgaggttctcggaagtgtccgagggcagggggctttgggcctgcacgttgccggagaagatcccggccacacgcaccgtagcgttgcgcccctcctgccggagacggaatgtcgagccgaccgataggccgttctgcagcgcgaagtcgcggtggaccagcacgttgtcgccgtcacccgagatatggcggccctgctccaagcggtacaggccactctggaattcctcggacaatgaggaatcggtggtgcccagcacgctgacctgcatggccagatcggagtccagtcgggggccctgccggggcatgaccggacgcgcgccatccacctgcgccaaggtcttcgtcgcataggcggtcttcgtcacaccggggatacgcgagaaccggctcgcctcctcggcgctgatgggattctcaccggcgctgacggtaaaccctatgcccatgcccgcgccgatgccgtcggacatggtacgcagggccgtcgagactccgacctgcgccaccaggctcgtgaagaccatcagcatcagcagaccgatgatgccgctgcgtaccggcttgcgcacgatcgccaacgtggcacgcttccacacattcatgctcatcatcgaatctccgacaggtctcgcggcgatttgcgcagcatcggcatgcacgccaccgcgacgcacaccagcatcaccgccaacagtccgagcgccacgtacagcatggcggtcccgtcgaccgacaccgtgagcgaatccagggtgcgcaccgacatgctggattcaagatcgccgccgacctgccccatgctgctcagctccttcgccgcggaggcgttcacggaatggagcgccgtggtgccgagccactgggccattccctgcgcgcacagccagccgagggcaagggacggcagaccgatcagcaccatctcagcgagatattgggcgaccagggagggcttgccgacgccaagggacaccagtatgcccatctcctgacggcggtcgttcatccacagcagcagcatgagactgagcacgagcacggccgagacggtaacgccgatcagggcgccgcgcatcatggagcgcacgccgcgggcggcatgcagcatgctcgacgaatactggtcgttgcgcgtgatctgatagttgttccaatccaccgggagtttcttcgcggcatccatggtcttctccacgtcaacgcccttggacagcacgaaggtggcgtcctggtatatttccttgccgtccttgtactggtacagatcgcgtgtggtatccagatcggtgtagatggtgttggcggtgagttccgctcggctggatacctttctggcgctgtcgcccttgaatatgcccacgatggtggtcttgacggtcgccgtcgaatgtgattcgttgtcggcgtcataggcgttggccttgagcgtgagcgtgtctccgactttgagcccgttggctttggcgagatcctcatggatcatcgacgtgtacttgtcggaggccttcagatgccgtccttcggccatgccgagcgtgcgcgacgtgaacacgttgagtttcgacgaatcattcgtgcctatgacgttggcggcgttgccgaattgctgctccttggtcgcatcgtaatcatcgccgccggggaccttcgccacattcgcccccacgagatcagcggtggcgttctgacggaccatatacgaatcgaccccgggcagttgggcgatcctgcgcacgtcggcgggacgcaccatgccgcctccgcgaggcgtgagcatgctgccctgcaggttgctggccagcacgaacccgccgaccgcttccttctcgattcgtccggcggcctgttgagctgcccgagaaaccgcgatcgtggatagcatgctcgccgttatgatggtcaatactataaggagcactatggttcgtactcgttttctgagcacatagcgcaccgaccgtgcaacgaacgtcatcaatacctcctgtgggccttgggcttttcgcccaaaatgcgaaacatgccgcgtttcgccggttagttagccgcgacaatacatgatgcacctcaagatacgggaagagatacgccttgggcgaaaaacggaacagcggcgaatgtcgtttattctggattttggtccatctcgggccgcgtcgatgcgtcggcccgagaggaatcagcgctcgcgcctcaccttcgaggcggcgaacacgaggagcggcagagcggcgaacgcatagttctcgcattggatgtacaggtatgcgaccaggacgagccagcagatgacggtcttgtgccagacgccggattcgcccgaacccgcgccggcaacgccatcaccactattgcccccggcaacatcagcaacgtcggcaacgtcggtgacacaaacaccgtgcgccagcccgtcggacgatgcgccatccgcaccgccacggcataccgtcctcccgcgcgtcatgcagaccatcgaggctccgaccagcatggccagcccgatcagcccgtattcggcgatgacgctggtatacgcgcacatcgtccacaccgtgtccgcgttcacgccggccgcgaatcccgtggccgcgccgccgttcataccaagaccgtccagcagccgtccggctttggccgcgccggcccacaccgcattgatgatgttgcccgcgccataaccggtgagcagcgtccacggatgggtgagcaatccgcatatcggatcgaggctttggtagatccgcgcgaagaacgagccgtctccctcggccccgttctccgcgatggcggagagtctggaatccgccagcacacccagcaggcccagtgcgcatgcgccgagaatctgcagcatgccccggacgcggcgtgcgccgtcatgccaatcggtgcgcgccacaagggcgatcagcaacgccacgacggaatcgatgacgattctggtgccggcttgcatgagcaccgcgccgacggcatacgtgacgatgaggtcacgcagccgtttggcgtagatgcggtcgcgcccgcgcatgagccacatgagcggaagcagtatgccgaacaggtgcatgccgatatagctgggctcggcgaacaggaactgcggacggccgccgccccacaccgagttgtcgctgatgtattgccggtacatgaggtgcgagaaatagtcggtcaacggtttggcgcgcagacggatggacagccattgcacgacgcccactccgaaggaaacccagtatgatgcgatgagaatccgcaatggcgtacgccacggaatgcgtttgatgtcgaacgcaagggcgatcgcacccaaagtggcgagcacgcccagcaatccggtgatgctcatgaacgcggcgttgaggtggatgccgaacttcagccatcccgggatggacaggattatacagaccaccggtaggaggaacattggcaggtaccggttggctgcgatgcgcagttgccgccaattgcataggcagtacacggcgaacagcgccggactgattggcgaccagaacggcgcgtacaggccaagcgtggtgccgtccaccggaagaaaagcgacggccagcaacagccaaatgacgttgcgttcctgcgatgtcagaaatcgcaggaacgaccggtattgcggtcggccatgatggttgcccgcgtcgatggtgtcgttgcgtacgcatgcctggttcatgtgattctccctccccgtcaaccttactcgttcatcacgatgcgcggacgggggcatgctttccccgccgaacgtgcaatggcccgaacattgacaaggccgcaccgaatgccccccatcattggcacattgtgcaatctcgtcgcgactggctgacgaaataatgttggccgaccggttacattggttcggtacagtgacggcattattggccactggatcaagcgatttgcggcagaacgacgaaagcgacacttgggcgaaaagaggcaggcatgactacgaatcgaccgctcattgcggtgactccgctgatggattacgggcgcgatagtctgtggatgctgcccggatatatggaggcgataatgcgggccggcggtacgcccatcatgttgccgctgaccgatgacgccgacattcttgcgcaatgtgccgaacggtttgacgcgtttctgtttacgggcgggccggatgtgggaccgatggttggtgcagcggcctccgccaccggccgtagcgaggtgctctctcctgagcgcgaccgaatggaatcgattctgctgccagctgtaatggcttgggacaagccgattctgggcatctgccgtggcattcagttcatcaacgcggcactgggcggcacgttgtggcaggatttgccaagccagcatccgagcgatatcgaacaccatatgaatccgccgtacgatgcgttcgggcacagcgtttccttggtgtccggcactcccctggcttcattgttcgcggggcagactgagattgcagtaaacagctaccatcatcaggcggttcgtgatgtggcccccggtctcgaagtcatggccgttgcgcccgacggcgtgatcgaggccctgtaccggccggcaagccacttcctgtgggccgtgcagtggcatcccgagtttctctacaaggtagatccacgctcgcaggcgatttttgatgcgtttgtggagagttgctaacaacggattttttgcgtgaccacgcaagcataatcgagattgccacctcatgacaacggttccgcaccaggcagcggcgcgtctgtgttatctggaaacatggctgcatcttgctggaaaacatcacctgaagtattctaaggtcattggatgttatttttttatcacataaaatatcatttttttatacagcatgtgataaaattatcaacatgattccatcgaacgttcgatacgtaactcgaccgttggcacaagtcctccgtcagtgtccaaacaaagtagcggtgctggaaggagcacgagcagtcggcaaaaccatgcttgttcagacagaattgccagacggctatcattatgagacgcttgctgacaagaggacattcgagtacgcctcatctcatttggatgagtgggttgattcgctacccacgccgtgcattatcgacgaagctcaacgtattcctgacttgcctctatccgtcaagggagtaatcgacaagcaaactggttctactccttttttcattcttactggttcagcatcaatcacccgagatgggctagacggacaggacccccttacccgccgttccctgcgttataccttatatcccctaacacgcagagaaatcaataaaaatactgataccagcatcattgacttgttgtggaacggtaccccaaatgcgaactatcattcagagaccaatagggacacactagctaggtatatgactgtgggaggtttcccctcgtatgcaatgccctccatacctattgcagagagcgatttacgtttttccgtaaaaacggatatcgataatgttttgggcgataccatacttcccggagagcgattggataaagcaatagctgatgccatactcaaagagttacttgcagtccctggcgggattttgaatgtaaaaagaatatccgacactattcattcgaatccctccaccattgagcgatacatcagtattttcatgcgccgattcctaatctccgccttaccgaacctacgctcagcacctggtaagcaactgtttacccgcgcaaaaatacatccagtagacacgtcattcagcattgaaacaatacgacaatccggcagagattttcataatgatcgcgttctgtttggcgagctttttgaatcattcgccgtcaatcaaatcattccggaaatacaatggtccgatatacaccccgacgctttctactggcgggaaactggcaataagcccaaagaggttgatctcgtgctgctacacgataatcaacttgtcgctttggaaatgaagtccaacaataccgtggaccgcaaagatttttctggtattgcagcattgcgcgacagcgacaagcgcttccaccgaggctacgtcttatacacaggagacaaggtgcagcagttcactaacaacatatgggctctgccaatttcatcattgtgggacagtgacggattccagacagctacttcggatgctgaacattactcattatcggttccatcagttttacctattcggccgtccgacaccgatgtggcagctcatgccaatgcccctactgatgccaacctgtttttaagctactgccatgcagacaacgaccacctcaagggggcaatacttcaattcgtgaatgatattatcgacgaatacaattacgagaccagcaatacactcgggttattcgtcgacaagacctctataaactggggtgaagattggcgtcaggcacttgatcgaggcattggtaatgcaaatatcattcttccaataattactcccagatatgtgcgcagtgaggcctgtcgtaaagaactgctggatttcaatactcgggtcacggaacatggaccgaatcgtatacttccattgatgttgcaaagcatagatggcatgactggaattagcgatcgtgatcctgtttgggacatcgcgcataatcgacagtatctaccagtgggcgatttgcgtttaatgtctgctgaagatcgtcaaaagagaatccttgaaatcgtgaaagaacttcgcgcagtaatagaggatattactgcccgatcacaatctgatgacacatcagagtcagttgtgagcaagtttaagggagacaacacaccggatttattgagtgcctggaatgagatagaaaaacttacaccacaagttaatgtgggcgcgcaagaatttgccgtatcatttcaaaatatctcaaagacattaagtacccatcccgctcctgcgaacggcaatgcgtctgtctattcctcatgggcgatacaactatcagaacaactacaacctgacattgattcgctcaacaaggcatcggataatctgtcagaactatggaataacgcctatgccgtcatgtctcaatacgtgggcttcattcagagccttccacaaggcgctctacgcaacagccagattgacagcatgggaacaacattcgatggattgcgcacttcgctatccatgcctccggaagtgacacagatgctgccccttattcgtatgcttggtaattttgcgcgtccccttcgcccatttgctgatgccgtcaaccaatcattcaatgtaatcgaaaatatgggcaccatgacggctgcattacaaaatcagcttgatcgcatacctcgataaatcggaattcaattcagtgcgcatcggattaatgcgaatcatctaaaccacctaaaaggggctgctccggttttccggaacagccccttttagcggtagcagtcagcagttaatcggtgctggcttgccagcgctgattggcgcgtgcggagaccgccgtccgaaggcgaggggcgtacgaaggtacgtcgaacctgaggaaaggcggtatacgctccgccaatcagtgctggttgttgagacggtggtacatctcggacagctccagttccttctcgaactggcgagcggtggtgttctcgtcgatgacggcgagctcaacaccggcgatgcgggcgaagtcttcccaagcctcacgaccgacggaggtggtcatgcaggtgtggtgagaaccaccggcggtgatccagcactcaacagcggtcttcaggctcggcttcggctcccagacggcgcgggcgcacggaagctccttgagggagccctgcggctcaacgacgtcgacgacgtccatgagcaggcggaagcgttcgcgaacgtcggacatggagaccacgacggcgtccttggtgggcttgccggagaagaccaggcggaccgggtcggccttgccgccgatgcccagcgggtggatctccagcttcggcttggcgatggtgccgatggacggggaaacctcgagcatgtgggagcccatgtcgagctcgtcgccctcggtgaagttgtaggagtagtcctccatgagggaggcgccaccctcaaggccgtagcccatgacggcgccgatgcgcacgaggacggcggtcttccagtcgccttcagcggaaaagccccagccgtactcggacgggaagcgctgtgggccaacgcccggcagctgtggcagagcgccgaggtcctcgaaattgtcgacgccggcggtgcagccgttggcgcgcatcatgttgaccatcgcggcctcttccttggcggcgatgaacagggagtcgtacttggcgtccagcagagccgggtcgacgtcgtacttggccttgtagtcctcgatgatctccttgacctggtcgtccttgacggcgtcgtacgcagcgacgagctcgttgacggcccaagtgttgatggaggcgccgaacacgcgctcggcctcggtcttgtcgccctcggtgacggcgacgttacgcatgttgtcgccccagcgcatgaccttcatgttgttggaggcatcccagccggcgcaggcgcgggcccaggtgccgaccttctcgacgacctcaggatcggtgtagtggccgacgacaaccttgcgcctgatgccgaggcgggagacgatgtaaccgaactcacggtcgccgtgggcggcctggttcaggttcatgaagtccatgtcgatggtctcccacgggatttccttgtggtgctgggtggccagctgcagcagcggcttggtcagcacttcgaggccgcgaatccacatcttggccggggagaaggtgtggcaccaggtgatgacgccgatgacgttcgggttggcggaagcctcgaccatgaactccttgacaccgtcggaggacttcagggtgggcttgagtacgatcttggccggaatcttgccggtgttgttcaggtagtcgaccatttcagcggagtgaatggcgacttggcgcagggcttcctcgccgtacaggtcctgcgaaccaacgccgaaccagatttccttgccctcgaaggggttttccataaccatagggttacttcctttacttctttgtttatgggggtttgtttaagtttcattcgccgaccgaggctcccctcagagaggggagccaagacaccaccgtgctggcggagtcagcgctgatttgatgtgtgtgcccgcaaggcgcggaaggcgaaggcgtacgaaggtacgtcgagccttccgcaacgcggcggacactccatcaaatcagtgctggccgtagacgttctggtagcggtcgttgagcttatcgatgtcggcctggtcgatctcgatgatgtcaccgagctgacgggcggcccacatggtgtgagcgacttcctcggtcatggcagcggccttgacggcgccttcagcatccttgccgatggtgaaggggccatggttctgcatgaggacggccggggacttcgggtacttcttgagggtctcgacgacacccttgccgatcgcctccgagccgatcagacggaacgggccgaccggcaccgggccgccgaactcgtcgcccatcatcgtcaggccgcacgggatgttctgaccagtggcagcccaagcggtggcgtaggtggaatgggtgtgcacgacaccgtagacgtcgggcatgttgcggtagatgtaggcgtgggaagcggtgtccgaggacggggcttcggcaccgtcgaccacgttgccgtcaaggtcgcacacgaccatggaggacggggtcaggtactcgtagcgcaggccggagggcttgatgacgaacaggtcggcggtgtgcagacgctgggaaacgttgcccgcggtccacacgaccaggttccacttgatcagctgctggtgcaggttggagacgacctcacgaacctgcttgacctcggcgcgaacctcggggccgtaatcagccaaagttgccattattggttttcctttccactgtgatggatggacgttttttcaaaatctcaaggacctctctcaatagagggaggtcagaaaggcttacttatcttcgaggttgatggtttcgatggcagcgtgctcgatgggcaggcccttggtgaagcgggcgaagaagtcctcgaaaccaaccacatcggaagccaccggcttctcagtggtggactgggcgtccttgaacacgaaaccatcaaggaagtcagcgaggttgctgtgatcctcgttggtgttccacaggtagttggcgagcacggccataccccaggcaccaccttcggcggcggtggacatgaccttgatcggggtgttgaaggcagcggcgagaatcttctgagccaccttcggagtggtgaagatgccgccgtggcccacgagagagtcgacctgcacgtgctcctgcttggtcatcacgtccatgccgatcttgaccggggagaacgcggagaacagctgggcgcgcatgaagttgccgagggtcatgttggcttcggggctgcgggcgaacagcgggcggccttcaggcagaccggccaggaattcgccggaacggaacggatagttcagcaggccgccgcagttggcgtccacgtcgtcggcgatggccgcgcggaacaaggtgccgtacagcataccggcatcaaccgactggccgatggccttggcgaactggccgaacaggccgacccaagcgttgaggtcggaggtgaagttgttggcgtggctcataccggccagatcgccggccggggtggtgaccaagtcaacctcagggtggagggccttgagcttgtgctccagaaccaccatggcgaagatggaggtgccggcggagacgttaccagtgcgtacgcgcacggagttggtggctaccatgccagtaccggcgtcgccctcaggcggggcgagcacgatgccgggattcagggcaccggacggatcgagcagcttggcgccttcctcggtcagctcgccagccggagtgccggccacgagcggctcaggaagcaggttctccagcttccacggctgggctgcgacctcaggcagagcgtcgaacttctcgatgaatgcggtttcgtaagtgtgagtggtcgggtcaatcgggaacatgccggaggcatcgcccacaccgaggaccttctcaccggtgagcttccagtgcacgtaaccggcgagtgtggtgaaataagccacctcggagacgtgctcttccttgttgagcacggcctggtacaggtgagcgatggaccaacgctcggggatgttgtactggaacagctcggagagcttcttgtgagcttcggaggtgttggtgttctgccaggtgcggaacggcaccagcagttcgccggcctcgtcgaatgcgaggtaaccgtgcatcatggcggagaagccgatgtggccgacgtgcgtgagcttctcgccataggcggtctcgacgtcgttggccatggaggcgtaagcggactgcaaaccgccccagatctcctcggtggtgtagctccacagaccatcctccaagtgggaggcccagctgtagtcgccggaggcgatggtctggaagttgtcgtcgatgaggacggccttgatgcgggtggagccgaattcgatgcccagcgtggtcttgccagcgcgaatcttctcggcgatgtgggcggcctgctcggccgcgttgtcggttgctgccatatctttcctttgccttggagcgccggcgttgttatccccttccttggggaggatgttagcgctcacaatttcaaaaacattgtaccgatgacctgcattcgacacaacttataccgtgtcacgcatcataacggtttgataacagcgccaatttaccgccgaggagccggccccaaggaccgccgagcacgcacctcggcgggaatcagccccacgccgtgctgggtggtcaggaaggtcggctcgccgccctcccccagcaagcgcagcgtctcgcgcatggcggccacgccgagcccctcgaaatcgggatgcacggtggtcagcggtgggtacatgttatccacgccagacatgtcgtcgaatccgaccacgctgatgtcttgcggaatccgaagcccatgctcatgcaacgcgcgcatgacgccgacggcctgattgtcgttcgcggcgacgaccgcggtgggcaacgccgtgcctcgacgcccatactcatcaatgagatgattcatgtgcgcatatgcctcagaggcatcccacgtatggcagcgcacgatctgcgaatcgatggatcgggaggcggcgagcttgcgccacgcatccagtcgggtgtgggcgtcgcgccattcgttgggaccggcaaaatacagagccgatttgtgcccgtattcgcccagcaaggccaccactttggccattgcaccccactggtcgataccgaccagtgcagtgcgacgcttgttttcggtggagataaggcccaatccctcacgcacggtcatttggccgtgggtggcggtgacgatgacgcgtggctgagtgactcgcgcacggcaggcggcggcgaacatcacgtcggtcggggtcaggaagatgaaggcgtcgacgttctgctcgttgaaggtgtcgcacaggttgtcgaattcggactgcgtgcacaaggcctcgtggaccatcatcacgctcatgaacagaccgtgttcgcgggccatggattcgatggatgagatggaggaaatcgggccgaagaatttgaggcctccggcgatcagccctatggtgcgcgaacggcgggaagccagtgcgcgcgcggagttggaggggcggtagccgagttggtcaatggcggcctggactcgcgcacgggtggcgtcggaaacgtccggcgagtcattgatcacacgggagacggtttgatggctgactccggcgagcttggccacttcgaacatggacggacgtttgcttggcttgcggccggtcaccatgctacctaacctcccctctggcggccggcatccgtgcacggccaggcttgtaccttaatcaatactgactttagcgcgtccacaacagttttgcgttagcgctcacactgtcgtgtcgcacgcggctcaggtcaggtgccatgagacacgatggagcggagtcggcccgtgttcggcgatggcggcacggtgtgcggcggaaccatagcccttgttatgagcccattcgtaggcggcgtaacgtgggttgctttgcgcgaggtcgaccatcagccggtctcgggtcactttggcgatgaccgccgcggtggcgacggtggcgcaatgctggtcgcctttgactttggtcgttatatcggctggaatcggcacgtccggcgcgtcgaacgtgttgagcgccttggtgatgtaatcgctcggcccgtcgagaattccggcgactttgggcagggcgcgaacgctttccccacaatttccaatggattcccctacggagtctcccggacgaccttccacaatcccccccgcagccttttttgccgtcaatccccctccaagccgtaagccaagttcgcgttcgacttggctgagcgcgcgcagggcggccacgccgagcgcataggtgatgccccattcgtcgatctcggtgttgctggcctggcctacggcgtaggccgcgcaccagtcgcgcagttcgtcgaaaatcgcctcgcgcctatgttcggtgagcatcttggagtcggccacgccgtccggtacgccgaggtaggtccacccggacagttcggcggaatcatcgccgtcaagcggcgccaaatcacaggcccagatggcggcgcacccgaccatcaccggaccggcgagcgcgccgcggccgacttcatcgaatccagtaataaggtcatagccctgggccgcaaggctgcgttccaagtcaagtgtcggggtaatcatgcgcggctcccatcgtctcacaatggttaggattcagacggtccaggttcaaatggttcaggattcagacggcccggaactcaatcagttcaaagactcacacggttcaaaaaagactcaggaattcgagccggaagcgtcagacacgtccttgaagacttcgtggtggtcatcaatcgcaccaagccggtcaagcggccagtatctcgcgattccgactccgaccacatcggagatgggaaccaagccgcgatcgccgtcatcctgatgatagcgggagtcggcggaattggcgcgattgtcgcccatgacgaacacgtggccctcggtcacggtcaccgagaacgggaaagcgctcgggtccacgccggggcgaatgtaggaggtctcattgatggccacgccgttgatggtcaccggctggcccgcgcccttgcattcgaccacgtcaccgggcaggccgatcagtcgcttgatgaggtacccgccaccgggagcgctgctctgctcctcgttcaaccagttgttgggatctttgaataccacgacgtcgccgcgctgcagatcgaagatcttgggggtgagcttgctggtcaccacgcgatcgccgggcaccatggtgtccatcatcgagcgcgaaggaatctcgtaaaagccgacggcgaaaatgcgaatcagcagcacgataagcacgggaacgccgcaccacaggaaaaagtcgcgtagggtgaagtggtcatcatccatcgatgatgctgccgcggcattcgcaccagcggaagaagcggcgtacgccgggcgcgccggtgccgggggaaccggggacagggcgatgccgtggtcggcgacttggaacgtacgggaatcgcgggcatcggcctcgtcatcatacgaggtctgattgctctccggattgtcggaaatcgggaattcgccgttatcctgatcgtcctgcataccatctcctcgcgattcatgctgccggatatgaggggtgccggcgcccgtccatcatacgtggaaaatacggaaacagcccgaaaccgaaacggttccgggctgaatttcacggtttattcgcgcacctgcatcatcaggcccacgattgcacccgcgaatcgactcacttagcggagttgtcgcggcgctcggcaatacgagcggccttaccgcgcagagcgcgcagatagtacagcttggcgcggcgcacacggcccttacgcacgagcttgatggagtcgatggacggggagtgcaccgggaagcgacgctccacaccagtgccgaagctgatcttgcggaccacgaaggtctcacgtacgccagcgcccttacgagcgatcaccacgccggtgaaggtctggatacgggagttgttgccttcctggatcttcacgttcacgtcgacggtgtcgccgggacggaaggccgggatttcctcagccggcttcatgtgcttggcgtcaaaagcctcaacagcgttaaccattgttttccttcagtgctgccgcatatcagccacagatctggggccatccacgcgattgcgcatcacgtgcgttggcctgttctcgttatccctcgggtttgcccttgggaagcctgccgatccgccgaaagtcaggccttgcggccgttcggactggacctatggagacgtgggcttatgcggcggcccacttctcgacacagcaatcgtcaattgtacggattattgcggacagaatggctgtcggatggcattccaacaccaaggcactgcgacgtagttgacagacctgcaggcgggctttatcttgggagcgtcggtaggcgaggctaccgcagggatatgggttgctgccgctaacagtggagacactgcacgcaggtcagcagttcttgtcggatcaaggcatgaactaacgcaattccaccgccctgcgatgctgaagcttgaacgatggctcgaatcggcggattcgaatactttccgcccctcctgctggtcgcatggataccgacgatggtattgatctggcgtttcagcgcacggcttgaaggaggtgagagtccgatggacggtgattattccagtagttccgccgccggcaacagtcatagttgcggtggtgatgaccatgttttcttatattccgttatccggaagtcgggctctcgcctgtagtgttccttggctccccggataacccttgcataattcgtctttcctatgcatagggaggtcttttcatgaccatgttttcattcaatcgcgtcggcgagcgtccaaatgcgtcggcccgcaacccttccaccgccgcgtccgaccgccagccattcgccgtgcgcctggcctccgacgtactggtcgtggccggtattctggcgctgttcggtctgatcgcttggattctgccggcgatcggcgaaccgatcggcccgaaaggagtgccgtcacaagtcagtacgaatctcgccgacctgccgtattacgcgctgcgctcggtgttccgcatgctcgtggcactgttcttctcactggtgttcacgttcatctacggcacggcggccgcgcgctgccgccgcctgagccgcgtgctgattcctctgttggatattctgcagtcggtaccgattctgggctttctttcggccaccatcaccatctggatggtgctgttccccggctcgatgctgggcgtggaggccgcgtcgattttcgcaatcttcaccagtcaggcctggaacatggcgttctcgttcacccggtccctgaccagcgaaccaactgaactcgacgaggcggcccgctcactacagctcacacgctggcaacgattctggacactggacgtgccgaacgcgatgattccgctgctgtggaactgcatgatgagcgtgggcggcggatggttcttcctgaccgcctccgagatgatctcggtgaacaatcgcacctatgcgttgcccggcatcggcagcttcgtggcacaggcggcggccgaggagaatctcgcggccatctgctgggccatcgtgacgatggtgctggtggtgctgcttatcgacgtactgctgtggaagccgctgaccgcgtgggcggagaagttccgcattacgcaaagcgagtcggcggtgcgcaagaccagtgtggtgctgaccatcattcgtcagtcacatatcgatgagatggtggcctggctgttcaggcctgtcggcgacctgttcgacacgctggcccgcccgttgggtcggaccggtggacgttgggcggcggacgtgaagtccgcacgcagccgcgcgcttgacgtggtattcacagtgctggtgttggcagcgtgtgcgttcggactggtgcagcttatgctggtgattcatcgcgatgcgggattcggcgagctcgggcaggcgttcgtgttgggcatggtgacgttcctgcgcgtggcgctgcttacgctcgtctgctcggtgatttgggtgccgattggcgcgatgatcggcatgaatccgcgcgtttcgcggtttatgcagccgattgtgcaggtgctggccagcttcccctcgaacttcacgttcccgttcgtcacgctctggttcgtggcatgcagcgtggatatcaactggggcagtattctgctgatggcgttgggcacgcaatggtacatcctgttcaatgtgatcgccggggccagccagattcccgacgatctgcgtgagatgacgcgcagcttccagctggggcgctggcagcggtggcgcgatttgattttgccggcggtattcggctcgtgggtcacgggcggcattacggcggccggtggggcgtggaatgcctcgattgtctcggaaatcgtaagttatggacggcatacgctgaccgcctccggcttgggcgcgtatatcgccgaggccaccgaaagcggcaacaccgtgaggaccatcatcggcgtgaccgtgatgagcgtgttcgtggtggccgtcaaccgcttgttctggaacccgctgcagcgcatggccgagcgccgtttcgcactgaactaaagacttaaggagaataatatgactgttgcaatggaaaccattcgttcgctgcgggcggtgaccccgcagaacaccatcatcgaagcccagcacgtcggccagcgcttcacggccgacaacggcaccgaactcaccgtgttcgacaacatctcgttcaacctgtacgagggcgagatcgtggccattctgggccgttcgggtgccggcaagtccacattcctgcgtgcgctggccggactggtcaagccgaccagcggcacggtcaagtatcgcggcgaggccctgaccggtccgaatcccggcatcgcactcgtgttccagaccttcgcgctgatgccgtggctcaccgtgcaagacaatgtggaactcggtctgaaggcgcgcggcgtaccacgtgcggaacgcaccaaactggctctggatgccatcgacatgatcggcctggacggcttcgaatcggcgtatccgaaggaactgtccggcggcatgaggcagcgcgtgggcattgcacgcgccttggtgctgcggccggacgcgctgttcatggatgagccgttctccgccctggacgtgctgaccgccgaaaacctgcgtcaggaagtgctcaagctgtggtcgagcgaacagcgcagcatcaagtcggtgcttatggtcacgcataacatcgaggaagccgtggagatggccgaccgagtggtggtgttgggctcgcacccggggcatctgattgccgatgtgcgggttgatctgcagcgcccgcgcgaccgtcacagtgtcgaattcgaggcgatggtggaccgactgtacgcgattttgaccggacaggcctcgcagcctacgcaacaagccgaggctctatcgccatcggcatcgctcacgaacgcacccgtcacggacgcatctgtcacggacgcatcagaccttcagcccgccaagaccatcgagaaaatcaaggagcatccgctgcccaacgccacgccgggcgggcttgccggtctgctggatgtggttgccgagcatcctcacggcatcgacttggcagatttggcctcggctctttcgtttgaggtggacgacctgttcccgctggtggatgccggtacgatgctgcgcgtcatcgtggtacgcgacggccatgtgcagatcaccgaggcgggcgactcctggcataaggcggacattctgcgcgccaagcaggtgttcgcctcactggcgatggaacacgcgccgctggtgcgcaacattgagcatgcactgcggaagtctgcggaaggcaagctccgcggcgagctcatgctggacctgctgcgcgcccgttacgccaacgacgaggcgcatcagcagttcgccatcgccgtggagtggggccgttacggcgaactcttcgattacgatgccgatgacgatctgctgagcctggatgaggcgaataagggcgaataagcgaatcagccacgtgagttggctagatagtgcctttatgcctgcaaacagatgccgaagcggaatatgaccatgttcgactcatctgactgacagcaatccatatatgcaaagtgcccggcatccgaagatgtcgggcactagtcgtgagagagagactccctcagtcagctacactgacagctcctctcacccgagggggcaccagaggaacgaatcagaactcgcgacgtgggcagtcgccagactgcccaccagacagcacagccgcggtcgcgcgaatcacgaattctgaccgagcaaagcgaatcagaactcgcgacgtgggcagtcgccagactgcccaccagacagcacagccgcggtcgcgcgaatcacgaattctgaccgagcaaagcgaatcagaattcgcgatttgcgcggtagaacttgatcaggctctgggtggaggcgtcctgggcggcgagggcgtcgtcgtcctgggagatggccggggtgatctgcttggcaagctgcttgccgagctcgacgccccactggtcgtaggagtcgaggccccacacggtgccttcgacgaaggtgatgtgctcgtacagggcgatcagctcgccgaccgcgaacggggtcagggccacaccgaagatggaggtggtcggacggttgccggtgaacacgcgggccgggacgatctcctccggggtgccttcggcgcgcacttcgtcggcggtcttaccgaacgccagggccttggtctgggcgaagtagttgcccaggaacagctcgtgcacgtcctggtcgccgtccttggtcgggttcggggtgttgacgaacgcgatgaagtcggccgggatgagctgggtgccctggtggatcagctggtagaaggcgtgctggccgttggtgccgggctcgccccagaagatctcgccggtctcggaggtgacgggggtgccgtcccaacgcacggacttgccgttggattccatggtcagctgctgcaggtaggccgggaagcggtgcaggtactggtcgtacggcagcacggcgtgggaagcaaccttgaagaagttgcggtaccagacgttcagcataccgagcagcaccacgacgttcttctcgaacggggtgttggcgaagtactcatcgatctcgtggaagccgtgcaggaactcctcgaagcgggccgggccgaagacgacggccagagaggtgccgacggcggagtcgacggagtaacggccgccgacccagttccagaagccgaacgcgttgttcgggtcgatgccgaattcggcgaccttctccaggttggtggagacggcgacgaagtgcttcttgatggcttcggcgttcttctcgtcggagccgtcgatggcgcccttggccttgagctcttcgagcagccaggcgcgggcttcacgggcgttggtcagggtctccagggtggtgaaggtcttggacacgatgatgaacagggtggtctccggatcgaggcccttggtcttctcggccaggtcgttggggtcgatgttggagatgtagcgggcggagatgcccgcgtcggcgtacggcttgagggcctcgtacaccatgacgggacccaggtcggagccgccgatgccgatgttgaccacggtttcgatcttcttgccggtcacaccggtccactcgccggaacggaccttgtcggcgaaggcgtagatgcggtcgagcacctcgcgcacgtccttgacggtgtcctggccgtcgacgatgtacttgccttcatcctcgaccgggcgacgcagcgcggtgtgcagcacggcgcggtcttcggtgttgttgatgtgcacgccggtgtacatagccttggtgcgctcatcgagcttgacggccttggcaaggttggcgaacagctggagggtttccggcttgatcaggttcttggacagatcgaagtgcaggtcgccggcgtcgaaggacagcttgtcgacacgctcggcgtcttcagcgaaccacttcttgaggctcacgccttcggcctgaagctcgtcatagtgcttctgcagggcagcccactcaggggtctgggtggcgtcaacgggcggattgatggccataggattccattcctttcatcagtgactggagcgccttcgctcacggctcggatgcgctccgtatcaccaaacagaatactcacaaattcggacatgaacagaacaaaaatcagtcagcgatgtcggattgccatcgtttgcattatcgaacagttcgtggcgcggcacaaccgtcatcttcaaccgagcggtcacgacacaactgccaagccgccgattggacttttcgcggagatgtcttatacttaatttcttgtgcgcggctggcgaaatgccttccgcgaaccaagccactttagctcagtcggtagagcggctcactcgtaatgagcaggtcgtcagttcgattctgacaagtggctcggatgccctaggctggctggtctgtaatggctgtccggcctagggttttgtatatcttccacacctgtggaaacgcggatatgcacgcgcgagtggcggaattggtagacgcgcaggatttaggttcctgtgtctttgacgtgtgggttcaagtcccatctcgcgcaccggcttgagcctcctggaaacattggatcgccaacgattccgggaggctcttcgtatatgcgtgaggcaattgcaagcccttgcggacgcctctacatatggcaatgccaaggcggcaaatataatggtcacagcattgtgggtctgagcctgtgcgccgtgagcctgtgtgagtcaaggagagaagtgtatgtccgccattcttacgccggttggcctattgctgatcattctcgccggctatctgttcaagcggttcggcctgttcgggcagaaggattatcgcgtgttgcaaaccgcggaattcaacatcgtgctacccggtgccatcgtatactcgttcgccaccaatccgcatgacatctcgctgctgcttatttcggtattcgcattcctgtttgcttttatcccgatcgtgttcatctttctggccacccgcaagcgcaatgtgaccgaccgcgccttcctgatgctcaatggcgccggcttcaatctcggttgtttctctttcccggtcgtccagtcattctggggtgcgggcgcggtggtgccggctgcgatgttcgatatcggcaactgcgtgatggtggccgccggcaccaatgtgctcacccagcaactgctgcatattcagcccggcaaaacacttgccgaacaacacgccggttcggttcccaccttgccgtacgaaaagcccaaggatcgcgacgccaaacggcttgcccgccgcgcattgctgcgcaccatcggcaagagcttcttcgactcggtgccgttcgacacgtatctgctcatgatcgcgttgaccgtcgccaacgtgaagattcccgattggatcgcctctataacccagccgttgagcggcgccaacgcgctggtgtcgatgctgatggtgggcatgctcatggatttgccccagtccaagcatgatgtgaaggaagtcatggccgtcatcgcttggcgtataccgttcagtgtcgccttcgcgttgatctcgtggttcctgctgccgttctcggcttcgattcgcgccgtgatggtgatctgcgcgttggctccaatcgccattttctccacgctgttcaccgacaaagtactcggcaacgccaaactggccggcttctcgctggcaatcaccgcgatgatttcactggtgatgatggcatttgctcacgcgctgatgggcgtgtgagcaaatgcgcgagtaggcacacgacgggcgcacggcgggcacacggtcaggcgagacgcagcccacataggttcgtcccccggccgccagctgctaccggtgcagcagcttgtgcgccagattgctcacgccgaagcggaacttgtccaccggcaacgtgaatttgcctaccatctgctcgacgtagccgttgaagccctgcttgaattccagcacgccgcggccctcgtcgttcggatcgtcgaacacgccggaaatgccgtagaagttgtagcggctcacaccctgttccacacacaggtgcagcatcgcttcgtactgaatcagcgccgaggcgtagaacggcttgtactcctccaacgaaccggaatactgatagaccacctcattggggtgactgacgaacattgaagccgctgccggcagcacatcgcccttcttggcatatccctccacctcagccagacgcttgtcggcggccgcgagattgcgcgattcctcccccagctgacgttcgatgcgcgtggtcggacgttcatcgtatttcgtctgcagctgtgcgaccttggtctgcaaggcctcgcgcttggcggtcatatccgccacatattcggcgatgtggatttccgcgagcatgaaatgcgcatccgcgccatacgcctgcttgaactggcggaaatagtccgcgccgcgcgtcgcgaacccgcggcgttcaccggtccgccgttcgatatcggcgaacacgtcgaactcgtcggggccgatttcgcgaacgtgcacacccatcgactgcgcccgcttgacgctccattgagcgcgtttgccgaatgatgccagcagttccttgccgttggtgatgccggtgagatccttgacgtacatccactggcagaccacgtcataaccggtatggaatccgccatgcgcccagcctgcatcggcgaatccggtcagcagtgcatcgttcggctcgccgtcgggctgtccgtccgaggaatacagacggtaggcgacgttaggccagcatgccacggaaacagcatggtggcgacgggccgattcacgaatcgcctcggtcatggtccatagcagagccggatcatcgctaatgccgatggggccgaaatatacggagccatctgcaccgaaacgaccattgaggtacagaatcacgcagccggctaccagattgccggatgcgtcgcacacgccaacgcattcggcttcatgcccacgaatcttggcaagacggacctgcccggaccattgctgaaagctgccctggcttgtggcttcggaaagccggtcgaactcttcgggcgtaatcacgccaaacgtatacgtcgtatctgttcgattcgcagtcgcgctcatctcgtcgtcacctgtgccttatttctgtgtccgtgctcgccactgtttgtcagcgatgcagcagcttgtgtgcggcttcggatacaccgaagcgcagtccgtccaccggcagcgtgaacttgcccggaagctcttccacgaatccgccgaagcgagtcttgaactgccagacgccgtaggaaggatcgttggcgtcgaaaatgccggaaatgccatagaagttgaagcgctccacgccacgggcgatgcagtcaagcatcgcctcgaagtggattagggaagacgggtagtaatccatgaaacgatcgtcctcgccgctggacaggcagacgacctcgttcggatgccagaagtagacaccggcttccaccggaatgaccgggccgtccgaggcgatgatgccattgacttcgccgatggtcttttccagcgccgtgatcttcttgtctgcggtggcgatgcgcttttccagcgttgccgggtcggaggcacccttcttggccgtgccttccggccgctgttgcgcgcgctggagcaggcgttcgaggttgcgcttgtctttggaggccgcattcagcttggattgcagggtgtccagatattcgtcgaaatgggtttcgaccaccttgaactcgatcaggtcgccgaaggtatcgaacagacgctcatagtaggccagatcgcggctcttgaagccttgacgtgcggcgctcatatcgcacagcttgacgaaagtgctcagttcgccgcgttccagccggcgcacgcgcagaccggaatcctgggcgatgcggatgttcttacggcggtacttggagaacgaggccagcagttccttctcattatgaatgccgtcaagccccttgacgaagttccagcggttcaccaccgattcgtagcccacggtgaagccgccatgtttccaaccgaagcgggccatgttgtccatcatcgtggtgtccgggtcgctggtcggcttgccgtccagatcatgcagacggtagactgcggccggccagcaggatacgctgatggcgtgatgggccttggccgaacgacgcagggcttcggtcatcgcctcaaccacctgtggattgtcataatcgcacagcggtccgcaccagaccgagccttccaaaccgaaacgggactgcgtgtacaccacgtagcaggcggcaatcagcttgtcaccgcgcttgacacccacatagtccaccggaccgttgaacgcacccatggcggccatctgcgaggtctgctggaaactaccttgcacttgagctgcggagaacgcatccagctcggcaggagtgatcttggtaggggtgagtgaggcgacgcctgcatcggattgcgtcataatcgaaccttcttacttgtcgttactctgatcgttactctgggctctggaacggcctgtgtgctgcgtccgtttaccgcgacagcagcttgtgcgcaaattgcttcatggcataggcgaccggtttgaccggcagtacgaactcgcccggaagttcctcgacatatccgttgaagccctgcttgaactccagtacaccacgcccctcgtcatcgggatcatcaaagacgccgtcgatgccgtagaagttgtagcgagacagcccgtgttccacgcagaaatgcagcatcgcgtcatgctgaatcagcgcggaggcgtagaagggcttgtactgctcgacgctaccggagaacaggtagatgacctcgcgcggatgctccacgaatagtgatgccgcagccggcagcacatccccgtctttggcgaactcggccgcctcgttcaggcgcttttcggctgccgccagattgcgggtctcctcccccagctgacgttcggttttggtggtggggtgttcggcgtttttggcggtcaatgccgccaccttggccgaaagtgcttcacgcttggccgtcatgtccgctacatattcgtcgatgtggatctcggcaaccataaaatgcgccttgttgccaaacgcttccttgaaacggtggaaatatgcttcgccacggtattcgaagctacgacgttcggcggtttgctgctcgattcgtgcgaatacccccaactcgtcgtccgacagctcacgcacatgcacacccatcgattgggcacgcttcacgctccactgggtgcgcttgtcataggacttcagcagacttttctcatcggtaatgccggtcagatccttgaggtagcgccaacgtggaaccgccgtgtagcccacggtgaaaccgccatgagtgaagccgatcgcctcgagccgttctatcagcttattgtcgggagcgccgttctggtcatccggcaaagaagctccattggtgtcgcgaagccgatacggggattcaggggtgatttccagctgtgaagcaccctttgccttggcatggcgtttcagcgcatccatgaagaaggtcaatgcttcggtgtcgtgatagtcgcacatcgggccatcatggatggccgcaaatgtagagaatcgagagcggtgagtttcgaacagcgccgccgcgacgatcttctcgccctccttgagggccagatattcgacgtcgatcccctgcgcggcgcgaaggcgtcccatcgccgaggtttgttggaaattgccttgtggatgcctggcggagaaatcatcgaactcttcgtctgtcaacttcaccagcacaaaatcacgcatgcttccctctgcctccgagtcaatcaggctcaccatgctagcataacgcgcacacgacgaatggggtccgagcagatgaggtgtgcacatcgttcgcactattgcctccacaatggctcaaagaacaatggcccgaagatgctgaacgtccggcttgcgttgaatcaaacgcagtgctatattctctacttggctcttggagccacgccaccttagctcagtggtagagcatccccctcgttcgtgggaaggtcggtagttcgattctatcgggtggctcttgttcatcaagaaggccgacgcactaagcgccggccttctttcgtatcgcccttgctaggtcataggcgcttgctagacacttgcccgattcgggaggggctcagtgcagttagacagtctagacgacttagtgcagcagcgcctcgatagcggggaccaaggctttcagcgccttgcctcggtgggaaatcgcattcttctcggccggagtcatttcggcgctggtcagcggctcgccttcatggtcaggctcagtgctgacgcgaccggcaggctggtcgtccgggacgaacagtggatcgtaaccgaaaccgtgttcgccacgagcctcgcggatgatacgacctggcatgtcgccgagttccactgtctccgacttgatggcgtaccgggcatgcaccggggcagggctcccatctgcagccgtggtgtaaacggtgatgccgtcggcagccactccaccggtcacgtcggcactggcctcggtgtccgggaccaccagcgcggcggcgcagcggaagcgcgcggtacgcttgtcatccggaatatcttcgatttgggcgagcagcagcgcattattggccttgtcgtggccgtgagcacccgcccagcgagcagacagaatgcccggagcgttacccatcacatcgacgatgagacctgaatcatccgcgacagcgggcagaccggtacggatggccacggcgcgggccttgagcagcgcgttctcctggaaggtgacgccggtttccaccgggtccggcaggtgaaggctgccagcggacaccagttcgatgttttcggcatccacgccaagatcctcttcgagaatgcggcggatttccacaagcttgccttcgttatgggttgcgacgacgatttgcatgggttctcctttaagaaggctccccttgtcaggggagctggacattgcagaccgtacggcttccagccgacaacctcccctaaaggaaggggagctggcttagtctagggacaaagcggcacgctgggcggcttgcagttccttgttgcccttttcggccaagtcaagcagggtgccgagttcggcacggttgaacggacggtgttctgcggtgccctgaatctcgatgaaggtgccggaaccggtcatggccacgttcatgtcggtcatggcctgactgtcttcaatgtatggcaggtcaagcatcggggtgccgttgatcacgcccaccgatacggcggacacatagtccttaagcacgcggctggcggacttgatatggcggtgcttcttcgcccaattgactgcgtcgaccaaagccacgtacgcaccggttacggaagccgtgcgagtgccgccatcggcctgaagcacatcgcagtcaagctgaatctgattttcgccgagcgccttcatatcgatgacgccacgcaggcagcggccaatcagtcggctgatttcgtgggtacggccaccgattttgccacgtacggattcacggtcggtgcgttcggcggtggcacgcggcagcatcgagtattcggcggtgacccagccgaggccggagtccttgcgccaacgcggcacaccaggggtaaaagtggcggtgcacatcacgcgcgtgttaccgcattcgatgagcacggagccttcgggggcgtcggtgaagtggcgggtgatgcgcacggggcgcagctcgtcgaccttgcggccgtcggcacgaattatttggtgattgccaagcatgtctttgatttcaaccatgcgccccagcatacgccatccgctctatgcctggatagcaactcgtcaaccatcatcaaaccccagcgcaatgtcattccctgcttacatatccattccatgacacttggctgcacgccactattttcttatgcaccactcgcttacagagtcaatgcctgcgtacctgatgaggattgggaaagatcgtccgctggaataagaatgccatattccatgaaatcttggttgaattgcttgcgctgcatagcgttgagttcgtaatcgattaacggcaaatatgtatagtccatgtcatgcaacggctcttcatatcgatgaagcacgtgcataattgccgcgctcggcagtggggaccaccatccatccaagccataccagtacggaggaaccaatgtcaagcgtctgttccttgggttgatatcccaacgcagaaaacggtataaaccagcgagaaacgcaatccagcacgcatcgttcacccgtgcaaccgctcggacgaacgatatacgttgatgttggacattccgagcatgaatcagattgacgcagagcatcttcaacgtagaccaggtcgctccgctttctattgcatcgaaatcaggaggcctacgcagttgcgccaacaacatgtgcaattcgtcttccggaatcgtttgcgagggggccacggcttctaggtgaagaccaaaaccagcccgctcaagcccctcggccaaaacatcaaacaacatacctctttgcccacgcaatacgcgaccaattgcagaccgatccaaaccagtacgctgtgcaagctcataggcattccaaccagtctgcgacatcacttcattcagcacagccgcacacgaattaacagggcaaccagataccacaccgtgatgcacgacatcgcactgttctaacgctcgatgctctacagcgcgccgctctgatacgtcatcgttgcccgccgcgttctcatcattgagagtttcactcatcgaagtcaccttgcctcggccgatttcccggtcatttcatcaaaccgcaatcatcatatcccacaatcccatgacgatacgattcgtcatatcccacaattcagagacggtatgattcgtatcgcatcagttcacacgattcttcaacgattgctccgcaaacgattgctctgcacgcatcacggcattctatcggcacactattcctcccaatcagcccaacgcaacatcacacgcaacatcacacgcaacacccctcacgcaacacccctcacgcaacactgcgccatctctgtaacatcaccgacaacacggcaatcccacaacgtctcggtgcaatatcctctgaaatggtttggtttttcactccacctcgtcggcatcctgaccaggataggaatatgtgtcgttccgcaccatgtacaaaacgttgtcaactgacaacgttcttcaaatcaattggataagacaaatggccatttcccgccaattcatctgaatcaagacgttgtcaactgacaacaaaatgtacattgcaacagcatgcacatatacatatttccccggtgaacagtaccccccccccaaaaaaaaacaaggggggccaccctcagctggaaccacgtccggcgaaccgggacgcagttcagcccgaggggacgcggccaatacagccccgggacacagccacagggggtgcaaacacgggggtgcgaccggggttggatctccccgcctcggcggcgaccacaggagtgcggccaacacagacagaggggcacagacagagggacacagacagagggaagagtagccaatgtaaccaaagggatgcggccagtgagatacggtcagaggacctgagtctccgtaggaatcactggctcgcccttcatgaggctctgcgcggtgatgggcagttcggacaacgccttggcgtggtagtcgtgggcggccatgatggcgtcatggccctgccactgagcgtcgatctgcccatgatccacaaagtcgaccagcaggttcttccacgtcggttcaggcgtgaaaccggccagcttctcctccgagccggaaatcacgtgttcggcttcggctaacgcgtattcgtaggagcggaatgccagtttgcgaccgggcactgtggccttgtccttggatttcttcatgaccggaaccatcgtgccgtcagcgccttcacgttcggtgagcttgtacaccatcgcacaagtgggagcgccggagccggtgaccagcatggtgcccacaccataggagtcgaccggcgcggtctgcaatgcggcgagcgcgtactcatccaaatcgttggtcacggtaatggtggtgttcgtggcgcccagggcgtccagctggttgcgcacacgctgggccatggcggctaggtcgccagagtcgatgcgcacgccacccagttcgggaccggccacctcgacggcggttttcacggcttcctcgatgttgtaggtgtccaccagcagcgtggtgttcttgcccaatgcctcgatctgcgattcgaaggcgtcacgctcggaatcatgcaccaacgtgaagcaatgcgcggcggtgccaatggccttcagaccatacagctgggcggccagcagattggcggtacccttgaatccgcccactacggcggctcgagcggcggccacggcggcccactcgttagtgcggcgtccgcccatatccatgcaaggacgatccttggctgccgacgccatacgtgaggcggcggaggccactgcggaatcgtagttcagcacggatagaatcaacgtctccagtagcgtgcattcgccgaacgtgccttcgacctgcaaaatcggggagttcgggaagaacatctcaccttcgcggtaaccgcgaatcgtaccggagaagtggaagttctccagccacttgatggtctcggggcttaccacgtgacggtcggccaggaacttcaggtccgcttcgtccaagtggaaatgttccagcgcatccagaatgcggccggtgccggccaccacgccatagcgacggccttcgggcaggcgacgcgtgaacacctcgaacacgcatttgcggtcggcggtaccgtctttcagagcggcgtcgagcatcgtgtattcatacatgtcggtcatcagagccggcgaataatcgaccattgcaaggcctttcctacataagtggtgaagttgcacctaagtgtagtccgggcaaagccatacagcccactggcgaagcggtagactcgatgcatgagattcatcgtggcgttgtggcgctttgcgatcgccggtttctgcttcgtgggcacatatgaggcatggtccaaaccgcagttctgggtgtatttcacgttccagaccggtttcgtgctgggcatcgtgatgctgtgggccggcgcggccacactgctcaaaggtattcagccgcctgcatggcctaagggatgcctgactgtgtacgccatagtcaccgcactggtggcgttcttcctgatgcctccggacgacccggcatacgtgccacaggttattggcatcatgaccaatacgatgctgcacaaaatcgccccgattatggcggttatcgatttcgtgctattcgacccgcaccggcgtttccgctggcattacatgttctcgtggctggcgtacttccctgcatacttggtcttcgtgctggcccgtgcgacgatttggccggggtccggaccggcggccggcggcagtccgtatccgtacgacttcatcaacctcgacgcactcggctggcaagggttcggcattagctgcggcaagctggccatagcgttcttcgtgatatcgctcgttgtctggctgctcgaccgcgcactgccgagcaaggccttactcggatagacgcgcccacgatcgacgcacatcggtcttagtgcccagccggcatccagctcggcactcgatggcctcagcattcaatggaataggcgcggtttttgtactcgcgccaatccggccagtcttcaccggcgtagagggctgcatatggaactgcgtggccacctgacgaatggtgtaggacatcatgactccttactgcggcgacacgccgaagcgtcgcagccgtttgcattcaagttcacttgaactggaaccttagtatctaagaacacttacgaataccactcgatcggcgtcggtttgcccatcgcagaccagcattcgtaagaacaaaaatgacattgtaaggagactcaatgttcgagccaaccaccacctacgctcccaacccgcaccgttacgacacgatgacctacaaccacgccggcacctccggcctcaagctgccggccgtctcactcggcttctggcacaacttcggcgacatcacgccattcgaccagatgaagtccctgatcttcaccgccttcgacaacggcatcacccacttcgatctggccaacaactatggccccgaacccggccaggccgagaagaactgcggcctgctgctcgccaagtacttcaagcaccaccgcgacgaactcgtcatctccaccaaggccggctacgaaatgtgggccggcccctatggcgacctcggcagccgcaagtacctgctcgccagcctcgaccagtcgctcgaacgcctgggcctggattatgtggacatcttctaccatcaccacccggacccggaaaccccgcttgaggagaccatgggcgcgctggctcaggccgtgaactccggcaaggccctgtacgtgggtctgtccaactacgatggtccgacgatggagaaggccgccgcgattctcgccgacctgcacgtgccgttcatcatcaaccagaacaaatacaacatcctcgaccgcaccgtcgaggagaacggtctgaaggagaccgccttcaagctgggcaagggcctcatcaccttctgcccgctggcacagggcctgctgaccaaccgctatctcaacggcattccggccgacagccgcatggctcacgatccgcgattcctcaacgattccgccctgaccgagaaactgcacaagcaggtcgtggacctgaacaatctggccgccgaacgcggccagacgctggccgagatgagcctggcatggctgctgcacgatggtaaggtgacctccgtgctgaccggagcctccaagcctcagcagattctcgacaacatcggcgcgctgaagaacacccacttcagcgacgaggagctcaagctgatcgacgagatttcggctcggtgaccattttggcttccctcgctgaggggagccaagtaccacctttagcgcgtcatttcttcgtagatgcgcttgcaatcggggcaaaccgggtacttggacggatcgtgcttgggcacccagaccttgccgcacagggcgaccaccggacgaccggtcgcgcgtgattcggcgatacggtccttagaaacataatgtgcgaatcgatccgcgtcgccgccatcgtcacgaaccggagactccttggtttccgggcgttccagcaccgacgtgccggcaccttggtccgggttgcgcagcggttcggcatcatcaacgaacatctcggcaaaagtcatggtgcacttctttcctcgtattcaacgattcgactgcactccatcatagattcccgtcgttacccgcgaaacccattggcgcgtaatccgcacacctccacacacccatgtcgcgcatcacgccaccccgccacatacaatgccacataacaatgccgcacacaacgccgcaccgacgccacatacggcaccgcacacactgcctcatacgccgacgcgacaacaatgcacgctcggcagcacgaagcacaccattcgcggtaggctataaggcatgactatcgcagtatgccccggctcgtatgaccccgttaccgccggacacttggatgtaatcgagcgctcggcgcggtttttcgacgaggtgcatgtggtggtggccgtcaacgccgcgaaaacaccgatgttttccgaagccaccagagtcgacgtgatccgccgtgcccttgacaaagccggttgcaagaacgtcactgtttcttccaccgacggcctgatcaccgactactgcaagaaggtcggcgccaccgttatcgtcaagggtctgcgccagaacggcgactatgaagccgagctcggcatggcgctggtcaatcgcaagctcgccggcatcgaaaccctgtttttgccggccgatccgattcttgaacacatctccagttccatcgtcaaggacgtggcccgccatggaggcgacgtgaccggcatggtgcccgattgtgtcgtgccgatgctggccgatgccctggccgaggaacgtcagcggaaggactgatgcactaatgactatgagcgatgaccaccccactggatacgtcgatctgaccaaaccgaatgcggacgccgcatcgtccactccggagccgtccgccccggaaccgcccgcgtctacgcaagccgcgccggcacccaccgaagaggccgatgttctcgccggatcgccgcccgccgcgcctacccctactccggcacagatgcaggccaaagcgcaggcccaagcagctcagcagacccgggcacaagctcagaccgctcaggccgccggcactcgcccctcgttcatgaacgaaatgcccgacctgcgagaaaccacggacgacgacccggccacggtcaagagccgcgaggaattcaccacggtgtatgacatcatcgaccagctcgaggcggcactgggcgaagcgaagtccagcatattcgcccccggcatggtgaaggttgaccgcgacgaattcaccgaccagctttccgagttgaagaaaatgctgccggtgcagttggagcgcgcctccgccctcatgcgcgaggccgagcgccgtctggaatcggcacagacccagtccaacgccatcgtcgcctccgcacaaagccgcgcagccgacatgatcaaggacgccaacgaacaggcacagttcctggccggccaagagaacgtcaccgagcttgcacggcagaaagcgcgcgcgattcttgaccaggcacagaccagagccgaccatctgacccaaggcgcggaccagtactgcactacggtgatggaagggctgtcccagcagctcggcaaactcagtcgggatgtgcaggccggtcttaacgtgctggaagagcgccagcgtgcggccggcgaacagatgccgcacctgacgctgaacgactatcccgaagcccagtaacgccagcagcaccagcaacatcagtaacgcgaataacgccagtaacgaataactccagccaacatacgaaaggcaccaagaacataccatggcacgagttgaagattccccgtgggccattccggtagcgcagattgcttcgcgcgccggtcaatccaagccgattgacgccgatttcccggccccttccggcattggcgacagcatcgtcggcatcaaggatggtgagcccgtacatgtgagcgggcagttcgattcgattgtggacggcctgatcttcaccggccgcctggtcgcgccattcgtcagcgagtgcacgcgctgcctgaagccgattgacgaggactggccggttgatgtgacggtgttcttcccgtatgagtcgggtcaggacaaggccaacggcaagggcggcaagaacaagaaggacgacgagatcgacatcatcgccggcgaggacgagtcggaagacacgtatccgctgctggagaacggcgcattcgcggacatcgaggcgatgatccgcgacacgctggtcgaatcgctgccgttgcagccactgtgccgaccggattgcaagggcctgtgctcgcagtgcggtgccgatctgaacgaggatcccgaccatcatcacgatgtgacggatatccgttttgccggattggcggggctcaaagcccagctcgaggccgagcagaacggcgagcaggccgagtgacgcgcgcctgaacggagtttgtacgagctatgcgttaagataacggacgcttaagctcaattgttcgaacgaaatagaggatactcaaatggcactgcctaagtacaagacctcgcgcgccaacacgcactcgcgtcgcgcgaactggaaggccaccgctgctgcgaccgtgaactgcccgaactgtggcgctccggccctgccgcacatggcttgcccgagctgcggtaactaccgcggccgcacctaccgctccgccatccagccggctcacaccaagtgagtcctgcgataacggcttgaatgaaggccctgccatcgacgggtggcggggtcttcgcataagtgcaccattacgtacaccatcgcatcgcaaacaacacaacacaacacacaacacatcaccatcgcgtgaaggaccatacaacaatcatgagcaatgaaaccccacagcagccgacgccggccaacgagcttcttgaagcgttgggcaccactctcagcccggatctgctcgtgcaggcactcacccaccgctccttctcgcatgagcaccccggcgtggccaattacgaacgcctcgaattcctgggagacgcggtgctcgaactggtctccactgaaacgctgttcaccattcacccggatatgaccgaggggcaactggccaagatgcgcgccaaggccgtctccgaagacgcgctgagcgccatcgccaaaaccaagctcaaggtgggcccctacattctgctgggtcacggggaaaccgagcagggcggcgcggagaagaactccattctgtgcgacatcgtggaatcgctcatcggcgcgaccttcctggaacacggcatcgacgaggcacgcaaggtgattcaccggcttattgacgacacgctcgccgaagtggccaccgagggcccggcacttgactggaagacctcgctgaccgtcaaggcgcacggcctcggcaaggatgagccggtctaccatatggaggtctccggcccggagtacgcgcagatcttcaccgcgcgcgtctcattgggcgagaacggcgacatcatcggcatcggtaagggctccagcaagcgtaaggcgcagctggcggccgccgaagcgggctggaagtcactggactcgctcaagacgcggactaagtaagcccgctgtcagatttgcgaatagactgataccaacatgagcgacgagtcgtgccggggccacaagtctcggagaagcgactggaatcagacacgcgggcacccggccccatcccaaggtcgggcaggttcgcggcaaaatctatgaggtgagaggaatcatggctttacccacgcctttgcaggcattcagcggcgtgccgaaaatcaacgcggcccccgataagcagaccatcgtcgatggcgagaagatgactggcgcccaagcgctggtgcgttcgctggaggatctcggcgtcgaggacgtcttcggcattcctggcggcgcgattctgcccgtctaccacgagatcaaagacaacacgaagttccgcttcgtgcttatgcgccacgagcaggccgccggccacgccgccgaaggctacgcactggccactggcaaggtgggcgtgtgcatcgtgacttccggcccgggtgccacgaacgtggtcacggccattgcggacgcgaatatggactccgtgcccatggtcgtgattaccggtcaggtgggcgtgcaggccatcggcactgacgccttccaggaggcggatatcgtgggcatcacctacccggtgtccaagcactccttcctcgtgacccgcgcgcaggacattcctcgcgtgctttccgaggcgtactacatcgccaacaccggccgccccggcccggtggtcgtggatctgaccaagaccgcacagaccggcgacatgtactactcatggccgcagcgcatgattctgcccggctacaaccccaccaccaaggcgcacggccgtgtgctgtccgacgcggcgaagctgttctctcagtcgtaccgcccggtgctgtatgtgggtggcggcgccgcccgctccaacgccggcgcacaggtcaaggctctggccgacctgaccggcgcccccgtggtcacgaccctgcccgcacgcggcatcattcccgactccgacccgaagaacctcggcatgctgggcatgcacggtacgattgccgcaaccggtgccgtgcagcgcgctgacctgcttgtggccatcggtgcacgtttcgacgaccgcgtgaccggcaagctcgacgccttcgcaccgaccgcccgcgtgattcatattgacatcgacccggctgaaatcggcaagaaccgtcagcccgacgtgccgatcgtgggcgatgcggctaccgtgctcgacgacttgattcccgaaatccagcgcacgcaggccattcagggcaagccgaatctggccccctggtggaaggcgatcgacggctggcgcgaggaatacccgatgacgtgggatgagccgaccgacggatcaatggccccgcagtgggtcatcaaaaagctctctgagatggccgatccgtccaccatctgggtgaccggtgtgggacagcaccagatgtgggcttcgcagttcatcgatttcgagaaccagcacgcttggatctcctccggaggcctcggcacgatgggctacggtctgccagccgccatcggcgcatccgtgggctcggcccgcgagttcgagggcaagaagccggtgtggctgatcgatggtgacggttccttccagatgacctctgaggagctggccgccgcgttcctggaccacgctccggtgaagatcgcgattctgaacaactccgtgtacggcatggtccgtcagtggcagacgctgttctacgagcaccactactcgcagaccaacctgctcgatggcgaggcgcacggtgccgatggtgcggcggcactggtcgacggcgatgcgccgctcgaagtgcctgatttcatcaagttggccgaggcatacggctgcgtgggtatccgcgcgttcaccgaggaagaggcgattgccgccatcgaaaaggcgaaccagatcaacgaccgcccggtactgattgatttccgcgtgtggaaggatgcgatggtgtggccgatggtagccgccggcgcttccaacgacgaggtgacgtacaagcccggcatcaagccgctgaccggcggcaccccggctccgggaaccggtccggacgagcatgcgaccggcgtgttcgagcacgagaccgccgctgccgctgcgagcgagcactgaggagaggagaacactcatggctaactatcctgcatcccagcctggttcccagcgtcatacgctgtccgtgctggtggagaaccgcccaggcgtgctggcgcgtatcgccggcctgttcgcccgtcgtgcgttcaacatcaactcactgtccgtctcccccaccgagcgtccggacatctcacgcgtcacggtgaccgccgacgtggaggccgtgccactggagcagatcatcaagcagctcaacaagctgctgcacgtgctgaagatcgtggagctcgacccgaactccaccgtggaacgcgaactggtgctcatcaaggtggccgccgacgaatccaaccgttccgacgtgctggagatcgtgcgcctcttccgcgtgcgtgtggtggacgtgaatccggaatcgctgaccattgaggccaccggtgccgaaggtaagatcgatgcgctgctggggcttttggagcattacggtgtgattgagctggtgcgctccggtgccgtagccgtgacccgcggcccgcgcgccctaagcgaaaaggtcgtcggttccgaggttaccgggcgctgattcggcgactgcggggagacccagtccaagctcaaagggcggatgtgcatgatgcatatccgcctttttcatgcgtgcatacctcatcacccgtgctgcaagcaaaatgacagcaccttatgctagcattatgacagcaacaaggaggtgcatcatggcaacattgaccatccgaaaaatacccgatgagcagattcaacagctcaaagaagtggctgagaaaaacaaccgctccatggaatctcaggtgcgatccattcttgaagaatggctggccggcacggtggcgcatgaaatcacacgaaagaccaatttctatgacgagatccgcgaattcatgaagaacatggattttgagggactcgacaagggggaactcccactatccgagcgaaattccgccgattcccgaccgccagtatcttttgaataggaatcggccatgattattctggacaccaacgtcatcagcgaaatcatcaagaaacagccagacgaacacgttgccaattggctgaggaaccaagatacaagcaatctggcaaccaccgccatcaccgtcgccgagttgttggtcggaatatgtcgcatgcctgaaggcaaacgacgaaagtacacagatacgaccgtcaagctggcgcttatgacattagaggacaggacgttcgcatttgacacccaggcagctgcggattatgcccatatccttgtcgaacgcgaacgcaggggcacacctaccagtattcaagacgccatgattgcggcaattgcctgttcctgggatgcggccatagccacgcgcaatatcaaggacttcgaaggtaccgacgtggaattgattaatccgtgggagtttgcatagcggtaggccccggcaaactaccgaggccttgtgaacgttacggtttctcccgctactccaattgttcggagagttcgagccattcggcttcgagattatcgctttcagtattgacggcggtgagttgttcattgagcttgttgagaccctcgtagtcgctcgggtcatgggcggccatctgtgcctcaagttcggtcttccgctcttccagtttggcaagcttgcgctcgatggcattcacgcgcttggatgcctcgtggaaggccttgccggtgagcttcgaggtggagtcctcaccgttattggctccctctgacgagggagctgtccgcgaagtggactgagggagagatgcagcaacattgacggcggccgccttacccctaccagacttcgccgagctgctaccggtgcccgcgaagccaggcgtgtcagccggcaatcccttgccgttcttaatagcctcaaccatatcgaggtaatcctgcacaccaccgggcagatggcgtaccttgccgccaatcagcgcgaactgctgatcggtgacgcgctccagcaggtaccggtcgtgggatacgacgatcaacgtacccggccaagtatcgagcaaatcctccatgacggcgagcatatcagtgtccagatcgttgccgggctcgtccatgatgagcacgttcggctcgtcgagcaggatgagcagcaactgcatgcggcgcttctgtccgccggagaggtcgcggatcggcgtcatcaactgggcggattcaaagccgagacgctccatcaactgtcccggcgttacttccttgccatccacaatgtagctcggcttatagcgggaaagcacttccttgatcttgtactggcccagtttctccagctcatcaagacgctgcgagagtacggcgaacttcacggttttgccgatgttcacatggcccacggtcggagtgatcgaaccgtcaatcaacttcagcaatgtggacttgccggcaccgttcgcaccgacgatgccgaaacgatcgccggggccaatcagccaagtcacatcgtcaagaatctcgcggccggaaaccgtcaccttgcgtgcagccgaggtgacaccggctgcagcagtgccatcatccgaattcgttgcagcagtgtcaccgccgatggtttcaccacccgtgttcatgcgacgaacctcgcgatcgtcagcaagctgcggattgccgctctcagcctcggccttcttacgcgcttcctcagcggcctcgacggcttccggcacgccggcgtccaccaggcgcaggtcagtcatgtcggtgaccgccacctcaacggaaccgtgcagctgcggctcggcgtacatggcgttgaccacatccacgcgggaagcggacgcggagagcgccgccacatccgggtcgatatcggccataccctgcggtttttcgaaaatctgcgtcacgtcgaccaaatcgaccacctgtttgccgaggcgtgaggtggccatttgcttcagttcaagtgtgttacgcatcggcggcacgtcggcaataagctcgcgcgcggccttgacgtggaacttctgcttggtggaacgggcacgggcaccgcgggaaagccatgcgagctccttgcgggccagattgcggcgcttcgtttcacgcacatcagcctggcggtcgcgttcgacgcgctgcagcatatatgcggaatacccgccctcgaacggctcgatcacgccatcgtggacttcccacatcgattcgcagacctcgtccaagaaccagcgatcgtgggtcacgagcaacagagcgccctggcctttggaccagcggttcttcagatgttcggcgagccagtggatggtgaccacatcaaggtggttagtgggctcgtcaagcgcgagaatatcccaatccttgagcagaagtcgggccaaatcggcgcggcgacgctggccgccggacaaggagccgaccttggcatccagactcatgccgccgagcaatgcctcgacgatttcacgggaagtgttatcggacgcccattcgtagtcggcgcggccttcgagcgcggcttcgcggatggtggcgttgtcgtcgagcggatcgcgctggtcaagcatgccgaacgtgagtccgccgcgcttcgtcacgcggccggaatccggctcctgggtgccgcggaacaggtgcagcaacgtggatttgccgtcgccgttcttgccgacgatgccgatgcggtcgccctcgaaaacaccctgcgtcacatcagtgaagatggttttggtggcgaaagcgagcgaaacgtgttccagtccaatgtcataagtcggcatgactcaccaatgtagcgccacgcttgcccagcggcggcccacaaacgttatttgttcagcgtctgagcgtaggagttgcagcgggccgcaaaaccggagaacacttgctcggcgagcggatgcagtagctgatcgtattgggcgaactgctcgcgcaattgggacttggacccacccgcggccttgagatccttgaccatgctcggctcatccagccattcgtccagcagcgagccgcacacctcaagatggaactgcatgcccagcgcggatcccagtcggaatgcctgcaccttggtggaagacgaacgtgccagcagctggcctccctcgggcaagcccaccacgtcgttatgccagtgcagcaccgtcagctgcttatcccacatggagaagaagtcatgcttgtccacacgcttgatcggcgcgaacccaatctccggcgcatcgcccttgcgcagctgcgcaccaagcgcagtggcgataatctgatgccccaggcatacaccgagaatcggcttgcctgaagccacggcggcacgcgccaacttggcttctgccttcagccccggatacttgtcgtaatcaagcgcgcccataggcccacccatgattaccacgccagccagttcgccgaaatcaggcaagtccggtttctttttgtcgacgatattcatcgtcaccgtctcaagaccgatgtcttcgaggttcgacaatatgcgtcccggacgttcccatgggacatgttgcaaaatgagcacttgtggtgtggccatgacttctattgtggcacgagcgttccccgtttgcgtaacgagcagggcaaatccatgaatctcgcagtttccgcagcggtcaaagacgtattctcgcgagactgttgtcccgcttctcatccgtctgtcacctcgttcgggccccgcctgtgaagcgttcatcaagctcttcgagtaacgattcagcatgtctggttcggaccctacgcttgagcgttatgggaaacagccaagaaccgcaggatttcaacatttccgtcatgccttcaagcctgacgccggtgcatgtcgccaaggccgcagaaggcctgaatctgtatgacaccgcctcgcaccaggtcagccatttcgtgccgctcaagccgggcgaagtcggcatttatgtgtgtggcgccaccgtgcagtcgtcaccgcatatcggccatatccgtgccgccgtggcgttcgacatcgtgcgccgctggtttttgaagctcggttacaaagtcacttttgtgcgtaatgtgaccgatatcgacgataagatcctcgataaggccgcggccgccggccagcgttggtgggcccgcgcctattattacgagcgcgaattcaccgaggcgtacaacacgctcggcgtgctgccgcccaccgtggaacctcgcgccaccggccacatgtcggacatgatcgacctgattcagcgcattctcgacaacggccacggctatgtggtcacggatgcggacggcaagcccaccggcaacgtgtacttcgatgtggcatcctggccgcattacggcgaactcacccaccagaagcagacttccgaagtcgatgaggccgctgccgtggccgaccgcatgggcccgtccgtggacgccaccggtgccgacaagtacaatccggtcgacccggccgacgtctcccccgacaagcacgacccgcgtgatttcgccctgtggaaggcccccaaggacaccgatcccgaggacgcccgttggtcgacgccgttcggcgtgggtcgccctggctggcacatcgaatgctccgccatgtcccaccggtatctgggcgatggcttcgacattcacggcggcggtttggatctgcgcttcccccaccacgaaaacgagatggcgcagacctgcgcggccggctacccctctgctgcgcgctggatgcattcggcatgggtgaccgccaagggcgagaagatgtcgaagtcgctgggcaccggcctgtccgtgccgagcgtgctggccgagcattccgcttgggtggtgcgttacgctttgggctccgtgcagtaccggtcgatgctcgaatggtccgatcaggcgttggtcgaggcgcaggctgcatacgaccgtgtctcgaacttcatcgagcgcgccggtgtggcactgggcggtcagccttctcgcgagaaggttgctgccgtctccgccgacgatttgcccgccgatttcgtggccgccatgaatgacgacgtcaatgtgtctggtgcaaccgccgcgatcttcaccgccatccgttccggcaatacgttgctttcacagctggctgaccgcgccgattccgaaaccgccaaggccgaggtgcgtgaggcgctgctcgccgtgcgtgccatgctcgacaccttgggtctcgacccgctggccgagccgtgggtgtctgctggcggtgccactgatggcacggccgagtcgcccgaacatgcggcgctggaggcactgattgccgagcagctcaacgcccgcgccgaggcccgcaaggccaaggacttcgccaaggccgaccagattcgcgacgccctgaccgaggccggcatcgccatcgaagacggcccgcagggttccacttggagcctgaagtagccgcttcaaacccatcaatcagtcaaacacgaagtccacgtccacgatgtgcaggcgcttggtgagctccttctccagcgagcgcttgcattcgatgaggtcagctacatcaatggtttcgccgatgccgctcagatacacgtcaacggtgtagttcatgccggtcttgaagatcagcgtctgctcgtagtcggtgttggcaggcagatggcgctgtgcctcggcctccacgtagtcgttggtttcatcgtcgtcatgcacgccgccgaccaattccacgaacgcctctttgagcacgctgaacggctccttgatggtcaatgccaccaaagccacggtgatgaagaaatcgccggtgtagtgcaggaagtcaagcggaccgccggtcggtagcagcatcaggaagatggcaaccacgccgatgccgaacgacatcgatccgtcgaccaacgtgctcttgcactcggcggtgagcatggtgctggaatcgccgatggagcggttggaacgccggtaatacgtgtataggctgaagcacacgattacggtcaggatctcgtagatgaccaccgggccggtttcaatgcgttcgccggacccgaacacgaagtagtcgtacgctactcggcacacgtcaatcagcgaatacaccaacaacgacatggtgaaaatggccttgcagatcgcgtagatgggttccagtgcgaacatgccattggggaagcgctcggtggttcgcaccgtgcgcgacgagaggtacaccgccaccattccggacaggacggaaatcgcggtgaaggagaagtcgaggaacatggccttgaggccggtcatgaagaacacggccatgccggctaagacctgcagcacgttgatgacgataccaacgatcagggctttgcgttcgagtagtttttgggtgggcatcagtgggccttccttattgcacggcatgtctgcgttggcccgaacgtcatggttcggagcgcacggcagtctgcgtataagcggtgtccagcgattttcaaaacagcgtaagcattccaaaaaacacaggattctttacggtttccatggtatcggaagcactcgattggcttcgccacgagcggacggcacggcatttgccgtctgaatgcccaacatccctgactactccgcgacgcaatccccggaaagagtcgtccccaacaccgcaatttcccgcgtggcggctagactgttgcccattatggcagctttttcatctttgacagacagactctcgaatgcgttcaagcatctcaagagcaagggcaagctttccgaggcggatatcgacggtacgatccgtgaaatccgccgcgcgctgctcgacgccgacgtggcgctcgacgtggtgcgttccttcaccggcaaggtgcgtgagcgcgcactgggaaccgaggtgtccgacgcgctcaaccccgcccaacaggtggtgaagatcgtcaacgaggagctcaccgacgtgctcggccaaggggtcgatcgtccgctgaacttcgcaaagaacccgccgacgatcatcatgctcgccggccttcagggtgccggtaagaccacgctggccggcaagctcggctactggctcaaggattccggccacacgccgctgctggtggcggccgatttgcagcgtccgaacgcggtgacgcagctgcaggtggtcggcgaacgcgccggcgtgcccgtctatgctcccgaaaagggcgtccaatccgatggcggcgaggccgtcgcagctccgggccagacctccggcgacccggtgaaggtggcccacgattccatcgaactcgccaagcagaagctctacgacacggtgatcatcgataccgccggtcgtctgggcgtggacgaggagctgatgaagcaggcccgcgacattcgcgatgccgtgcaccccaacgaaatcctgttcgtcatcgacgcgatgatcggccaggacgccgtcaagaccgccaaggcctttgacgagggcgtggacttcaccggcgtggtgctctccaagctcgatggcgacgcccgcggtggtgccgcgctgtccgtggcgtccgtgaccggcaagccgatcctgttcgcctccaatggcgaggggttgaaggacttcgaggtcttccacccggaccgcatggcttcgcgcatcctcgacatgggcgacatcatgacgctcatcgagcaggcgcagaagcagttcgacgaggaggaggcccgcaaggccgccgagaaaatctccgaaggctccttcggcctggacgacttcctcgatcagctgcagcaggtgcgcaagctgggctcgatgaagtcgctgctcggcatgattccgggcatggcccagcaccgcaaggaactcgagcagttcgatgagaaggaaatcgaccgcaccgaggcgatcattcgctcgatgaccccggccgagcgccgcgatccgtcgattatcaatggttcccgccgcgcccgtatcgcctatggttccggcgtgacggtttctcaggtgaacgctttgctgcagcgtttcgagcaggccgcaaagatgatgaagcgcatgtccaatcgtggcggcatgggcggcggcatccccggcttcggcggcccggctatgggcggcggcaagaagaagggcaagaacaagaagaaaggcggcaaatccggcaatccgatgaagcgcgaggccgaggagaaggcattgcgcgacaagctggccggcaaatcctccggttcgaccggcggttccgccttcgccaagaagccgcagaacccggccctgcccgccggccttgaacagatgatgggcaacgtcgatggtggcactgaactgccgccgaacctcggcggaggccttggcggactgttcggccgctgatctcacaacttggctcccctcgcagaggggagccaagttatatcttggttcaatttgtatttcgaaaggaacttccatgacgacaatcttcagcgcggtggcaatcatcgcactgttatggacggccttaagcgcgctgcccgccggtctcgaggcccgtatgccgcttccgtacatgattgccctgactccgctgctgtgggttcctttgatgattctggccgcggtcgccgcatggcaacatgaatggactgcgatgtcgtcgcttattgtggtcgcgctgattgccagctcacagcgcatcaactactggggtacgtcaatcgacccagccggcaaacgcagagaatcccaccgtgaaacagcccgtgaaacaacttcgccgacgctgtcaaaaagccataacagcaatacatcgagcacctcaaacactccgaaggaaggacccgaaacagtccctgatgggcaccgtgaaacaacgcgtgaaacactctcgccccagttctcggttatgacgatgaattgtcgatacggacgcgccgacgccgctgaaatcattcgcaatattcgcgaacgcaatatcagcgtattggccttgcaggaagtcaccgacgacctcatcacacgtcttaccgaagccgacatcaacgaactcctcccctaccatcagttcggagacgccaaagagaccgataatggcggattcaacgtgatctattcccgctacgagccgagcgcagcggtgcccaacgtggtctccatccctgccgccgacgttcccgccatcaccctcaaaacctccggtaatcgcacggtgacgctttgttcggctcacccgaaatcgccgatgcgcggctgcgcggattggtcggccggcattctgggtctgcgagaactcgcccgtgcaaaatccgtcagcaatcgcaacatcgtcgtcgttatgggcgatctcaactcgagcaccgaccacccgagcttccgcgcgttgctcaagtccggattcaaggacgcaagtctgattcaagccgccggcccgaatctcaccttcccgcgctggctcaagtggccgcgcatcgaactggaccatattctgttcacccaagggctcagaccgtccggcgtgacgtccttcgaagtgccggacaccgaccatctggctttggccgcaacgctcaccctgcggtagcgggcgcggcgatcgatcgggccttggccgtgtggcgcgaagcgggcgggaacgtctggaagacccccgcccgcagccgggtggttcgccgtcagaggtccatggagcggatcagattcaccatttcgatcgcgccctgcgcgcactcggaacccttgttccccgctttggtgccggcccgttcgatcgcctgttcgatggaatccgtcgtcagcacgccgaacagcaccggcacaccggtgtcgaggctggtctgcgcgattcccttcgagacctcgttgcacacgtaatcgtagtggctggtgctgccccgaatgaccgcgcccaggcagatgatcgcatcgtagcgcttgctcttggccatcttcgacgcgatcaggggtatctcaaaggcgcccggcacccaggccaccgctatgtcctgttcgcggacattctcccttttcagggtgtccagcgcccctgccagcagttttgaggtgatgaactcgttgaacctcgccacaacgatgcctatcgtgatgttttcggctaccagatcgccttcgaacgtgtgcatttattcctcctccatgttcaggatatgtcccatgcggtttttcttggttttgagatagaaactgtcgtaagcattggcttcgatttcgattggtattctgtcgcggatctccattccatagtcttccaattgatacactttgtcgggattgttggtcagcaggagcatggaccgtatccccagatccctgagaatctgcgctccgatgtagtactccctcgcgtcaccggggaatcccaacgcgagattggcgtcgagcgtgtccatgccctcgtcctgcagacggtaggccttcagcttgttgaccagaccgatgccccgcccttcctgacgcatgtacagcagcacgcccgagccatgctccgcgatcgtccgcatcgccgcgtccaactgctgaccgcaatcgcaacgcaacgagccgaagacgtcaccggtcagacattccgaatgcacccggcacaacacatcggtcccatcgcccagatcccccatgaccagcgcgacatgatgctcgccgttcaacctgttcacatagcagtgcgccgtgaattccccgtatcgcgtgggcatcgccacggtcgagacgcattcgacgagcgtatcgtgcgctttcctgtattcctgcagttccttgatggtcaggagcgggatctgatgctcctgggcgaaccgggtcaggtcgggggtcctcatcatccggccatcgtcgtccatgatctcgcagcacaggccgcattcgcgcaatcccgccaaccgcatgaggtcgacggtcgcctccgtgtgcccgttccgttccaggacgccgcccttcttcgccaccagggggaacatatgccccggtctgcggaaatcgaggggttccacgtcatcggagacgcacatgcgagccgtcaatccccgttcttcggcggagatgccggtcgtggtgccacggtaatcgatggacaccgtaaaagcggtttcatggttatcggtgttgtgctcgaccatgggcggaagcatcagcttgtgggccagttgctcgctcatgggcatgcagatcaatcccttggcgtgggttgccatgaaattgacgttccatgtggtggccgactgcgcggcacagatgagatccccctcgttctcccggtcctcgtcatcgatgaccagaacgagcttcccttcccgcagcgcctgcaacgccgcttgcaccgactgatggttcatgattcatgcatcctttctcagaacccgcaccgggacagcagatcctgcgtcagtcccgtccgggtcgtcatcatgttccgcacgtattttcccaatacgtcgttttcgagattgaccacgccgccgacccgtttctcgcccagcaccgtctgcgccaaggtgtgcgggatgatcgataccgagaagtccctttccgtgacctccgcgaccgtcaggctgatgccgtcgacggcgattgagcctttctcgacgatgccttcgagtatctcgttccgcgccgcgatccggtaccacacggcattgccttcgcgccgcacggaggatatgctgcccgtgccgtcgatgtgcccggtgacgatatggccaccgaaccttccgttcaccggcagggcccgttccaggttgacgccgctcccgtggcgcaatacgccaagcgaggttctgcgccacgtctcattcatcacgtcgacggtgaagcgtcgccggtcgaaatcgacgaccgtcagacagatgccgttcaccgccatgctgtcgccgatatggaggtcctccatcacgttcgtggcatcgaccgacagcgtgcagttggcggcgctcctccgtatgtccgccaccgttccgacttcctccactattcccgtgaacatgaatacaccacctcgctttccaccagataatcctctcccactcgggagcaggcgcggggccggagcatgacggcgtcggaaggcagggcgactccttggccgcccaccgggcttttcgcggtgccgccgaatatcttcggcgcgatgtacacgtgcgcctcatcgacgatccgctgttcgagggcgctccaattcatcgcgctcccgccttccagcagcacgctgtccatccgcatatcccccaggcgccgcaccacgtccgccagatcgacgtggtcgcccttccttccgacggcgagtatttcgcagccgtgccgccggtagtcctccgccttgcgttcgtcatcgcaggcggtggcgatataggtcctgacgtcattcgccgtctgcacgatccgcgaggtgaggggcgtcctcaatcgcgtatcgcagacgacgcgaaccgggttccttccgtgtgccatgcggcatgtcagcaacgggtcgtcctcgatcaccgtgttcacccccaccatgaccgccgcgacggatcgacggagctgatggacccgacgcctcgactcctcgccgctgatccaccgtgattgattggtatgggtcgctatcttcccgtccatcgtcatggcgtatttcatgatgacatacggcgtatgcgtggtgatgtatttgctgaacacccgtatcagatgccggcactcgtcggccagcacccccacatcgacccgtatgccgtggtcctcgagcatgcgcacgcccttgccggacaccacgggattgcggtccaaggttccgacgacgacccttgcgatgccgctttccacgatcgcctccgtgcatggcggcgttttgccgtaatggcagcacggctcaagcgtgacgtacaacgtcgccccggcgggcgactgcgtgcaatgccgcaacgcgttcctctcggcgtgcaatccgccgaacatctcgtgatatccctgcccgatgatccgatcgtccttgacgatcaccgcgccgaccatgggattggggttcacgtatccggcccctcgcttcgccagctcgatcgcgagtcccatgtactgcgcatcgtccatgtacgcctccaagcatgttgcgcccatacgctatccaaggcatacaaaagaaggttcatgcgaacacgaaaacgccctgaaatgatatggcatcatttcagggcgtacgacaaagcatgaacgtactttcatcttctctcatccagactgtactgtcggctttggaatctcaccaaatcatgccttgcggctcgtgggctgtaccaccggtagggaatcgcaccctgccctgaagatagttattcgttttgcccgtgattgtactcgccgacgctccccctgtcaacggaagcggcctcccgcagcgcccgggccttctgcatcgtctcgtcgtactcgaagtcgaaatcggattccacggtgatgcctccgcccacgccgagcgacgtctcgcctccttcacgcacgatggtgcggatcacgacgttgaaatcgcaatcgcccgtatcggagaaatacccgatgctgcccgtgtacaatccccggggcgcgcgttcgagctcgtcgatgatctgcatggcgcgaaccttcggggcgccggtgatcgaaccggtggggaacgcggcgcgaaccgcgtccacggcgcaacaatccttgcgcagcgtcccctcgacggtcgcgacgagatggaatacggaaggatacgtttcgatggcgaagtcggggtccgtgccgacggaacccggttcgcagacgatcgacaggtcgttgcgttcgaggtccacgaccatcagcagttcgctgtggtccttctcgctgcgggcgagttcctcgcggttcgcccgatcctcgtccggcgtgccgccgcgcggccgggtccccttgatgggccgcgtcaccacatgccccgagcgaatctccatgaaccgttccatgctcgaacagcacacgtcgagacccggtgcgcgcagataggcggaaaacggggccgggttgtgggtgcgcagataacggtagatggcataggggctcccggatgtctccaggcgcaggcgctgcgccatgttgacgacgtaggcgtcgccggcgcgcagatggtcgacgagacgggccagggcgtcgccgtacccggcccgcgtgaaatcggaggagcatggggcgagcgaacgtcggcgcgcgggatgaggggcgagcgggcatgaatccaccaggtcctgcgcccatgtcagggcgtgggcggccgtcatcgtccgcccctggcagcaacagaacaacgcccgcgaccggacgtcctcgatgagcagcaggtcgtagaagaccatgctcgcctccggtgtggccgcgacgggatcgtgcctggtcggtacgccgcacgattcgcggccgaaatcgtatcccagatatccgatcgcgcctcccgtgaggggcagacgcggatcgcgcgcgccatcgcagggtccaagccgcttcttcacgacatcgaggaaatcaccctccacggcaacgccgtcgacgaggcatccgccccgcccatgttcgatcacaagataggggaagagtcccaggatcgagtagcgcccctgcgcccccggcatcgaggagtccaggaacgcgaagcgttcctcgccgcgcacgcactccacgatgtcggcaagcggtcggaacgtcctgagcttgaacacctgcgcgctcaccggaactccttcgtctgcgcccgggcccgcgtccgcgccaccatgcgggcgtaggtgtcgttcacgtcgcgcgacacgctccccggttcgaattccacgccgccgataccggccacgggcatggcacccatcagggagttggtgaggaacacctcgtcggcccgaagcagctcgtcgggcatgatcgggcgttcgacggcccccgtgaacccgatcacggcatggcgcatgaccccgggcagcagaccgcaggagacgggaggcgtcacgacgtctcccctgatgacggcgaagatattggagacggccccttcggcgacctcgccccgcgtattgaggaacaacggctcgtcgacggcgcggtcacgggcgcgacgcttctccatgatgttttcggcatacgccagcgtcttcatgcgcgcgaggggggaggattcgttcctgcgcacatcggcgaagtcgcagcggaagacgcgcttcgcccccggcgcggcatacgggttgcgtctcaacgagacgacgcggttgcgctcggtgaccgtgagcttgagggccgaatcgtccgatgcgccgagtccggcgcatgcgcggagaaccatcgtctccagatcggcgcgacgcgcctcgatgccgaggtatcgcaacgtctcacccaaacgcgtcagatggtcgtccagaaacacgggcgcgccgccggataccgcgatggtctcgaaggcccccatgccgaagaagaatccgtcatccgcatccacacgcgcccgggcaccggggccgatcacgcactcacccatcgatcagcgccccctttcccgtctcgcactgccatcaatcaggctatcagtcatgaagacggtaggtgcgccgccgacacgccgtccgtccggcgattccgtgcgtcacgaccggaccgatgcgcaatatccggcttccgcgttacactagtacggttattcgcgcgcgcgtggcgccctctacaccccgagccgcgaggacacgtggattccggccggtcatgccccacatggcaaaccgagaacccgcacacctagcattacaaggagagccattttggcaaccaagattcgtctgaagcgacagggcaagaagttctacgccttctaccgtgtggtggtcgtcgattcccgcaagaagcgtgacggcaaggtcatcgaggagatcggtacctacaaccccaacacccagccctcgaccatccagatcaagtctgaccgcgctcagtactggctcggcgtcggcgctcagccgtccgagcccgtcttcaagctgctgaacatcaccggcgactggcagaagtacaagggccttgaaggtgccgaaggcaccctgaagaccgttgaggctggcccggacgccgaggcccgcatcgcggccgttgagaaccaggctcagaagctgaaggccgccaaggccgaagctgccgccaaggccaaggctgaagccgaagccgctgccgccgctgaggaagccccggctgaagaggccgccgaagaagctccggccgaggcctgagcggaaacgaaaggctagctatgcttgcacaggctgtggaacacctcatcaagaacatcgttgattttcccgacgatgtttccgtcaagtcccatgagaacgcgcgcggcgaactgcttcgtgtacgcgtgaacccggaagacatcggccgtgtgatcggccgtggcggccgcaccgccaacgcgattcgcaccgtgattcaggcactgtctgaccacaaggtccgcgttgacatcatggacgtccgtcgataaccgataaggaacgattcacagcatggcacagcaagacatgcacgacgaccctcagcagctcgagttgctgagggtcgctcgtattggccgcgcacagggcctgaagggcgaagtcaccgtgcgcctgtacaccgatgatcccgagtggcgcttcgagccggactccgtgctctacagccaggatggcgagaccgagtacatcgtcgagggctcgcgcacgttcaaggatcgttggattctcaagcttgagggcgtcgacgaccgcaatgccgccgaggccctaaacggtgtcgaactctatggcgaggccgacgacgcagaagatatgctcgaagccgacgaatggtatcccaaggatcttattggcctcgaggcccgtctagtcgagggcaacggtctgggactgcccgccggccaagtggtcggcaaagtggtggatgtggtcgactcccccgctcagtccctgctcaagattcgtttgaccgagccggtggtaaccggccagaattccaagggcgaggatgtggtcgagaagaccgcgttggtgccgttcgtggaggaactggtgcccgacatcgatctggaggagcaatacctcacgctcgatccgcccggcggtctgattcccgggctgtaaacagtctttcaaaccaataccgagttccacactcaatttattccatcgcaaagggcggtctttctgagattagtctcagaaagaccgccctttggttgctccttaacgtttataccgcgtaagatggctgagcctcacagataaccaaatgggatgccgaagcgatcaagacccgtaccgatcggctggtatccgttgcgctaaaactactgcgactgcaataaactataaaaaatgtgcgatgcttacacatttatgatatgataaatgtgtaagcatcgcacatttatcataggatattcgtcatgaagctccagcgaaaagcactgaaaacgctcaagcagtggaagaccgcacctgaccataagcctctcctgatccgtggcgcacggcagacaggcaagacatggcttgtcaacgagttcgcgaatggacaatacgacaacatcgtctcggttgatttcatgcagcggccatccctatccgggatattcgagcaggatcttgacccgcaacgaataatccgtcagctcgaactcgccgccaatcaacggatactccccggcagaacactgctcttctttgacgagatacaggaaagtccgctcgcgttgacctctctcaaatacttcaccgagcaggcacctgactatgacatcatcgccaccggctcctacatgggaatatccaagcacggcaagacctcttttcctgtaggaaaagtcaccatgatgaacctacatccgctctccttcgccgagtatctggacagcatcggacaagacatgatcgccgacaccatacgtgaaggccggttcgaggacattccacaagctctcgaacctcagatgaatgacctactcaaaacatatatgtgggtcggcggcatgccagcagcattaagcgctcacctggataacgggattccgcaggatgtgcgaactgtccaacaagatattctcaacgcctacgatcttgatttttccaagcatgccgcatatacgctgggcgagcgtatccggcttgtatggaacacactgccatcacaactcgccaaggagaaccgcaaattcgtttacggtgttgtcaggcaaggagcccgcgcccgcgaatatgaggaagcgctcacttggctgacggactacgggatcattaccaaagtcccccgcctcgatgctctgcatattcctctgcccggatatgagagtcttaacacgttcaagatctatctggaagacacgggcatactgggcgcactgtccggtctcgacgtgaatactctggtgaacaagtcgaagctcttttccgaattcaagggcgcgttcgtagaacaatacgtatgtcagcagctggtagctcaaggaatcagaccccgctattgggctaacccaaatcctcaaggaaatgcggaaatagatttcgtaatggaacagggagacgaggtttttcccatcgaagtgaagtcctcttccaatattcgtgcgagaagtctctcgtatgtctgcaacagatacgggctccacggtatccgtataggagaaataggctataggaagcaatcttggctgacgaacatcccactttggtgcgtggatgggctgggcgaatatctcaaacgtcagatcgaaaagagcagggaaaatccagcgaccatctgattctttttctgtttttcgggtatgtgaaataggtggttgagttttggtgattctcatacatcaattcggacgaggatgccatcgcatatctcaatggcgcactcgaagaggatgatcccgcatttgtgcaagatgcgttcggtgtggtcgcgcgcgcacgaggcatgaccaatgtggcccgaaaatccggcctcggccgcgaatccttatataaggcgcttcgcccgaattcgcagccctcgttcaacaccatcatgcgagtcgcagacgcacttgacgcagaaccctattccctgccgaagcgtaatcgttcacccgcgcgcggcggcggtgacgcgggtcatgaaacggtcgaggaattccgacacgtcgacaccgagcgcaacctgagtgtgcttgtcgaaatcttgcagccgcgagcggtcaccaatggtgcggccacggaacgggccctcgagatcgacctgtaagttgaagccgaacgtggtgaccaatgatgggtcgagcgcggcggccacggccagcgggtcgtgcagtccacatccgcgaatctccggctggttcttcaggtagaagtcgatgtagtagtcggtcatggtgacgaggaagtcgccggccggcgtccccagagacgcccattcatgggctttctcacgggtgagcgcggtctggtgggtcacgtcgaggccgatcatggtggtgcgtgcgccacacttgaacagatagtctgctgactctgggtcttgggagatgttcgcttcggcggccgggcttacattgccgggcagcgtcaacgcaccgcccatcaacgtcacgttcacgccggaatccttcagatccggggcattacggaacacggtggccatggtggtcatcgcgcccgtaggtacgatggtcaggtccgggccgtattcgcgcgcggcggcgatgatgaaatcgaccgccgagcctggtgcttccggagcacgcggggagtcggggatgattgcgccgccgatgccgttgggatggtggaccgccaccgagccgggagttggtgcccacgaagcgtccgtttgccagccgtccgcgccgccgttctgccagcgcgcgtaggcctgggtccgctcgtctggtgtggtgccacgcattttcggcaatgttgccggggcgatgggatggtcgactccgggatagaccggaacgtcgtcacggccgaacaagtgcaccaccgccagcgcgttgcgcgcggccagcggcaccgcgacattgccgtaggtggccgtgataccgatcagatcgatctcgtcggcactgcctagggcatatgcgatggcgagcgcgtcatcgatgccggtatcgaggtcgaggatgagttttttgcgcatggcggttccttcaagacgaatcaatcctcccgaatttgtgacgttaagccaacgtcagcggcacaaattcgggaggatggggaatgggcaatcagccgagcttggcgagttcttcgggggtgagttcgagctggtcggccttgagggagtcgaggatggtctcggggtggtgggcgccgggaatcacgaacatgtggtcgcccttggcgagctcccatgccagcacgacctgctggtagctcacgccgtgggccgccgcgacctcgcggaacgggtcgaacttggtctcatcataggggtgacggtagccgccgagcgggctccagcacacgaaggccagaccgaccttggcgcagtagtcgagcgtgtcctgggtctccaggtgaatcggcgagtactggttctgcacggccacgagcttgtcgcccagaatgccgcgcgcaatgtcgatttgctcgatggaggcgttggagataccggcctcctgcgccacgccctcgtccaccagctgcttgatggcttcgacggactcgttgtacggcaccttcgggtccgggcggtggaagtacagcaggtcgatggtgtccacgccgagcgccagtgcgctctccttgccgcgccgaatcaggttctccgggcgaccgtccacatcccacgtggggcggccgtcggtgaagttgcggaagtggcccaccttggtggccaccagcacctcgtccttcggccccttccaggtctcaagggcctcgcgcaccagcttttcaccggtctgctcctcgccgccggagcagtagtaggcccaagcggtgtcgatgtggcggcagccggcgtccagcgaggcatgcagggtttcgatgccgacctcatggccgcggttgttttcgatggtcagcggcatttcgccgtggccgatggcggtggtggagaacggtccgaggttacggaacaatgccatggtgattcccttcgtgaaacttatggaaactcgatatccacaatcaagcctaagcatcccgttggatttcacactctcggcctgcccgcacaatcaatctatgaaatttccgcaacttcacggaatagaaaacgcaacttactcatacccagttcagcgaaaacgaggagccggaaccccatggattccggctgttccgctgatagatcagtggcctcgtctgagactcattcccagcaataccagtgcggcaatgatgatggccgtcgaccaccactgtccaacttgattggccagggcgatcaacaggccggtcatcagaccttcccggtattgccggtcttgtctcggacggttgtcatggtcgttgcctaccatgagaacctcctcttgaattttgagacgtcattatgccggttgacacaacgacaccgcgccaaagtggcacgctagtagaccttggtttggtcagtccagtgtactggtgagcttcggtggaggctggtatgctgtgttgtagcagaaaggtcacgctagcttcgaggcaatcttctcggcggcgccacagactttcgccccgttggacctgactgttgaggtctcctcacctcgattttgagagaaaggcccgatgtcttatgacaccggaccttttactttcaaagctatagggactttcagaagcacatcgcttaccgtccaccgaacgaaccgccgccggaaccgccgctgctaccgccaaagccgcctgagccaccggatggcgaggccgcattgattgtcgcggtgatatccgcaaatccgtacgacaattgcgtgccgaggtcagagaacccagccgcgaacgacgtgcccccgaacgctggcaccgctccggccaatccgctgtcagccacggaatccgcgaacgccgagccattgtagaaacgcaacccataccagtcgtacggacgataattccaatagaacaccgtgtcggaggcattggcatcaagccattccggatcggatacttgcggataggccatggccagctcccgcatcacccggtcggatatgccaaatgcggcagcgtagaccatataccaatcccacagcgtcaaatccgcgactccacggtacttgaagttcgagaagccttgcatatatcgtttgagacccaagcattgcccggccatctgctgaccatgatcggtcagcacgtaggaattccccatcaggaagcagaatatgccgaccgtcatcaggggaatgccgatgagggccccggccaccagatatccggccaaaccgttgatgaatatgctggcgccaccgatcagcacggtgattgccccgggaatgagccatccgttctcggttttcggcgcgatatccgccgccgcgaattcggtcttgcacgcattggtgaacttttcgagttccttgtagccgtctttccaatccttgcaggcgtctttgatgtcatccatgtcaaatgccgtaccacctacgcgctcggaaatcacggtgagcagatagagcaatgcccgctcagaagcactgagatcgggctggtgtgcatcggacacgctagatgcggcagatccagatccgccagatccagatccatcaaatacggattcgacgaatactgattcatcaaatccctcagatacgccgtaatcggactgccacagcatcacaatcgtgctattggtacgcgcattattgcgcttgtatggatcggacccgattcgctgactgagctccaccggagaaacttgtttcagatccacgccgatatacaggtccgccgaaccggggaacacagcaatgactttcttcacggccagagaaagcaaggtcgcgacgagttggcgctcggaaatgtcgggtttgtcgccggaagtcacgatatcgatgagtttggccgccgatgcggggctcagctcggggcgatcgcgccaatattcgatggagccacggtaacgtgaacgtccggaggagcgtaaggctgcaacaacaccaataatcccgaatatcaggccggccgatatggtggtcatccagttgttcaggcgccttgtggcgcgttggcgttccagattgcgccagaaccgttcgtcgtcggcttcgtcttccttcaactcctgcagatgatcgtcggtctcgacacgagccatatctcccgccttggccgcgtcgaaagcggccaccacgtctaggtactcgccgcttttcacatcatttacggtgaaggtgaagctgccatccttggttcggccggtttccgaggtttgttcagtgtgcagccaagtccacgagttgctcgcggtcacacctttggggaaatgcaccgtgccggtgaccgtaccaatcggcacctgattgttctcaccgaatggctcccattggaaggtcgccacgtccttccacttggtggccacgtcatgcatggtgaagctcaccgtgaacttgatgctgttggtttttacggtggtgggaatattccagccgatctccacggtttggtcttgccatcgtcatccttgcgtttgcgcaacttgatatcgatatgctccgtgactttaagatcgccgtcggcggtggcggtcacatcgtaatcaagcgtgcggtagctcaggtcggcaccatctgtgccgagaatcaaggcaccggcacagagtgcggcaagaatcagcgcaccgacaaggcttaagcccagggcacgaacaatgcgtttcgacataggcatgcgctaccgcccgccgaacgagccgccacctgagccaccgaacgagccgccgaaaccggagccgccgcccgaaccgaagctggagaaatcgccaccggaatcggcggatggtgctgccgcgctgatggtcgagctgatgtccgccagaccggagttcagctgcgagccgaggtcggagaatccgccggcaaacgacgtgcctccgtaagccggagctgggccgccaacgcctaggtccgtctgcccggcagcatcgtggtcgaatggaccattatgacggtggctgtaccagccatacgggcggtagttccagtagaacaacgagttggaggcgttggcatccagccaagccgggtcgttgacctgaggatatgctttggccagttcacgcatcacgcgatcggaaatgccaaacgcggcggcgtagaccatataccaatcccacaaggccaaatcggcggtaccccggtcggtgaagttggagaagtcttccatataacgcttaaggcccagagtccggccggcgatatcctgcccttgatcagtgagcacggtcatcgcgccggccatcgagcagaacagtccgaccaggaatatcggcagcccgataagaccagccaccgggtatccgataaagctgttggccagcagcgaaccaaatcccagcacggcggccaatacgccgggtaggatccattgccagcccacagagcgcgtggcacccagccgctggtattccatgctgcatgcaccggtgaatttgccgagctcaatatagccgtcttgccagttctggcaggtcgccttcatctggttcaggtcgaataccgggctgcccacgcgctgagaaatgacgatgagcaggttcagcagcgcatcttccgattcgctcaatcccaactgttgcgcgttgggtgcctcatcaatggcgagcggcagaatcacgatggtgctggtgatgcctgccgcatactgcttgccttggtcggcggcaatcatttggctcaagcccaccggcgtggcctggctcatgtcgatgccgcgatacatgtccgacggccccggataaatggcgatggccttcttgacggcgagcgacagcatggtggcggtcagctggcggtcttcatcggattggcgcgtcgacggatcgaccacgcgaatcagacgggctgcggaagccggactgatgccgggctggtcgcgccagtattcgacgctgccactgtattgcgcacgccggttgctggagatcacagcccagataccccacgcgcacaacgcgatgccgagcacgatgctgacaatccagaacacgagacgagctctggcagcgaatcgttgcttgtcgagccagcgctgctgttgcttatattcgtcctgtttcaggtccttgagatgattgccggttcccttgcgggcgatgcccttggctttggcggcatcgaacgccgcgaccacatcgaggtagtcgccattgtggatgttgtaggccgtgaacgtgtagctgccgtcgctgttgcgcttggtttccgaggtgcgctcggtgtgcagccatgtccatgaggttttgccggtgatgccgttggggaaatggacggtgccggtgaccgtgccgataggcacttggttcttcttgccgaacggctcccattggaaggaggccacgtctttccatttggtggccacatcgtgcatggtgaagcttacatcgaacttcatgctgtcggcctcggtggtgaccggaatattccagccgatctccacggttgtgtcatcttcggtggcggaggcgctgggcttgaggccatcggtaccgggcgtgtatgcctttggatggtcgctgccatcgctcacatcggcgacataccaatggttggcgtagtcgctgttccattccttgtcggaagagacgtcactgggcagcttgggctcgctctgttgtgcgtagtcgatgccgtcggtgacgttgcgcacgctgatatcgctgatatcagtcaaggtgccggagttcagcgtgtattgctggaacagctgcttccacggcttggtgttgtcgtcactgtcggtacgctcacgcatcttgacgtcgatatgctgcgtgaccttcaaatcaccgttcgcggtggcggtcacgtcatagtccagcgtgcggtagctgaggtcggccgaatcgccgaacgcggaagtcccgattatcgccaaggtgataactgccaacaccaccgtggcaacaatgctgatgattccggcgcgaatgaatcgtatccgcatatcttccctctcttaagacaatacgggcccggccggcggcttaccggacgggcctgaagcgggtcagaactggacctgtggcacctgacgggaagcgtcatcggcctcgaagtattgcgcctgctcaaagtggaacagaccggcgatgatgttcgtcggcacggtttcgatggcggtgttgagcttcaggaccacgtcgttgtagaactgacgggcgtaggcgatcttgttctccagttccttgagctggttctgcagatccatgaagttctggttggcttgcagctgcggatatgcctcagccgtggcttgcaggttgaacagggcgcgggacagctggttttcggcggcggcgcgctgagcagtggtcgtgctcgggttgctggccgcagccactacgccggcgcgggcggcggtcacctgagtgaagacttcagactcgtaggatgcgtaccccttgacggtattcaccaggttcgggatgaggtcggcgcgctgcttcaactgcacgtcgatttgcgcccaaccgttcttcacacggttcttcagcgtcaccaggttgttataggcgctgacgccccaaccaatcaagacaacgataataacgacaacgacaatgccgacgatcagaccagtactcacctatgctcctttgctggaccttgctgtgaccattcttccacactcgcaccgtaaacagaagattcatcacagagtattcatcgtgcggacttggcttgtaccgctttacccgccgttctcccgtcgatcgaccgaagcgggaagtcgccgcccagtccgacaaagtattccagctcgctccgttgcgagaacgataatactcggcaatactcgcgttgaatatgcgaaagcccgccttgcggcgggctttgccgtttctcctacgcacaaatcattacgccgcgcgcaggaaacgatcagccgaagcgaccggagatgtagcgctcggcttcttcgttttgcgggttgttgaacatcgtgatggtgtccgcgaagtactcgaggtgaccgggctggcccactgccttcaggttgaagaaggcggtgtagtcggcgatacgggcggcctgctgcatgttgtgggtcacgatcacgatggtgtagtcgctcttgagctcgttgatcagatcctcgacagccaaggtcgaaatcgggtccaaggcggagcagggctcatccatgagcagcacctgcgggtggacggccacggcgcgggcgatgcacagacgctgctgctggccaccggacaagccgatgccagggttgtcaagacggtccttgacctcttcccagaggttggcaccgcgcagagcccactcgaccagatcgtcggcgtcggacttggccaggtggtggttgttcaggcgcacaccggccagcacgttctcacggatggacatggtcgggaacgggttcgggcgctggaagaccatgccgacgtcgcggcgcacggccaccggatccacgtccttgtcgtacaggttcttgccttcgagcagcacctcgccctcgacgtgagcgccggggatgatctcgtgcatacggtccaaggtgcgcagcacggtggacttgccgcagccggacgggccgatgaaggcggtgaccttgttcggctcgatgttgatgttcacatcctccacggccagaaagtcgccgtaatagatgttctcgtggttgacgtcaatacgttgtcccatgatgtttccttatatttccttgtgttcttaaggcttaggcttagcgactggcttagcgctcggtcttgacggcgaagaccttcgccacgattcggccaatgaggttcagcagcagcacgatgacgatcagcacgagagccgcagcccacgcacgttccatcggaatcgtggtcacgcaggtggcgtcggcgttgggcgggcagttcgcgctgagcttcgagtactcctggtagacgaacaccggcagggtggtcatctggccggagaacaggttcacgttggtgctggagatgtagccggcggtcatcagcaacggtgcggtctcaccaatcacgcgggcgatggccagaatggcaccggagacgatgcccggcagagcggtgcgcagcacgatcttggtaatcgtgcgctgcttggtaacgcccagagccaaggaagcctcacgcaaatcgttcggcacgatcttcagcatttcctcgctggacttgaccacggtgggcagcatcagcagggagagagccacggagccttcgaaaccgttgatggtaccggggcccagcagaatcgtgaacatcgagaaggcgaacaggccggccacgatggacgggatgccgctcatcacgtcgacgagcagggagatcgtggtggcgagcttgccgcggttcgagtattcgaccaggtacacggcgcacatcaaaccgatcggaatggagataaccatagcgccagcggtgatttcgagagtaccgatgatggcgtgcagcacaccgccgtaaccaccggacggggtctggctaccaccgaccacaccggtcatgttgtagctcaggaagttcaggttcaggcgcttgatgccgttgacgatagtggtccacagcagggagatcagcgggatgcaggcgatcacaaacgccaccgcgatcagggcccacatgaagcggtccatgatattacggcgctggatggcggaacgggtcgggcggaaacgatcgaagtcgatttcgggcgtgccgtccatcggagtcttttcagtgttctcagcagcagtcatcacgcagtcgctttctcggtaagcttacgggcgatgaagttgaccacgaacgtgatcaggaacagaatcagaccggttccaatcagcgtggagacgcccagatcgttggcttcagggtactgtgcggcaatattcgcggcgatggtctggttctgcgaggcctgcagcagcttgatggagtagttgaggcccggggacaggatcatcaacacggccatcgtctcaccaagcgcgcggccgagagccagcatggaggcggacacaataccggacttgccgaaaggcagcacggccagacgaatcatctcccacttggtggcgccgagcgccagcgcggcctcttcgtgcaggcgcggggtctgcatgaagatatcgcgggacatggaggtgataatcggcaaaatcataacggcgagcaccacagccacggtggcgacggtgcgcgacgggttggcggccgggccctcgaacagtggaatgaagcccaggtggttggcaacccagttccagaacgggtagatggccggcaccagaatcaggccgccccacaaaccgtagataacggacgggatggcagccagcagatcgaccacatagctcagcgcggtggcgagcttcttaggtgcatagtgcgaaatgaacagcgcaatgccgatggacacgaagaaggcaatcagcagtgccagcaaagacacgagcacagtaccgaacaacagcgggagcacgtagccccagaagctgctggccttgccgccggtaaagctggacacggtgtcgctgttggcggcctgatcgccaccgatgagtggccaggcgcggaaaaacaggaacaggaacacagcggcaagtacaaccaggatcaggatgccgcaggcgtatgccacaccgcgaaacaccttgtcggcggtcttgcctccaactggctgcacagccgttttgtcttgcgaactcacggattctccttatatagggtggttatcaagtattcaagtggtgcggttttcgtctgtgactttgccaaaccgttcgggtcctgacccgctttaagccgcagccgtatggtttacgactgcggcttaaagttggcggcgactgctcttactactacagtctatcgttcagttgtcaggtccagtccacacgacccttgcgggccgacgtcatcacttggtcttgatggcctcgatggacttggtgatcttagacttcagggaggagggcagcggagcggtgccggcggcatcctgagcggccttctggccctcgtcggaggtcacgtaggtcagccaagccttggcgaactcagcctgcttggtgtccttgtaggccgggcagacgatgtcgtaggagaccaagacgatcgggtaggcaccctcggcctcggtggcgtggttgatcttgatgacgatgcggttgtcgcccttaacggtgtcgtcctgcttggagtcctcgatgaccttggagccggcctcggcggaaatctcgttgtacttgtcgccgaccttgacggccacggtgcccaggtcgccgacctgggagaagtcagcgtagccgatggtgccgtcggcctgcttgacggtggagatcacgccggaagtgcccttggcgccctggccaacctcgttcggccagttctcggagaggtcgtaggtccagttgtcaggggtgacgtccttgaagtaggagacgaagttctgggtggtgccggacttatcggagcggtgcacgacggtgatggcggtgtcgggcagcttcaggtccttgttctgatcggcgatggccggatcgttccacttggtgatcttgccgtcgaagatcttggcgatggtggcagcgtccatgttgatgtgcttgccggcatcggaaacgcccttgaggttgaagaccacggcgatcggggagatgtagaccgggacatcgaaggcggtgccttcagtgcacacggacttggactgctcaacttcgtcatcggcaagggccttatcggagccggcccaagcggtggcaccggtcaggaaggtctgcacgccagcgccggaaccggacgggttgtaggcgatcttggcttcagggttggtgccctggaagccggcgatccaggcttcaacggcggcctgctgagaggaggcgccggcgcccgagaagttgccggagaccggggtggacttggaagtggaatcggaggaggagctgttgtcggtcgtggtggcggtgttatcgccgcaggcggccacggaagcgagcatcacaatgccggacagagcggcaatggagcgaatgaggatgttcttctgcatgattattacttaatccctctatcaactattcgcgggcggctcagcgctgcccggtcaattcatgacaactacaagcgtattggtggtttcaagggcccaaaaccgaaatcagtaaacagaagatgaacacttggatgtttgtgggctacgttgaggctacgtagtttttggagtggactcgcctgcggcgagcccacaatccacaacaaaaaaggcggcccgaaggccgccttccatttactccgcgggagtatcgatcttgtatccgagaccgcgcacggtagtcagatacttggggtgcgccggatcttcctcgatcttggagcgcacgcgcttgacatgcacgtcgagcgtcttggtgtcgcccacataatccgaaccccagatgcggtcgatcagctggtgacgcgtcatcacacggcccttgttctgcatcaggtattcgagcagttcgaattccttgagcgggaagaacacggtttcgccgcgtacggtgacctgatgctggcctacctgcatggcgatatcgccgcacaccagcggaatatcgtcatccacagtgccggaagcctgggccgtggcctgattgcgacgcatcacggcacggatgcgggccagcagctcacggaaagagtacggcttggtcacataatcgtccgcaccaatctcaaggccaacgaccttatcgatttcggcgctcttggcggtgagcataataatcggcacacggctctgctcacgaatgcgacggcacagtgcagtgccgtcaatgcccggcagcatcaaatcaagcagcaccaaatcgatgccgcccttggtgaacagttccagaccttcctcgccagtggcggcggcggacacgtcgtacccctcgcgtgtgagctggtataccagcggctcgcgataggattcctcgtcttcgacgataagaatgcgtgccatagtagcctttcttgggtatgttcccgtgcgcataggcgcaaagttttccgatactatcgtaaccatttgttctccgttagcctgctgtttcctgaaagtacgtaattgcgtaattgtgctacgcacggtatgcgcacctcgcccactgtgtgattgtgcggcaatggaatggcaccatatcgggcaccaaccaaggccctacgcttgtgtcgactcgtccggccgggcctcgtcgtcatcctcatccggggcggccggcagctcgatggtgaacgtcgacccctcccccgtacgcgaccagaccgaaatccgaccgccgttctcctgcacgcagtgcttggtgatggccaagccgagtcccgaaccgccggtctcgcgcgaacgggccgggtcgacccggtagaaccgctcgaaaatgcggtccagtgatttggcggggatgccgatgccctgatcgaccacgcgaatggtgactttgccatcgcgctcccccacgccgaccgccacagtggtgtgttcgggcgagtaatggatggcgttctctacgaggttcttgacggcggtttgcatggcctctttgtcggccttgatcatcggaccgctcgtggccgggctgcctgattcttccaaggaaccttcgccatcggccagctcctcgaccttcgtgggcactgactgtccgttgacactcagtcgaatatccacatggcgggagtcggcttgggtctgattggcggcgatggcagcgcgtgccacatccagcgcggaaatgcgccgcgcatcaatcacactttgcgggctttgggctttctgcaagtcgataagatgatgtaccagttcggtcaggcgcgcggattccttggagatacggccggaaaaataccgtacggcgtccggatcatcggcggcgtcggtcacggtttcggccagtagcgagatggcaccggccggagtcttgagttcgtgcgaaacgttggtcacaaagtcacggcgaacggcctcgaaacggcgctgctcggacatgtcgttgatgaagatggcgtacaggtcatcgccgatatcgccaatgcgcacacgcaaatacagcatgttggacgggcgtgactggccggcctccagtcctcggccattagaggacggataggaattgcgattgaccggcagctgaacctcacgctcacgcacgccaccgtcggcggcggcctgagtgaggatgtcctcgacttcgcgcgagttgagtcggtcgccggagaccaggccgaatggcactgagccggggcttgaatattggaccaagccgttgcggtcggtaacaatcagggcttcgggcaggacttcaatcaggcgacgctcggtggggcgcacgggcgcatcatcaccgaatagagaacgcgtatcctcgtcgccggacaggtcctgttcggcggcgagccgacctgaaacgcggcctttgttgtaggcgatgacggcaacccacgccagtatcagcgcggcgagcaccacaatcacgacgatctgccagatatccatgatttccagagtaaaacgtgcaaggcgtagtgagatgcccaaactacgtaagttcgtctattgttcatttttggtgggacgacataacaaaatgctcccgctggcgggagctgtcgaacgcagtgagactgagggtggtcaaagaaccgaaatcccattggccaccctcagtccgctttcgtggacagctcccgccagcgggagcataatatggggagctctatttacagctcgtagtccttgtccttgctttccttaatcaggaacagagcgagcagagcgagggcggccatgatggccatgtaccagcccacaccggcaacgccgaacttggaggcgaccagggcctgggcgatggtcggagcgaatgcgccaccgaagatggcggcgaggttgtagctcaggccggcgccggagtaacgcacgtgcaccgggaacagctcaggcaggtaggcgccgcaggggccgaacaaaccacccatgatcatgaagccgacgcacaggaagatcatgatatgggcggcggagtgcacgagcagcatcggcacgaagaagctgaacaccaaggcggcggcggtcacggcaatcatgaccttcttgcggcccaccttgtcggcgtacacgcaggagaccacgatgaagatggcgaagaacaccacggagcacatctgcatgagcaggtactcgccctgctggaagcccaagcccttgacgccgtaggccagcgaccaagtgccgagtacgtagaacagggtataggtgatacccatggctacggtgccgagcacgacttccttccagtacggcagcaggtcgcgcagcgggtgcttggaggtgcgcttctcttcagtggccttctggaacactggggtctcagacatgcgggcacgcacgtacaggccaatgatcaccagcacggcggagcacaggaacgggatacgccagccgaaggcaatcatctgttccttgctcaggttggattcgagtagcaggttcaggccgtaagcgcagaagaagccaatcggggcgccaaggttcgggaaggaaccgtacagggcgcgcttgtcggccggagcgttttcagtggcgaccagcgcggcaccggaccattcgccggcgaggcccacgccctggcaggcacggcagatgcacagaatcacgacggaccatgcgccaatctgctcataaccgggcaggcagccgaccaggaaggtggcgatacccatggtcatcagggcgataaccagcgtcttcttacggccgagcttgtcaccgaagtggccgaacagcatggagccgaacggacgggcgaggaacgaaacggcgaaggtcacgaaggccatcagcgtggcgagggtctggttggacttggcgacgtccgtgaagaagatcatgccgaagtagctagcagcggcaatggaatagcagtagttatcgtagaattcgatggccgtaccgaccatggaagcggcgatgatctcaggaaccgaatccttcttcaccggtttggtcacagccgcggttgcgcttgcagtcattttttctctcctcatgctgcagataaaccccagtgcagcgtgcgcattgtgtattcaatgcttcgcgacggtgttgtcgtcgcttaacgaattgagcacagcgaccggcatgcgggagaagaactggtacggcttgtggccccagcgatgaaccccgcacatcgctgtgccgaacaccgagtatggctcaggttataagcaatagtttgaaaacgctcatattgtggtcatcatacccaaaacgtggatggtgagatgggccagcccgccgactacaggcgcttgacgatgtcgacagccagacgggcggcggtatcggcgtactcggagatgtcgaactccttgaatacctcgtaatcggtgtcggcgttgtcggaaagggcacgaatcaccagtgccggcacgtcattgcgggcggcgacctgtgccacggcggcgccttccatctccacagcgtcagccccggtgagtcggatgacctcctcgaccttttggggcgtgtccacgaagtagttgccagaggcgatgatgccggtgatgtgggtaatgcccgcattggcaagcgcctcgtcggcaacttccagcagacggtcatcagagtggaattcctccaccggagtgtccgcagtgccgggcttccactggcctacgagccgcatgtcagtgtcgaggtagcgcagggtgccgccgagcaccacgtcgttgatgtgcaggtgggtgttgaggttgccggcgatgccgctgaaaatcacgacgtccggggcgaactcgtcaatcagcagctgcgtggtggcggccgcattgaccagtcccatgccgcctaccgttgcggcaaccttgatgacgtcagaaccgaaggagtcgaccgtgccggacacgatgtcaaggctgcccttggcggtgtgcgtcacatgcgtgagcgatttggcgatcagtgccacttcctcatccaatgcgccaataatagctacagttttcatacccatatgtaagttcctttcacaacgctttcgactcccatgtcaggggaggtggccgccgaatggcaggctgaggggtagagacgtttcgttgcattgctccccccgagagagccgatgacgcaactcagtgccaacgccgcgtggccacggcttccgcaagctcgcgcagcaaggcctcggtttcttcccagctgatgcacttgtcggtaatcgacttgccatagaccagctgatcaagcggcgcggccttctgattgcccccttcaataaagctttccatcatgatgccggtaataccctgttcgccagctgcaattctgctggcaatattgcgcacgacttcggcctgacgatgctcgtccttgccggagttaccgtgcgagcaatcaacaatcagaccgtgcgaggctgcggattcggcgggcatttcggcgcgtacgtcttccatggctttggccacggactcggcatcgtagttcgggccgtgaatcgagccgcgcaacaccacatggcagtccgggttgccaagggtctcgaccgcgcaggcacgccccagatggtcaatgccgaagaacgtgtgctgctgagcagcggcgaagcaaccgttgaccgctgccttcaccgagccgtcagtggcgttcttgaagccgaccggcatggaaagcccgctggccaattggcggtggatctggctttccgtgttgcgcgcaccaatggcgccccaactcaccgcgtccgagatgaactgcgggctggtgggctccagaaattccgtggcggccgccaatccttccttcagcacaccaagcaaggttttgcgagcaagcaacaggcctttgcgaatattgtggctgccatcaatatccgggtcgttgatcaggcccttccagccgatggtggtgcgcggcttctcgaagtacacgcgcatgacgatgagcagctgctcaccgagctcgtccttcagcttggccaatcggtgcgcgtagtccagcgcggccttcgggtcatgaaccgaacaggggccgacgatgaccaacaacctgtcgtcttggccgtacaggcacgcgcgaatctcatcacgcgagtaggcgacgatttcctgagcctgatcggtcagcgggagttcagcgagcacttgcgcgggcgtgggcagtggctccagctccaatacgcggcggttgatgatgcgactgacacccacctgatcttcccagcgcggcacatcagtggcaacgagcgggttcttcccctcccccatcgcctgacgaatggcgcgaagctcttccggggtgttcaacggctgcggaccgacttgcaacggatgcagcgaatgtgctgcttcctcctgctgctgcataacatctctccttggatcagtatctttcccaaggataaggtgtcacgggaacaaactgacatgaccaccgttattggcaaaaaatgctcactgagtgggtctcagtgagcatttttacaaagacaaagctatttagccgagctgcgagcggtgacggcgtcggctagggtgtgcagcagctcgttggtgcgttcccacggcacgcaagagtcggtgacggactgaccgtagaccaactggtcgagcggggccggcttttggtgaccgccgaccaagaagctttccatcattacgccggtgatgccttgttcgccgtgcgccagacgctcagcgatctcttcgatgacttcggcttcgcggttttcgtctttgccgcagttgccgtgggcggcatcgatgacgaggccatgctggctcgggccggacgctttggaaaccttgaggtcttccagagcttgacgcacggattcggcatcgtagttcgggccgtggctggaaccgcgcagaaccagatggcaatccgggttgcctttggtttcggcggaaatcacgcgaccgtccaagttaatggacaggaagtgatgctcgaagccggccgcgaagcaggaatcggcggcggccttgatggagccgtcggtggagttcttgaagcccaccggcatggacaggccactggccagttcgcggtggacttgggattcggtgttacgcgcgccgatggcaccccagctgatcgcgtcgcagatgtactgcggggtgatggggtcaagccattcggtggcggcgggcaggccgaggctcagcacgtcggtgagcaccttgcgggccagccacatgcccttacgaatattgaagcgaccgtccagatcggggtcgttgatgaggcctttccagccgatggtggtgcgtggcttctcgaagtacacgcgcatcacgatcacgagtcggtcttccagctcgcgcttgacggcagccagcttttctgcgtactcgtgcgcggccttcgggtcgtggattgagcaggggcccacgatgacgagcagtcggtcgtcgcggccgttgagcacatcgcggatttcctgccgcgagtggagcacgagctcgctcatctcatcggtgagcggctgctccctgaggaaggcacgcggcgcgggaatggggtcaagctgacgaatgttgacatcgacggtctcgggaaagacggcctgttcccccaaacgacgttcatcctcggaactatccggaccacgtagtgctgccattgctcgactcctttccttgtatacgtaccgtcggtatggcgctatagacgcaaaagcccaactatagcagtctgttacggggactgcttgttgggccggcggttatggactttgggtgaactcgcctgcgtgaactcgcctgcgtggactcgcctgcggcgatgctgtgttgttgtgcggcctgcgaccgcggcctctccccccgtcagcggcttcgcgctgacagagggagagaccctagcagccggcaggctgcgaaaaaacacagcatcgtccgtcaggccgattccgggaggctggcgaagtcaggccaaggcgcccatcgggtcccatgcggggagcatggtggctggctcttcgagggccttctggtattcctccggcaacagggccttcgggacggctacctcgtagacgtattcggtgaaccagtcgtcggacatggtgaagtagcccttgtcggcgatcttggtgccccaagagttctccactcgccagcggcgggtggtgccgtcgtcggccacgtcaacgccggcgaaagccatggcgtggttcatggcggagtcaccgaagcgcacgcgggcttccttgtccaaatcgaagtccacgtcgtacacgcggccgtactcgaacaggtcggtggcccaagcgccgttctcacggtccatgaacgggtggcagtcggcaccgaaccataccgggatgccctgctcaacgagaatctgcttgacacagtccttcatgaactggtttggcacgttgaggtactcggtggcgtcgccgccagccacattgccgaggtgctcgatgccgatcttcttgcccttggcgtgctcggtgcgcggatcatccaccaggcacacgtagtcctcaagaccagccggacccacgtacttcttccagaactcaaccggcgtaatctcgccgtcgcggtggaattcgccatccttgtcggtccattcccagtcgaaggagaccggcggctcgcccaggtggatggtcagaatacggtggccggcagcagtggcgtcggcaataatcgcctcgaccttggaggcatcgccgtcagcggcgtacatgtgcgccacggcggtgtgcagcatgtggcgcagctgggtgttcatttcaccggtgttcttggaggattcggtctccgggaacaggtccttgggcacagcgccgtacttcttgtacacgttcatggccatggtccactggccgccatcgcccatcacgtcggcgagcaggtgctgcatcaggcgggagtcggaaggctctccggcagccaccagagcggccacatccttaaggaagtagttgacgcgctccagcttgtcgtagtacatcgcatagttctgggagaactcgaactccttcaagttcatgttcttcttggccacgaaacgggccacgttcagggagctgaacagccagcagcggccggagcgatcctgatgggtggcttcgccattgtcaacgatggtggagaaacggcgctgcatcagacgagcgcggtcataattgcgagccaccttgtcgatgccggcggcggtcaccgcgttcatggccagacggttggtgccgctctgtgcgaaatcgccgcgcagggtattcaatgcttcgccggtcagaggcgtcaattcactcatgtcatactccttctgtgatggtgcgcttgtggcgcagatccaaacgaatacggcacctggctcgaaagcgcaggtgccgtaattcttaccgctagtagtctaatcgaaggcctgtcattcgccgttctgctcagatacggctggattctcctgagtcggggcctccggttcgccctgtgtctggtgctcggacggctcagacgattcggactgctcattctgcgcagctgaatcagccgaatcagccggtgccgcatctgtctcattgtgatcgtcggcagccgactcgtttccgctcaactcacccggctgatcatcggcctcgttgtgtacaggcttgacttccgggacgggcgcgaccaccggcaatgacgccacggcagcggcttcctgactctgaccagaggccgccgcattaccaccgaaagcgaatccggagaacgcctgcgagaacatagaacgcagttccgaaacacgctgggtgatgacggactcgcgttcctgcagatcggcgatgcgcttggacagaccgtcaagctcgctttgggcggcggcacgacgctcctcgatctgcgcatcggcttcctcgcccgccttatgcacgattgcggcggcctggatgtccgcctcctcgcgcttggacgcggcatatgaatcggcttggtcgcgagtgttcttggcctggccgaccaactcatcggcttcccgcttggccgccacacgacgctcttcgaggtgctgcaggagttcgttgaccttcttcgtggcctcatcctgctgagcggcgatgtcgtgacggatctgctcgacttcggcgttgacctggctcatcgtgctggtgcgcttgacctcggcctcatcagtgatttcctgacccttggtcttggccgcatcaatgatttcgctggccttgcgctgggcttcggtcatcatcttggacacttgctcgcgcacgtcggcgagcttcttgttggcctcggcgagcgccgcctcaatctgatcgttggaatcggacttaagcttggtgatctcctcattggcgcttttgcgcattgcggcgacctgctgggtagcttccgccttcatatcggcgatttcgcgctcttgggtggagcgttcggaagccatcttcttggtgtgctcttcgcgcgcgttgctgagctcaagctcgacggtctgacgctgttcggtgatggtcttggcggtttcggagcgcagttgtgcggcgtcctcgttggcggaggtggtcactgattcggcctgattgttggcgttcgtcagaatcgaggcggccttggcattggcgtcgtcaacaatatgctgggcatccagcttggcgttgttgatcagtgtttcggcctgcgcctgagccgtggtacggatggaggacgcgtcctgcttggcgcgttccagcagttcggtactcgtctgttcggcggaggcaagcatctgctgggcgttcgctcccaaggaagcgaagctgttgccttccggcttcttgttcttctcttcctgaagctgggcctgcagttgcagaatacggtcgtcatccgccgcaatctgctcacgcatgctggccaacgtctgctgcgcacgcttcacactctcctgagtagcgtcgaaggcagcatcaaccttctccttgtcatatcctcgcagcaccaccgggaaacgatccaccatcgctgtttattcctttcgcacacgcataaagctcttggcacatccttgaagcactgtagcgcatcgcactagcgctgggcgttgagtgacgcgcaatcgttacaatgcgtgcgaaccatgttctattccggcgtggcgcgcagcgtgctaggcgatgaggatgccggagctggagggcttgagatagtagcgcacggcttcgcgcaccacatcacggccagcggcgatctgctggtcgagtggcagaccatgctggctggaatccaccggcacgaccggcgggaagctgacgaatccgcccagcacccgctcctgggtggcggtccagttgagcaagttgtagaacagcgaattacatacgaacgtgcctgcgtccgagctcagggtggccggaatcgaatcgtccgtgaaatcattcaggatcgagcgcaacggcaggcgggtccaataggcggccgggccattgggatcgatgggttcgcggcgtggggtcacgttgtccgcgtccggcctgatcgcgtccatcaggttggtggcgcatcgttcaagcatcacgcctcgggctgcgtgcttgagcccggtggcgatgacgatattgggcttggtggcctcaatcgtctctttcagcgtgggccaggctttggcgaagctcaccgggatgctgacggcatggacggtgacggcgacctgctccaacggatcgtccggagcagaggagacgcccaacccctgctcggcgatggccttgggcacttcgacggcgggattgacctccacgccgtcatagtggtcgaagccggagatcacaacattgagttcacgcataatgccagtctagcgatgcatctggccggccgcttgggccagcagggcgtgcatgcgggcgcgggcctcttccttgggatcacgaccgagaatctcctcggcgatacgctcagctgtgggaatatcctccagcgtggtgatcttcaggttggtttccgcaccggagacaatggcgacgggttcatcaggcagataatcgaccacaacgcgcgtgtcgtcggtgggatggaagtccgggtcggcggcagccagatcgtaagcgtgacgaatcgtcgcgaagcggaaggattgcggggtctgcgcgcggaaggtgttcgggcggtccggcaccgacttgaccactttcaaatcgcccagatcctcggtcaacagcacggtgtcggttgaggtgtaggccacggtcgcggccgtgaactggtcgagcgcatcaatcgaaccgtcgatggcggactgttccacgaacggacggacggcgtcatggatcagaatcttggcatcgtccggaatgccagccgtagccagcatgtcgagcgcggcggcggtactgtccacacgttcgtcaccgccgtcaatgatgacgcggaccttggtgtagcccatctcgccaaccaacgtttccacttcaccgcgcaccttgggattgaccaccaccacgatgtcgctgacgcgatcgcaatgttcaaaggcatcaatgctccagcacacgatgggcttgccgcccacggagacaagctgcttgggattgtcggggtcgaagcgcgtaccgaagccggcggccagcaccacggccaccaccggcacggtttgtgccggtttggcgccctgagcgggggccggctggacggtaggcgtctcgacgggggtatcgaaatctctctcagtcataggcaccaccgtagggtgagggctggccgtccgtgaactgcatcacatcttctccacggaatgtgcccgcattctccgtttagtcacgcacgatgagggcaaggaggcggccttcgtgtgttttgttggcgagcgcggcgcggcggtgcgagtaccacagtgggttttcgagcgtgcacatgctgtggctgatgttgtcgatgcgctccgcgagctcggccgggccttcgccgtccgtgcggcacagttcggcgagttccgggtcttcctcaaggtactgggtggcggcgtgcacgcgcggcatcgaatcgaccacctggtgtacgccggcgaaggcgaggtcgatcatcgcggcttcggcgatgtcgatgccggcaccaccgaaacgggtcttcgtcttggtcagcgggaagcgcttgatgaactggtcggcgatctcgtcgcccacttcatagcagtcgccgcagatgcgcgggccgagtgtggccacgatgttcgccggatcggcacccttgctcttcatcaggtctaccgtggcgccgatcacaccacgctccagaccacgacggccgcagtgggccgcaccgatgatgccggtgaccgggtcgcccagcagcaccggcaggcagtcggccgcgaacatgcctagggcgatgccggattgtgcggtgacctggccgtccgcctcgatgacgtgcggagtgtcagtctcaccatgtgtgccggacacgtcgaagccgaagggggtgttgatgacgaacgagtcgtccacgtccacagccacgccggaatgtacttgggagaccagcgataggcgggcttgcaccgcttcggcgagtgcgatgcggttcgacagcacggcctcaggttcgtcgccggacttgccgccgaggttcaggttgccgtaatcgccggcgctcaggccgcccagtcgcgtggtgtacaccaccttgatgccgggggccagtgcgatggggatggtcaccggaatagggcgaccggctttatcggtagagctgatgctgttggaatcgaggatttcttcgctgtattcaggcataaggcattctttcttgggtgcgggcggtgttcatgattcccatgaccacccccagtcagcgggggcggagtggtaggttattcggctttgagggtgggctttttggtgcgcgagcggatggcggcgttgatgggcacctggtgcgggcagggcatcgagaacacgtgcgccggattattgatggcgggtactggcgcgccatcggcatcgcgcaggccggtttccggcacggtaaagaccaatggtctctcgccaggcagcaggaattcaacctgttgacctggctcgatcttgttacggctcatcagcgtgacacgtccgccttcgtccgcgctccagctcagcacttcgcccactaccagccatgagcggaagtaggcggagcggtcggtgttctgtgtgaccttgtgctccgggtaatagaagccggtggagtagtcgcggtgggccaccttgtcggtttcctcgagcagccattcgggcagttcgacgtgcggggccgggcgaacggccgcatgcttccaatcggtctcgatctgttcgaccgcggtgttggacttgcggcgcgtggagcgggcgtgggagctcatgccgtcggggtcgacggcggtgccggccgacgtaccagaggcagttgagtcggcggcatcagcaaccgtcacgcggtcacgttctgcggcaaccgagccggtgaccgaatcggcaaccgcagtatcagagccacggtcatatccctcatcggccacaccggcgaacgcggcatcggcattgcgcatcacttgatcttcggttccttggccaaaatcggggtcgcccgggcgaatcacacggtcacggaaaggcttcagaacattgccatcagcgtcttcaaaaccgcgttgaatcatgtattcattaaccgcggttttgtaggcgttggtcatggcggcgatatagtaggcgcttttcgcgcggccttcgattttgaggctggtggcaccggagtcaatcaaatcatccaagtgcctcagcatattcatgtcctgcgaattgaacaggtaggcgccgttctcggtctgctcgatcgggaagtactggccggggcgcttctcttccacgatcgaatacttccagcggcatggctgcgcgcattcgccatgattgccatcacgcccggtcagatagttggagaacaggcaacggccggagaacgccatgcacatcgcgccatgcacgaagcattcgatgtcgaggtcaccgggaatgttggcgcgaatatcacgcacggcctgcaagtccatctcgcgggccaacaccacacggcgagcgccaagctcatagaaggcgttcgcagcttggtaattggtgacgccggcctgcgtggagacatgcaattccaggttcggagccacttggcgggccatcatcatcacgccgatgtcagagacgatcagcgcgtccacgccggtgtccttgagctggccgacgtactcgcgcatggcttcgatctcgttgttgcgcggcagcacgttgcaggtcacgtacacgcgggcgccgcgttcatgggcgtagcgcgagccttcctcaaagtcctcaagacttaggtttttgggggccgatcgcatgccgaaggctttgccgccgcagtagacggcgtcggcaccataatcgaccgcggttttcaggcccctcaggttgccggccggggacaacacttcgggctttttgcgggtggggaggttcatcgtcgtattcatcaccgcaatagtgtagtggtggccgtgtaatgcgggcggggctaccgttaggctggataacatgaagatcgatatcgtgagcgtgttccccgaatactttgaggtgatgaacctcagcctgatgggcaaagcccaggccaagggattgttggagatcaaagcgcacaacctgcgcgactggacccacgatgtgcatcattcggtggatgatacgccagtcggcggcggggccggcatggtgatgaagcccgaggtgtggagcgaatgcctggacgaactgctgggattctcgcggccgtctgaatcctccgccctatccggcacaccggtgctcatcttcccgaacccatcggccccgttgtttacccaacgcgacgccaccgagctcagccatgccgaccatctgctgttcggctgcggccggtatgagggctacgatgcgcgcatcccggactactaccgctcccagggcgtcgacgtacgcgaatattcgatcggcgactatgtgctgaacggtggcgaagtggcggtgtcggtgatgcttgaggccatcacccgcctgatgcccggattcatgggcaacccagattcgattgtcgaggaatcctacaccggcgaggacgcactgcttgaacatcgccagtacaccaagccggccgtgtggcgtggtattgcggtgccggacgtgctgttgtccggcgaccacggcaaggtggaccgttttcgccgcgacgaagcgctggcccgcaccgccgagatccggccagaccttatcgcggcactggattgcaaggcgctggataaggccgaccgcaagaccctgatggccttgggctgggaggtctccgccacccatccgcgccggctcgccgattaattcaccacacggtgggagattcactacgcggcggaatcgtcggaacgctctatatccgagtcgtcatccgcgggctcgatgtagaagacggcggtttcgccgtagttgcggctttcagtgatttgccagccttcgggggcggtgggggtgtcggagcgtaccgagcgttcgagcataatcacggtgttctcgttggtggcgctgcccaccgccagattggccaacaactgattgcattcagcggtctcataggcgtagggcggatcaatgaatatcacgtcaaaggattcaccaaagccgccagccacttgctcggcctttttggtgaacacacgggccttgagcgaggcatcccacgaacgattcttctgtaactgcgacaaggtcttggtaatcagcgccgccgcaggccgggaactttccacggccacgagttctcgcgcgccacggctcagcgcttcgatgcccaacgcaccagtaccggcgaacaggtccagtacacgggcatcatccagcactccccatgagtcgaggtgcgagaaaatcgcctctttggtgcgatccgtggtaggccgggtacccgttttcggcgtagcaagcgccacacccttgaatcgtccagaaattacacgcatagctttcactgtacaggttcatctgcgcataccaatcgtggaaaatggcggaatctcctttcccatcaaaaaaagattgcggaccgtcctcctctattaggaaagacggtccgcaacatttagtaacggatataacgcaatacgttaacgccggatggttcccttgaatggcttatccggagacaatgcgacacgtcccatatcagtccccagaacgttcagcgtgatctccgtaggcttcgaacagcgcaacgtatattccactgtctgatccgtccatgtcgcatccacttggattccacctcttgcgcggagcgcatggaagcttccctcatgccaatcctccggcagggccggaagaacgcgaatccagccatcgtggctttggacaagcatctccgacaaggccgccgggaatccaaggttcccgtcgatctggaacggcgggtgggcgcataatccgctgtcgtacactcctccgcccagcagattggtttcagcgttcgcatccaccggccgtaggaacatgcctatgattcgtttggcgtgttccgcatcacgcagacgagcccacatgatcatgcgccatacgatgctccaaccggaaccatcatcgccacgcacttcgagggattttctcgcggcttcctccagacgcggagtcttagacgtgatgcctgcaccaggatgcagttcgtaaaggtgggacagatggcggtgctgtggatcggattcgatgaattcgtcgttccattcaaggactcttccatcagctcccaatcgcgtttcagccagttgggaacggacggattccgcttcacggaccagagcgctgtcctcttcgtcaaggttttccaaatcgtgagaagcctgaatcaaatcatcaagcagattacgcacgatggccgtggcattctcactgctttgcgcaacggataccggttctccattcaccaggaaacagttctccggtgatgttgcaggggacggggccagtccatgctctgtctccgataggaaatccatgcagaatcgcgcgttgtcccgcatgattggccagatgcgggacaggtacgatgcatcctggttgaacagatattcatcgaacaggttccggcacatccatgcctggccgaacggccagaacgaccacatcggatcgccgtttgctggaagagccctacgccagagatcgacattatggaagacagccgatcctcggcagccgagaatcctgtcagcggcgtcgtgccccggtgccagcagctcctcattcatggagacgagcggctcgatgagctccttgagcgcgcaggggccggtcatccaatagttcatctcgacgttgatgttcgtcgtgtaggcgctgtaccagttcgggaaatccttatggttccaaatcccctgcagattcgcaggttgggtgtgtggcctggacgaggagataagcagatatcggccgaaatcgaacatcgcctccgccagcatctccagacgatgcggttcctttttctcatccgagcgaaggatcaccgagaacggtagttccgtatcgtcatcatgggctgaaccgagatggatggccaccctgtcgaaatatctgcggtagtccgcgatatggcggtcgagcatggtctgcaggtcagtcgaccactcgtcaatggttttctccagatggtcggcgataaccgtcatgcttcgttccggctgctggtcgcttcccttgaatccgctcatactgcggaagcggagcgataatccggtgatgttcgaacattgcagactgttgtcccccacattgatgccgccacctgtgacggtaagggagaatgcaccggcgtacgccattccagttccgtcctggtcatcttcccaaggatgttcggaagggtaaggcaggagcccgatgttgagtccaggcatccggcccatgacgatgagggtggcccgatggccgtcggataccgcttccaacgaggcgcgtgattgcttgaggaaagtgccggagacactgacgttcacatcaatcggcgcatccgatgacattctgtagaccaacaggtcgtcgggctcgctgcaccatgcgtcgacatgaacgttggcatcacccatctggaatgtttcaccggcgagcgcccttgcaagatccagctggcgtttcatgctctcacggccgtctgcaggggtcgagtactgaatacgggccgttccgaacggctcgtaaatctgttcgtccttctcctgcagtgtggcttccttgatgattcgcgtggcggcggtgtaatcgtcgccggatgccgcctgacgtgccttggccacaatttccggcgtcactggtgaggtttccgcgtgtggatatccagaccaaagggtgtcatcgttgagatacagcacgtcggtttccggttcggaacacaggaccgctcccatgcgtccgttgccgagcgggatgccttcttcccagcacgaagagattccatcgaatgtgagtttcatggtgatatacccgccttatatccgcaccgcagccgcacggctgatcattggcgtgagccttgaatcatccacatgaagggtaaccgaagatacttcgacatcgtcgaaacggagtatcctgcggtatcccactgtgccggactgtccgagtacacactcagtgccgtcagatagcacgccagtgacgcgcatatgttcgatgcgctgcccacactctatggcctcttcgaccacaacggcattgatcgtcgtcagttgcgggaaagtgagcgtgacagcaggggccacgtcatcggtgctaggagaccaatacgtgtcttgattcccatcaataagtcgcattgcagcttcgttcgcgctactggtcttgacttcgcaacaagccgaagccaatgctttgcggaattcattgatacggcttcccaaccccttgagtgactccacatccggttctgcgaacagtccttctggggaaggaggaatattgagcagaagcgacgaattgccgccgactgcggaaagccagaggtcaaaaagctgatctgcgttcatgaccttgtcgtcttcatacttgtggtagaaccatccagggcgaatggaggtatcgacctcagccggataccaacagacgtcatccccgtatccggaaaccgcctcacggcttccaaggtcgtcatcttgagagcgaaccgtagaggcaaaggacgcatcgtcctcctgctgtgaattttccatagtcagctccgccgagcgcagtcgtcggggcacgacgctccattcgttgtcacgcacatgtccggcttcatttccagcccaacgaacgtcgggaccgcatacggatatcaccgcattgggttgaagcgaacgaatgacgttgtagtaacgatcccagtcgtaatactgagtcttgccgttcttgccctcaccattggcaccatccagccatacagagaaaatcggtccgtactgggtgagcaactcagtcaattgtccaacgtagaaatcgtcatatgccttgcctttgccataggaatcttcggttcgatcccacggagacaggtatacgccgaacttcagtccatgacgtctggctgactcactgacctcacgaacgagatcccctttcccgcccctccatggcgaggcggcaatggtatgctgcgtgtaacgcgatggccacaggcagaatccatcatgatgcttgcatgtcaagatgacaccagtcattccaccagccaccagcgcatccatccactgttccacatctacattctgtggatcgaacagcgccggatcctcatgcccaagaccccattccctgtctgtcatggtattcatgccgaagtgtatgaaggcatacatttccatgcgctgccaggcaagctggcgcgacgatgggcgcacgtttgcgagatagttcaggttgatgcccgcatctgcaggattgctcattatattgctcctattcggttattagcgaatgacgccttttctgatgatgatgttcgcatactgtgactgctcacctgttgcaacgatgcagtaggctttttcggcctcatcataaaaggcgaaccgttccagcatgccaatagccgtttgcctgtcaggctcatgcttggcgattacctgacgataccgatcccatatcggggtgtcgacggcgtctccaggaaccttatccatcaaaaacaccggatgctccgtatattgatccaacggtataagctgcatcactgcatcgagaagtggttcgatgggctgaccgtcatatctgatcacatgggaatgaatccccaatgattcagcgggaaagtgggcgtccgcgagaactatagtatcgccatggcccatttcactgagaatcttcaataaatcgggctgtatgatcgacggtatccctttcagcatagctgctcctgcttgtcttcagacttatttgattgttacttgcctagaatgctctggatattgcggtactgttcatcggtcagctgcacggcgggttcatggacggacgtgtcgattggcagtcccttcgccttgaccgcgcccttgatggcgctgatgaacaggtcggcagtgtcgtacaggcgcatcagataggaaatgcgctcagccgacttgatggccgtggcgtaatcaccggactgccatgcacgatgcaggctgacgaaagtctccggctccacattggtcaatccgcacagcacgccattgccgccgctgattcggttgacggtgtagtactcgtcgaatccggacagcacgctgaacgatggattcaccttacgaacggcagcgatgaccttcctggtgtggctgatggtgtcgacggtgtctttgatgccgatgatgttctggttctccgctgcgagatccgccaccagctcaggggtaaggtcgttgcccgtcctggctgggaagttgtacagaatgaccggcagcgtcgtcgccttggccaccgcagagaagtagcgcttcgcgcaatccggtgatggtccgaaatagtacggggatactgcaaccaatgcatcggctccggctgtttcgctttccgccgccaatgttctcacattgtccaagttggtgtctcccacgccaacgagcaccttcatgcgtccagcgactttcgagacggcgaaacgcaccgcttctgccttcgtcttgacgtcgatggcgtagaattctccgatactgccgaacagcaacacaccgtcgatgcctgcgtcgatgagatgatcgaggtgcttgccccaattatcgtagtcaatggtcccatccgcgttcgtgatggtgatggaagggcagaacacgccttcgaattgggcgttgcaagtcatgattttttcctttcgacgatatggtaggcgttccgcgtgcggtggcgaatatgtccgcgggccgagcggtgttggagcgatgaatcgaaaacaggggatccggacgcgcgaacgcgaaccgatgatcccccgtgcggtatctcctagccgagtgcccgatcgaggtggacgtatccgccgtcggggaagacccattgtccggtggtgtgcgacgacctgtcggacagcaggaacgccacggtgtcggcgatctccgacgtctcggtcatgcggtggccgagcgggatcttgctggtgatcttctcaagctgcgcgcgctgcgcctgctcgtcgccgaacgtcttgatccactgtgcgtacagcggtgtccatgcctcggccacaacgacggcattgacccggacctcgtccggggcgagggcggcggcccattcgcgggtcagtcccagaatcgcgcccttcgcggcggcgtaggcgctggtcttgccctgaccggtcaatgcggtcttggaaccgatattgaccaccgagcccttgctggccttgagcgccggcacgcactgatggaccagctcgtagtagtgggtcaggttgccgtgaatcgactcctcgaactgacgccacgacgtggtctcgagcgcgaggttgtcatttcttccggcgttgttgaccacgccatcgatatggccgtgcttctccatgaccgacttgacgatgggggcgatgtcgtcggtgttgttcaggtcgatcagatacgtgtcatacgagtcggtgatccgttcaatgtcctgtcggaattcgtcgccggcgccgtcatcacggttcagcaccacaggaatggcgccctcctcggccaagcgcagcgttatgcccttgccgatgcctttgaagcctccggtgacaatgatcaccttgtctttaagatgcaggtccatctcaggtcctcccgaccggtcagtccttgtgcaggtacttcatgcattcgtcgatcttcatctccgtgccgttgcccggagtgagcggagcgacgtatcgtccgttcttgatgacggtcggatgcacgaagtattcatgctggttgtccacgtattcgacgacgcggtcctccatctcgccggagacggacacatagtcgaacatcgcgagctggctgacggcttcgcacaggccgacgccgcccgcgtgagggcagaccttgacgccgaacttcttggcgagcaggtattcgaggacgatctcctggggaccggcgactcgggtcgcgtcaatctgcatgaccttgaagctgccagcctgcaggtactgcttgtacatgactcggttctgcatctgttcgccggtggccaccggaatcggatcgatggccttctggattgcggcatgtccaagcacgtcatccgggcaggtcggttcctcaacccatgcgaggtcgtagtccttgaatttgccgatccattcgatggcctgcggcacatcccagacctggttggcgtcgacggcgatggcgatgtccgggccgaccgcttcacgggcgagcttgagcctgcgcaggtcatcctcgaggttctggccgaccttgagcttgatctgcttgaagcccatgacctcggtctcctgcttggccaggcggaccatcttctcgtcggaatagccgagccatccggcggcggtcgaatatcccggataaccgacttccttgaggtgggcgatgcgctccgccttgccttcctgggcggcgcgcaggatatcgatggcctcctgcggagtgagggcgtcggtcaggtaacggaagtcaagcgtcgcgacgagctcttcaggctccatctcggaaaggagcagccagagcggcttgccggcgcgcttggctttgaggtcccacagagccgaaagcacggcgccaatggccatatgctcgacgcccttctcagggccgagccagcgcagctgcgaatcgcgcacgaacagatcccacgcgagacgcatgttgtcgagcagttcctcgacgttacggccgataagggtttcagacatggagtcgatggctcggacgacgacatcattgccgcggccgatggtgaagacgaatccgttgccggaatcaccggcatccgtgctgatgacaacataggcggaggaataatccggatcagggttcatggcgtcggagccggagaaggtggccgacgtcgggaatcggaaatcataggtggtgactttggtaataacgctcacgatgcgcttccttctttggaaaatggttaatctcaaaaagggaggacggccattcggccgccctccctagcagtggcgggccggatgtcagtcggcgtcggtggtgaccttgaagccgttgtcctttgcgtaggtcttgagcttctgctgagccttggccatagcgccgaccatgtcaccgccaaccttcatttcaggagtgatgacatccttgtatacgactccaacctgagacatgaacggaagatactcccaatcagtattgaccttgtccatggactcgaagtagacggagttcacgtcagtattgacaaagtatccatctgtttccttcatattgcggatgtcttcgctatcttggtaagcggaagctgccatgaagtagttgccgtggttgttatcctgccaagactgaattgcttccttgtcggaatcgagccagttgatgaaggcaagggctgcagcctgcttgtccttagggcatgccgcggaaacactcatcatggagccgacggaagaagacttgaaatcatcggcagaatcgccgaatgcaggtggcagcgttacctgaatcagacccttaagagatggattctgtcccttgtaggagttgccttgccagttctgagaaatataagtggcataggtgccctcattcgtggcacggttgaacgcatcggtccagcctggagcggcctccatgaccccatcctgaaggcacttttgcaggaattcaatgaactccttggtagtgccagaagtcatgctcaagctgatgtcatcgacagaattgaccttccaagggcgcgcaccagccgaacgcagcaaatccgtaaagcaggagatatcgttattgatgaggacgcccatgtacttgctgggatcttccttgtgaagtttgacgccttcttcatagaattcctgccaagtggttggcaccttgagattatgctcgtcgagaatgtccttacgcacatacatggccaaaggagtggcgtcagtcggcacgccccacagaccaccagcataatgcacctggctccaagcggtctttgcataaagcttgctccacgccttttcgatatcatcgttggcgaaattcagcagagctccagaaatagcgtactgttcgaatcggtcagcactcatctgcacgacatccggaacatctttattggcagcaacgacattctggaacttggtgaaatggtcgcttgccgcgccggtgttggtgaatttaattttgatgtgcgggtacttcttctggaaagcttcaatcggtcctgccatctgcttcccggagaatccccatacgttcagctcgatttttttggaagtatcggtgagagcgttgttaatgtcttctacagtgactgcagttttagtgtccttggcaccagtacttgagccacaagccgcaacgctggctaccatagtaagcgccgccagcgcactgacgattttggtcatcttcttcatgattactcctttgtgtgtcatgaattactgtcttattgttgttcttcaaatggatgtggatgccgcacggtcattagagcaacgaatgggtgatcgccaataaccgtgcggcgaggattcactgcttgactgcaccagccgaaaggccagactgccagtacttctgcaggaacatgaatgcgatgatcaacggggcaactgcaatgaggcatccggtgacaatgtagttgttcggaatctgaccgtccgcggtaccttcggcacccatcttcaaccacatgttcaaaccgaccgtcatcgggtagtcgttggtgtccgagagcatgatcagcggcaggaagtagttgttccagacaccgaccagcgtgaacagcagtacggtgacgaaacctggagacagcagcgggaaggcaaccttccagaagatggtccacgaatttgcaccatcgagcttagccgcttcaaggagagaagtaggcaccgatgtctgcgcataaataatcatcaggtacagtccgaacggcgtggccagctgtggaataatcactgcccatggggtaccgaccagaccaatcttcgagtacatgaggaacagcgggacagagatgaccgtggccggaatggacatgaatgccaaggtgatcgccaacagactattacgtccggggaaccgcattgtggcaatggcgtagcctgcaagtgtagcgatgatagtggcaccaaatccggcgacaactgcatacatcactgtgttaagcaaccaccgtgcgtatgtaccatgctgatatgcaagagtttcctgaacattctgccagaacacattcttgtcatcgaaccacagaccaaaggagctaaacatgccctcgttggtctttgtcgcagagaagaacacccacagcaacggcacgagacagtagatgaccatcaggcccatgataatgtgcagcagccagttaagcacacgctgcttgccggtcagctttggagctgcctcacgctgctgcatacgcttatagcgttgactcgccttgagcgccagcttagcgtctctgcgctgcagcgacttggaacgtggttttgcgattgcttcactcatcacttgttctcccacttattgccaatgaccttcacgactgcgacaagacccataacgatgacaccaatcaccaaggagaccgctgcagcatagttgaggttctggccgttgaacgcaaggttatatgcgtagagattcggcgtgtagttactagtgatcacattcggcgcggaattcatcaagatgctcggttcgttgaacaactgaagcgtgccgatcaccgagaagagcacggtcatcataatggatcccttaatctgcggaatctttaccgaccatgcgatacgcagctcggatgcgccatcgatacgagcggattcgtacagctcgttcggaataccgatcagtgcagaataataaatcagcatgttgtagccaagagaacaccaagtgcagatgtttgcgatggcgaacagcatgagcttttcagaaagcatgttcggcgcagtggccccgatcatagacgcaatctggccgacaaggccatacttgtcgccatagatatatccccacatcagtgctgcgatgacgcctgggacggcataaggcaggaacagcaggattcgcggcactgcgatatggcggattctctgggaatccagaatgagcgccgccacaagggaaaggatcaaattgagaggaatctgaatcgccgcataaatcagcactcttctgaaaccgctccacagcgcttcatccttaaatgcagctatgaagttgtcgaagcctgcgaatgtggtgccgccaagaagggactgcttgaagaagctgagataaagcgcgtagaacatcgggatgatcatgccgaataggaagaccaccacgtatggaagacaatataacatgcctatgtactcgcgcttcggcttgcgcatcccggaagtatccggtttcgccgttgcatttgtcatagtttttctctttcttcttaacccgtctgaatgagcccgccaacaacatcgttgccattgccgtttcattcatcggtacgttcaatatacaaggttttacaaaaaagagcaaataaaacttcgttgcgcgtggcgaaattttctttatcttgttttttcgccttaaaagggctttattgcaacgatatgcacaaatcgtactcatcgaagaaacagcagccaatccatgtctacaacacccatttccgctatatagacagcaatacgccgataaaaaagctgttttagagtagcgaaaatttcgctactctatatataacgctttttttgcagcgtcgcatacgaaaagagaagagtcatggccacaatcaaaacaacaaacagaccgaaggtctccgacatcgcccaagcggcgggagtatcccccgctaccgtgtccaaggtcatcaacggccgtgatggagtctccgacgagacccgcgatagggtggaactgctcctcgaagaagccggattccgcaaaaaacttcccacaacaaaaaccatacggtcaatcgaactggtcgtcagcgaaatgaccaacaacggcaccgtggaaatggtcaaggagacagcttcatacgccagagattttggcctcggcatcaccgtaagctgcgccggaccggattccggagaatacgcaacaagaaacgaggccagcagctgcctccgtaacgccatcgaacgcaacccactaggcgtcatacttctcttatcgaatatctcatcggccgaggaatcgctgctgcagacgaggaacatcccatatgtgattgtcgatccggtcggccaggtctccgctgacgcattgggggtgggcattgataactggaccgggggaatgctcgccacgcaatatttcatatcattggggcatcgacgaatcgccgtcatcactggccctactaattcacagtcctcgcaggcgcgactgagcggatacatggcggcgctgcagaaaaacggcatcagcgcggatccacatctcatcaaggttggcgactacgtatctgacaaggcatacaaggcggcatgcgatctcctggaaatgagggagcaggaccgaccgaccgccatcttcgcgttcaacgatctcggcgcgatcaacgtctatcgcgccgcccgacagcacggcatcagtctgcccgaacaattatcgatcatcggtttcgacgatgtctatcctgcggcaagcatgtgtccatccctgacgaccatcaggcagccattcgacctcatcgccagacaatgcatcaacctgattctcgaagcgcgggaaggaaaggtggaacagaattacttcatttttcccacgcagcttgtcgaacgcgaaagctgcgtatcgccagcacgtccgtaactcagcaacggaacacagaatcagcttccacgaagcacccatgcatatgcaatccgtctctggcacaagcatttacttctgtttaccagatgaaaatacaatatcgtgcgattacggggggggcgcagccctagcctcagctggaggtcaggaaggtttcgttgcctcgggtgaagtcgaggacggcaccggcgagttggacctcgtctgccagttcggggtcggcagccagaagctgctcggcacgggtgcgggcgtcggcgatcatgtcggcgtccttgaccacgcgcaggagcttcaggctggacttgccgccggattgggcgtcgccgagcacatcgccggcaccgcggaattccaagtcggcttgggcgatttcggcaccgtcgagcgagtggtgaatcacttcgagccgttgctcggccggggagccgggttccgcacgggaaataaggaacgcccacgagttggtgccgccacgccccacgcggccgcgcagctgatgcaactgagagaggccgtatcggtcggcatcaaagatcacgatgcagctggcctgtttcacatccacaccgacttcgatcaccgtggtggacaccagaatcggagtctcgccgccggcaaaatcggccatgacctgggttttgacgtcatccttgtcgcggccggtcagagtcgcaaaccgaatgccttggaattgcgggagtttctgcaaccggtcggcgatttcggccaccgcatgcaatggcgggcgagccacggtttcgccgttttcgtcgaaggtttcgtaggggtcgtcgatgccgatggcgtcggccgccgcgcgcgttgcacggccgcccgcagctgtgcgggcactggaaccagatgctgcggcgcgtccgcgggcagaaccggctgctgccgaaacgccggaaccgccttcgttcccctcatcatccgcatcaatgcgcgggcacacgatataggcccgctcccccgcgtcgactcgcgcgcgaatgtgcgcgaacatacggcccatggtggcggcgtcggcctcattgaccaccacggtgcgaatcggtttgcggccgccaggcaattcggtgagccaggaaatatcgagatcgccaaaccaagtcatggcggcggtgcgcgggatgggcgtggcggtcatcaccaatagatgcggcgtggtgccgtcatcggttttggcgttgagactttcgcgctgttccacgccgaaccggtgctgctcgtcgattaccaccaaggccaagtgcggggcttggaaggtcttggaaaacgccgcgtgcgtggccacgataatgcccggctcgccactggacgccgcagcaagtgctttacgtcgcgcagcaagcttcatgccgcccgtcaacaacgtgactggaatcgctggcttgagttgctccaccatccggccaatggtttcggcatgctgctcggccagcacctgagtcggggcaacaagcacggcctgatagccggcgtctacggcttggagcatggcagcgagcgccactacggttttgccggagcccacctcgccttgcagcagacgctgcattggccagtcatgagccaaatcggcggcaatatcatgaataacctgctgctgccctgcagtgagggagaacggcagggatgcgatgaactgatcgcgcagactgtcggttaccaacgggcaagagtgagccgcggatttatgggcgtgcgacctggctttaagcagcgaggtctgcgaaacgaaagcctcctcatagcgcagggttccgatggcctccttgaaccgggtcgtggaggccggatcatgaatggccaggaacgcctcagcccgatgcatgaggttcttggccttgcgcaccgattcgggcagcacatctggaatggattgggagagcgcctcagcaccggattcggcggtcgtgccggaattctcttccccgttttggacggcgatggtgtcggtcgtgggagccacaatgccggctgacccagcgccagcgagttgcccgtcaggcgtggatgacgtgcgggcccccatcatccacagcaatcccagaatcgtctcatgaatatgttcggacgagatacgcgaactggcgtgatataccgggcggggccggcagacgcgggtaagcgcctcttgcacggtatcggcgtcgtatttcagcgcggccccggaagaggcagccgcggccggcggatacgcggactgcacactggcatacggatcggtacttcccgcaaacgcaccattgccggatgccgcaccccgagcgtaaccctcaagccccgctcctgctccggccgacccgggcgcgacagtgaggatttcggggtgcgtgaattgcagctgccccatgtattcgctgggcataccggagaccaccacagacgtgccggcgcgcagccgcatgctgacccaatccacatacgatttacgatacgaaaagaacgtgagccgggccgtgctgccgggtacgcgacgcgaacgggcaaagtcggcgtcgtcaaccgtcgcctcgagtcggtagccgcggcgagcgttcatcggcaccacgcgcatgtctcgtatcacggcggcaaatgccatctgctggccgggtgcggcctcgcggatggcgcgaagcggcaccggttcggtgacgcggaagggatagtaggtcagggcgtcgccgacagtgacgattcccagcgatttgagcgcggacacgcgacgcttgttggtgaccagcgaagcgagagtggtgtccatagtgatgctcatattggcctattctattcgcacggcctctttaggccgcagaaacaacaaaacccgctgagccgaagctcaaacgggttttgctccacgttagtacgcgattcacgcggccacgcgctgaaccttgccggccttgaggcacttgacgcacacgcgcagacgagtgttctcgccatcaatcgtggtgcgtacagactgcaggttcgggcggaagctacgcttggtacgacggtgcgaatgggaaacggtgaaaccggtctgcggtcccttgccgcacactgcgcaacgagctgccatgatggactcccttaaccttgatgtgtcaagtctttcacgcattcgaccgccggtttcacccgacatgccgaacacacaacttcacaaatatatagcccaataccgacaaccgcaactcttgcgtgtatcatgggcgaacttcggcggttcacgcgcggttcgagcgtaacttgcgagtgggccatcagcggttcgcgagcggttcggcattggttcgccagcggtccgcaagtagttcgccagcagttcgccagcggcgaattacgctgcaaatcgtagcgtttacccgataaaacacgccggactgcctattccgcatccaacaaactctcatataatctcggtataagagacggcaagggacgaaggggtcctcgtgcaacttacgacgaaggaggctgtcatgttgaatctcaggcgaggtatcggcactcacgagcccagcgtgatttcactgggtcaagtctgggtggacattatgctcaatgtggacgaggtgccggcacagggcggattcgccgtggccgatcatccgaagccctccattggcggcagctatcgcgtgctgcaggcggccagccgcatgggcgtgccgaccgagcacgccggcattctgggcaacggcctatgggcgcatttcatccgccagtcattccaggacaacggcatcacgcatatcggccaggatcgtcttgatgaggattccggcttccgcgtggtgctgagctccggcgcgccgaagaagacgttcatcgcttcctatggcgccgaggctcatggcgacgcggacacgttcaacacgctggagccgcagcccaaagacgtggtgcacatcagcggcaacacactgatggaccacacggccaccggcgtggacggattcctgctcaaggccggtaccgacccggctgcacgcgactacacgctggtgatcaatcccaccaatacgttgcgtctggtcaacgaccacatgctcgaggatctggtgcttgcgcgcccggtctggtcctgcaaccgtcaggaggccatgacgctggccgagcgcctgggcgcgccgatcgacgacagcaaggtcaccatcggcggtggactcgacgacttcatgcaccagttgtgtgacggcttgggcactacactgcgcgcgccgctggtggtgcgtgtcggcgcccgcggcgcttggattcgtgagccaggtggcgagacgattcatatcgagggatacccgaccaaggccgtacacacccgttcggcgggcggttgccacaccggcgtgatgtgcgcgatgctggcaaagggccatagtctggccgaatcggtaaagatcgccaacgcggcggcatccatcgccatccagcgcagcctcaacggcgtgccgcaatgccccgattacgacgaggtcatcgcgctgatcggcgaatagtttccggacgattgagtggatttcctcatctgggggaacccacgatcggctcccttcagtccgcttcgcggccagctcccctcagcgaggggagctatttttttgctctggctccccttagaaaggggcccggcattattcacccgccgttcaactttggcggttttctaccctagtccgcgcttctacgatagattgagttgaatactgtcgaggagtgcatatgactgatcccgcaaatgtccacgaaccggtgccgcaaagcgccaaactgaccgcccgcgagaagaagtggatcatctacgacgtcggcaactcggcattcgtgctgctgtccaccgccgtcatccccatttacgccaaatcgctgatgccggcggacggcaacatcgtgtccgcctggggctacgcgcaaaccattgcttccttggtcatcgcgctgctcatgccgttgctcggctccatcgccgacgtgcaaggcatgaaaatcaagtttttccttggcttcttcggcaccggcgtggtcacctgctgcgcaatggccctgcccctgacctggctgccgttcctggtcgtctacattctggcgaccatcggtctcaacggctcgctgacgttctatgattcgatgctcatcgacaccacctcgaacgagcgcatggacaaggtctcctcgcacggctacggctggggctacatcggctccaccgtgccgttcatcttctgcatcgcgctgattttcggcggcccgtcgctcttcgactggtccacggtggcttgcacgcgcgcctcgttcatcatcaccgccatctggtgggtggcgttcaccatcccgctgcttaccagctaccgccaggtgcactaccgtgccacctgcgaccagctgggctcggccgtgcgcggcacgttcagcgaactggcgggcacgttcggcaaaatcgtgaagaacaagccgttgtggatgttcatgatcgcgttcttcttctacatcgacgccgtgaacacggtgatttcgatgagtacctcctacggtgccgagcttggcatcgactccacc

SEQ ID NO: 3780 - DNA, 17959 bp, Unknown
  R35_2m  MAG No. k141_2008
cgccgtgggcgcgccaccccgattcctcagacgttacggcctgacgcaggctgcggtgattctgctggccggcgcgccagtgggcgtggtatccggcgtggcgttgggatggctgcatgtggcatggaaccgcaggatcggtgtggacggtcattggctggaaaccgtgccgatctggggattgcaggcggcgctggcattcggcgtagtggtaaccggactgctggtggcgtggctggtcacaaaaccaccgcgcaatctcacccgtcgttccctcgattgatcagtgacatacggcaacccttgccgtgtcattcgggagctataagacaaaaagtggcccacacattggtgtgggccactttagtagcgaaggctgaagtgtaatcagtcttcgagattgaggcctttgcgctcgggcaagcagagggctgctatgcaggcgaggatgaaggcggcggcgaagatgatgaaggccacggccttgttgccgccggacagggtcaggaaccacggcatgaggagcggcgcgatgatggcggcgatgcggcccaccgcggcggcggcaccggcggccacgccacgcaggcgggtcgggtagatttccggggtcacggcgtacaacacgccccacgcaccgaggttggaggcggacagcagcatgccgaacacgagcacgagggccgctgatccggcctgcgagaacgcgaaggcggccacggcggagacggccaggaagatgctcagcgtcttgcggcggccccagacctccaccagccaggcggccaggaagtaaccgggcagctgggcgatggagatggcgagcgtgtagccgaatgacttggtcagggagccgaactggtcggcgagcagcgacggcatccatgtgaacgcgccgtagtaggagaagttcacgaagaaccacgtggcccagatggcgatggtgcgggccaggtacttggagccgaacagctcgcgcgtcttgatcttcggcagcggcttgcccttgggagaggttaccggggccactcccccggcttcctcgaagtagcgcacggccttttcggcttcgtcttcgcgacccttggcttcgaggaatcgcacggattctgggatgtgtacacgggtgacaatcgcgtagagcagtggcagcgcgccgatggccagcgcccagcgccagccccagtcaccggtgttcgggatcacgaagtagccgattatggcggcgatgatccagccgacggcccagaacgattccagcagcacggtcatgcggccgcgctgtttggtcggcgaaaactcggagaccagcgtggaggcgaccggtagttccgcgcccaagcccagtccgatgatcagtcgggcgccgagcagcatgccgagcgaccaggacagcgccatggcgccgttggcgatgccgaagatgatcagcgtggcggtgaacacggttttgcggcccacgcggtcggcgatgaagccgcccaccgccgcgccgatggccatgccgacgaagccgatggacagcacccacgacttttcggtcggggtgaggttgaagtgcgggtcggctgcgatggcggcgaccacgaaggaaacgaggccgacgtccatggcgtcgaatgcccagccgatgccggaggcgacgaggagtttacggtgcgccttgttgaagggcagccggtcgaggcgctcgttgcgggtgagctgcgcgggttgcgctggagtggtggtgctcacgtcgtttcctttctggtaagtggcgtcagatttagtgtcgggtcaggtcggtgtaggactcttcgatggccaagctgatgcgttcgacttgttcgcgggtcagcggcttgcggaaggtcatgcgtaatgccgatttggcgatggacggttcgaggcccatcgccagcaacgtggcaggaatctcgtggcgcccgatggcgcaggccgagccggatgaggcagcgatgccacgcgcgtccaggtcgacgagcagcgcttccccggtgacgccggggaagatgaaggaggcgtgaccgggcagacggcgcacggggtcgccggtcaggtcgatgcggggcacgacccggcgaaccgcatcgatgagcatgtctcgggacgcgaccaattcacggcactgcgcctgcatgcgcgcattcgattcgttgagtccgatggcaagcgccacggcgccggccacgttctgtgtgccggagcgcaggccgcgttcctgccctccgccggacagcaccggttcgatgggtgtgcggccgcgtaccagcagtgcgcccagtcctttgggcgtgccgaatttgtgtccggatacggacagggcgtccacatcccagtcacgaaaacgaatcggaatctggccggcggcctgtacggcgtccacatggatgggcacgccgtgcgcgtgggcgatgcggaccagttcctccacgggttccacggtgccgacctcgttgttggccagcatggtggagaccagcgtggtacgttcgccggcctcgccgtcaagctcgcgttcaagtgcgtcgagatcgagatgtgcttgcgcatccacgggaatgcgcacgacttcgaaaccgaaccattcgtgcagccatgccgccgattgggccacggccgggtgctcgatagcggaaatgataatgcgcgggcggctgcttgccagctgtttgccatcggtttcgtcgagtccgtagaccggccgcaggcccagtttgcgcatgcgcgccatggcgatgcctttgatggccagattgtccgattcggtgccgcctgaggtgaagatcacgtcatccggccgggcgcccaacgccgcggcgaatgatgcgcgggccgcgtccagcgcgcgggccgcggttttaccgggctggtgcacactggccggattggcgtaggcctcagtcaggaacggggtcatggcctcgatgactgccgggctcactggttcggtggcggcggcgtccaggtacagttcgccgggttcaccggatgcgttgggggtatcggccatgactagttccaatccaatccaaggtcgatgctgcgcaccgagtgggtgagcgcgcccacggagatcacgtccacgccggtggcggccacggctggcactcgctccaggctcatgttgccgctggcttccacgatggccttgccgtcgatgagctccacgccgcgacgggtgtcgtcgagcgagaaattgtccagcatgatggtgtccgctccgccggcgagcacggcgggaatctggtcaaggcggtcgacttccacttcgatatgcgtggtgtggcccacctgttcgcgcacatggcggatcgcgccggccaggtcgatgccgcgcgcggcgagcgccgccagatggttgtccttcatcatgaccgcgtcggacagtccgtagcgatggttgtggccaccgccacagaccacggcgtatttctcgaacgggcgcaggccgggcgtggttttgcgcgtatcgacgatgcgggtgcgctcgtagcggcgcggccgggtgacgggtccgtcataatcgtcgccgtagatggcgttcaccgcgtccacgaaagcggcggtcatggtggcgatgccgctcatgcgctgggtgaagttgagggcgatgcgctcggcggtgagcaggtcgcgtaccggaccttccacggtggcgagtacctggccgcgctggaatcgctcaccgtccttgatggcggcggtgacggtgacggccgggttctgtgcggcgaaggctgcggcgaacacgtcgatgccgctcatcacaccgttttcgcgcgcggtgaggtgggccgagccggtttcgtccgcggggatggtggtctcgcaggtgatgtcgccgtagggcgcgtcttcggcgagcgccgcttcgacggcggtgcggatgatgtgtgatgtgagcatgggtcagtccttgatgtaggcgacggagtgggcccagttgtcgactggctcgctgtagtcggtgcgggcgtgggcgcctctcgactcggtgcgggcgagcgcggcggtggcggccacatagcctacggtgagcatgttgcggttctccaaagcctcaacgctgcttgcagcaccatcggcgtttacatcagcctgggcgtttgcggcggcgaggccttggccgagttcggcgatggcggttttcagtccggcctcgtcgcgcagcacgccgacgccatgccacatggtgttctggatgcgggtacggtcccagaccttgtcggcggcggtatcgtcagcagcagccgtagcggcaggagcggccagcgcgatcggcgcatggtcgaacacggcaccggtggcggagttcaggaacggttcgggtgcccagaccgcgtcgtcaccgtccgcgacggcggcaagaccggcgcggcgtccgtagacaagtccttcgagcagcgagttggaggcaaggcggttggagcccatgacaccggtacgagcgcattcgccggccgcgtacaggccggggatggaggtccgggcgtccagatcggtgcgaatgcctcccatgtagtagtgcgcggcgggcgccaccgggatcggctccttgctccagtcgaagccaagcgaacgcgtataggcatcgatggtcgggaatcggtgggccaggaagctggccaggtcggggttctcgcgggtcatcggcgagacgtcgagcatcacgggcttgccaccttgcgcctgcatcacgcggaagttctcgcgggccacgacgtcgcgcggtgcgagttcggcgcgcggatcgatgtccttcatataccggtggccgtgttcgtccagcagcaccgcgccttcgccgcgcacggcttcggagacgaggaagtgctcgcccacggccatggcggtgggatggaactggtagaactccagatcggcgacctgggcgcccgcacgccatgcggcggcgagaccgtccgcggtggcgaccagcggattggtggtgtacgggtacatacgacccgcgccaccggtggccaagatcactcgaccggcggccagatccttgtcctgcccgtcgatcagcaggcggacgccggcgatgtggccgtcccgcacgatgagatctttgaggaaggcgttctcgatgatgtggatgcgcgggttcttgcacaccatggcggagacgtccagttcaagcactttgccggtggcatctcccccggcatgcaccacgcgggcgcgcgaatgagccgcttccaggccgcgcagcatgtgtccctgcgcgtcgcggtcgaagtggacgccggccgcggcgaactcgcggacgcgctccgcaccctcacgggtgaggatgtccacggccttcgggtcgcacaggccatggcccgcggccatggtgtcggcggcgtgcagcttcgggtcgtcgtcggagaaaatggccgcggcgatgccgccctgcgcatgataggtgttcgattccaccagtccggccttggttaccaaggtcacgtcgtgtccggtgccggccacggccagtgccgcggacagtccggcgacgcctgcgcccacgacgacgatttcagtgttgctcattgtgttgctttcctctgtttttgcgtcatctgctcccctcagtcacctacggtgacagctcccctcagggaggggagctagaagcatgtcacgggtgaacgcgcagcatgcgctccagtgccaccttggcttcgcgggcggtgtcttcgtccacggtgatgcgattgaccacgttgccggcttcgaggttctccaaagcccaagccaggtaagccgggtggatgcggtacatcgtggagcacgggcagaccaccgggtccaggcagaacacggtcttgtccgggtactgagcggccagacggttcaccaggttgatttcggtgcccacggcaatggcggatccggcgggtgcgttggcgatctccttgacgatgtacgcggtggagccagtaccgtcggcggcgtcgaccacctgcatcgagcactcggggtgcacgatcaccttgacgcccgggtatgccttacgggcacgttcgacctgttcgacggtgaaacgctggtgcacggagcagaagcccttccacagaatcatcttggcgcgggcgtaatcggccggatcggcggcgccgccctgtgccttgaacgggtcccacagcggcatctcgctcagcggaatgcccatcgcgcgggcggtattgcggcccagatgctggtccgggaagaacagcacgcgcttgccgcgggcgaacgcccattccagcacggcgtgcgcattggacgaggtgcatacgatgccgccgttgcgtccgcagaacgccttcagcgcggcggatgagttcatgtaggtgaccgggatgatctgctgcaagccatcggagtccggctgggtgccgcagatctcgccgagctggtcccagcattcctggacctggtcgatgttggccatgtcggccatcgagcatcctgcggacaggttgggcagggtcacgctctgttcgggcgtggagaggatgtcggcggtttcggccatgaagtgtacgccgcagaacacgatgtggtcggcgtccgggcgttcggtggcgttcttggccagctggaaggagtcacccacgaaatcggcgtgcttgatgatctcgtcacgctggtagaagtggcccagaatcaacagtttggagccgagacgctgcttggcgtcggagatgcgctgctgcagttcctcgtcggaggccttgcggtactcgtccggcagcacctgctggcgcggcgcgttggcgggcagacggtcaagcatcgaggcaccgggaccgtagctgggtgtggtggtgtcgaagtgccatgggtcctgggtcagtcctgcatcgcaggtgctttgcgcgcccagcttggcgatgatctcgtcaacggacggcgcagtggatagtgcggtcatagtggttcctttccctatatacgtctgtgatgccggcccgaagcgggtcggcgggaaaaatcagatgcgcgcggatgggatcagcgcgtcgagagcgtcttcacgctcgccttgtctggacagttccacgatgtcgtcgccatcggattcgtggggcatgccattctcgacaggtcgtttggggatgtagcggtagacggtggccggtcgttggcggccttcgcgcaccttctccccggtgtcttcaagatcgcccgaggcaagcattttgcggcggaagttcgccaagtcgagggtttcgccgccaatcgcctcatagacgccgtgcagttggcgcagggtgaacgtggggccgagcagtcgggtggccacgtcggagtattcgattttggagcgcaggcggagcagcgcgtagtcgatgatctggcgatggtcgaacgccagctcaggcagttcgtcttcggggaaccatcgtacgttgtcaccatcctcgaagcccgcggcctcggtctggccgacgagcgcccagtacacgacggataccatgggtaatccgccatgggaccgggtcgggcctccaaaggtgtacagctgttcgaggtatcgcgggtgcaggtctgtggtcgattcgagggccgcgtaggcggactgttccaacgaccggtcggagcgcaggtcgccgccgggcaatgcccagcagcccaggaacggctgacggacgcgcttgaccaggggcaaccagagacgggaatgggccgagttcgcggcgttgccggaatcggcggcactgttgccggtatcgcctttcgggccgagtgccagaatcaccactgacacgccgacctgtggcggtgcgctgcggcgctcggacacattgccgaatcccatgccatgcctctttccataccggttgttctccctgcattgagagcatagcactacttatagtcacaatgaccataaatcacatattggatggtctagcgcacgaatattggtcaggtagcgggccccaatcgctacgaaatcacgtccgtgtcttccgatttcgactgtgtcatttcggcgacgggcgggaggaacggcgctagggagggtagttcgtcgagactcttcaggcccatttggtcgaggaaggattcggaggtgaccaaaagggccgcgcgggattcggggtccacgccgtcttccttgataaggccgcgtaccgtgagcgagcgaatcacgccatcggagttgacaccgcggatcgcggccacttgggctcgggtgacgggctggcgataggccacgatggcaagcgcctccagtgcggcctgactgagtctcgcagtctggccgtcggtgacgaatgatgagacgaccggctcgaacgcggcgcgactggcgaactgccagccacgagcggtgcggcgtagttcgaagccgcgcgggcggatgccacgggattcatcgccctcatagtcatcgtgcagggcttgcaatgccccttcgactgtgttgcggtccaatgccaaaatgcgggccagctcggtggcggtctgcggctggtcggcgaccatcagaatcgcttccagacatgcgggcagcccgccgggaaaatcgtctaccgtgaaatccacgtattcggggcgcgtctcctccactcccctcacctcggcctttgcggattcagccgtcgattcggcatccgccatgtgctcggttgcattcgttgcgtcaatccgttcagtcaccagtcgccgtccttacgcaaaatcgccttcggaaatgttcacgtcgttcatcgtttcgtctacgccggatacccacctcaggtgcagttcggcaaacggaccatcttgctgatactgcagcacaccttgtttgaagaacacgagcacggccatgaaccgagccaccacctcaatacgagaagtgcagtcccgggtcaattcgctgaacgacatcgactggtcgcccttggattccagtgctgcaatcagccggtcgcgcaccaccagcgattgggcccgcagatcgaccagcggcacgtgcagctggtggatcgatacttcggaggcgggcgcgttggcgatgacctgggcggccagttgggcgagttcgagcggggtcagcgtccataccagctcaggcagcatggcggcaatgccctcgtccatggccgccggatgcggaaatcggccggcattggcggcgatacgcgcccggaagtcacctgcggcctgcttgtaggcgcggtattggaggagtcgggcgaacagcaaatcgcgttcgcgcagcgcctcgaggctttgctcgtcgtgctggctgtcttcgccgccgggcagaatcgccacgcttttggcctcgaccagaatagaggcgatgtcgagaaaggcgctggcctcatccatgtttttcgtgaagtcgagcccgcgcacgtatgtcaggaattcctcggtgatcgaggagagggaaacttcggtcagctcgagtttgttgttggcgatcatgccgagcaaggcatcgaacggaccggaatagacctcgaggttgacccggaagccggaggtggcggattcctccgtgctgatttcggcttccgcggagctcccctcagtctcgctacgcgagccagcttccctcagagaggggagccgagaaagggaagtctcattcatcgtttatcgaaacaatcgttacgccacgatgccgcgagcaatgagctcacgtgccacctcacggtattcctttgatgtcttgtgctcaggtgcatagaccaccacgggcgcggcggcaaccgtggaatcgggcagtttgatggagcgggagatgaacgtgtggaacaccttttcgctgaacgcctcgtaaatgcgctggcagacctcttcgcagtgcagtgtcttggtgtacatggtgatgagcacgccatccacttccaatgcgggattgatgcgggactgcactttttcgatggactgcataagtagggccacgccacgcaaggcgaagaattcggcggccacgggaatgatcacgccatcagctgcggcaagcgcgttcacggtgagcaggccgagcgatggctggcagtcgacgatgatgagatcgtattccgacttgagcttgcgcagcacactgttcaggatctgctcccggcccacttctgtgaccagttggacctcggcggcggacaaatcgatgttcgccggaatcacatcgatgttctcgaatgcggtgtgctgcaccacatcatgtgggtccacggaaatatcgaacagcgcggtgtaaatcgtgttctccacggtattcgcgttgacgcccagtcccacagtggcggcgccctgcggatcgaaatcgacgataagcacgcggcggccatactgggccaacgcaccggcgatattgatggagctggtggtcttacctacgccgcccttctggttgcacatggcaatgacacgcgccggaccgtgctgttgcagcggttcgggtgcggggaaggtttcgtattcacgtccaagcaaatcggtaggcatactgtctaccttatcaacatccgggttcgctgggggtgcaacgacatacgttcccgccataggcagcgttccttgacggaatgcgctgtctttatcgcggatgtctcgccagtcgtccatcgttgccctcgccccctttgccgggaatacctgctcgcccatcctaatgtactcgccgggctcgcctcggaacaccgttttgcagcgggcattccagtgttccgaggtttatggatctcgtctcgtactatgtcgatgcgcttactcggtgcgcagtgcggtggccgggtcttgcttggctgccttgcgcgagggaatcaggccgccgatcagcgtgagcaccacgcttaggatcaccagcaccacgccgccggtcaccggcagggcggcattgacgtccgcattgccgatgaagtgatgcaacacggcgttgatcggaatatcgagcagcacggtcaagcccacgcccaacaggccggagcataggccgatgatgccggtctccgcattgaacacctgggacacgttgtgcttcgaggcacccattgcgcgtaggatgccgatttccttggtgcgctccagcaccgaaatgtaggtgatgatgccgatcatgatcgaggaaacaatcaacgagacggacacgaacgcgataagcacgtaggaaatcacgttgacgatggtggtcaccgagctcatcatgagccccacataatccgtgtaggtgatcttgtctttcttcgagacggtgttgttgtagtcggtaatcgcgtcggcgatgtggtccttgtcttcgaagctgtcggcgtagacgttgatcgagctgggcgcgtcacgactcaccacaccgaatgcggcgaggttgtcgtcgtaggtgccggtcgacacgtactggtcgtagatcgcgacaagcacgtcgttcgaagccgtggcgatatacgagtcgaaactgtcggcgagctgctgttcgctcatcgcggccatcgcgtcggcctgatcgccggcacccgccgcgccagcaccagcaccagcaccagcaccagcggcatccgatgcgcccgtaccggaccgctgcccggcactcatcatcgacttggccatgttcgccttctgcgtcacgcccagcgaaaccacgtaggtgcgcgcgtcggccgccttggtggcgtcgtccgagggcgagaacgtcatgccgttgagcacgttcgtgttcgggttggccttctgatcggtgacgatggcgctggaggccgcacggtcgatcagatcattggtcagagcgcgcgtgtatcccacgccagcggccaacggtgtggccgaagcatccttcttcgccttgacgacgcccaccaccttgagtttggtggccgtttcgaggcactgttcgattacatccttgtcgttgccgatgaatcggtagtggccgtcatcgcccttgacgtactggtcggatgccggaatcatgtacagcgtctggtcgagcgccttagcatagtcgatcttgtcttgtggagtgctgaccttgtcgccggcgttgagcttggacatcatctcgtggtagtcggaggcgggcagcaggccgagctcgtacagcgtggtcagcggcacgctgttgttgtcgtcgagcaccagcaccacctcgtccttggacttcggccatgaaccgttgaccacttggtagttgtcggtgatgaccttgcctacgagcttgctgtcgtccgctccaggcatgatctcattgaacgagtcgggcgcggcgttctcatcggttttgccggtcagcatcgacatctgctgcgaggtgatcgacgaggtgccggacatgccggacgagcttgtggacgccatctgcgaggccattgaagtggagtcgctggcaccgatcgtcacgccgtccgcattgaccagcgtgccatcggggtcgtggtcgaacacggagaatttcacgtcatacgtgtactggataccggcggaacccacatactggtgaatctcgctcttggaattatccaggtatttcttgaagcgggtcaggttgttttcggtaatcgaactggtcaggctggatgcctgcttgacgctgcggtcgtccgggtagatgccgtcggttctgtgcgtcttgccgccgtatccgtcatcgccgcccatctggccgcccatcatgctgctcaggtcgaaggtctgggagtcgatggtgatcgggtaggcggtcatcgtgtcacgctggatgtcgctgatgtatgcgttcacgccagtcgacaccgatagaatcagcgcaatgccgatgatgccgattgagccggcgaacgaggtcagcagggtacgcgccttcttggttttcagattgttgaagctcaacgccagcgacgtgacgaacgacatcgacgcgcggcccatcgtcttgtgcacggccggctgttcggccgtctcatccacgacaaacgggtcggagtcggagcggatcacgccgtcgcgcaggttgacgatgcgcgtggcatattgttccgcaagttcggggttgtgggtgaccatgaccacgaggcggtccttggccacgtccttgagcaggttcatgatctgcacggacgtgtccgaatcgagcgcgccggtcggctcgtcggccaggacgatgtccgggtcgttgaccagtgcgcgggcgatcgccacgcgctgcatctggccgccggacagctggttcggctttttattgatgtgttcgccgagtccgaccttctccagcgccttgcgcgcacgttcgcgacggtcggccttgccgatgccggaaatcgtcagcgcgagttcgacgttcgacagaatcgtctgatgaggaatcagattgtagctctggaacacgaagccgatggtgtggttgcggtacgaatcccaatcgcgatccttgtattggcgcgtcgagatgccgttgatcaccaaatcgccgtcgtcataccggtcgaggccgccgatgatgttgagcaaggtggtcttgccggaacccgagggacccagaatcgcgacgaattcgctgtcgcgtaggttcaggctgactttgtcaagcgcctgttgaacgaaatcaccggttttatagcgcttcgagatcgatttgatctgcagcatgaatacctcttcctggctgacggttcgctgttatgtactgtattgtcacgccttgaatttccggccgactttggtgctcccccccgccgcgattccgctatgggcggacgcgtcgcaaaatggtgtgtctcaccgcgctctggggtgtgaggtcagatacgtttcgatcagggtttcggggcttacgtgcgtgtagatctgcgtggtggtcacgctggcgtgcccaagcagttcctgcacggtgcgcacgtccgcgccgccttggatcaggtgcgtggcgaaggaatggcgcaaggtgtgcggatggagtggtttggtgatgccggcccgctccccggttgctttgacgatttcccataccgattgccgcgagatgcgcttgccgcgtttgttgagaaacagtgcgcgtctctcgggaatcttggcgctggagcgccgttccagctcgccacgccccgcattgaggtatgcggtgatggcccggcatgcgtagctgcccaatggcacaagccgctgcttggagcccttgcccatgagtcgcgcgatgtgctcgtccaggtcgatgtcgtccagattcacaccggtggcttccgagacgcggcagccggtggcgtacatgaattcgagcagggccttgtcccgcaataccaccggatcggttgagccgccggctgccgccgcgtcgagcagacgggttacctcgtccacggtgagtacgtcaggcagggtgctggcacctttgggtgccttgactgcggcagaaacgtcggcagtcaccgcgtgctggccgagcgcgaagcgatggaattcatggatcgaggccagtcttcgggctttggagcgggcggactcccccgcctggtcaagggcggcgatgtagtcttcgacgtcttgtttggttatggcgtccggttcgtggatgccgcgggtttcgagccaatcaatgtatttggcgatatcggattcgtaggcggtgacggtggccgtggcgagtcctcgctccacgccgatgtggacgaggaactgctcggtgagtctggtgaatccgttggtcatgtgtttgttctcttccccacccgctgcgcgggagccccccctcgtcagaggggggctaataataggaaaccccgctcggaagcggggtttctagtgtgaagtcacgacttcaagcaatcaggcctcaaccggagcgttgacgtcctcaggcagggcggccttggcggcggccacgatggtcttgaaggtgttcgggtcggagacggcgatctcagccagagcgcgacgatccagctcgatgccggcgagacgcaggccctggatgaagcggttgtaggtgatgccctcagcgcggacggcagcgttgatgcgctggatccacagcttacggaaatcgcccttgcgagccttgcggtcgcggaagttgtagttaaaggagtgcagcagctgttccttggccttgcggtacaggcgggagcgctggccacggtagccggaagccctctcgagaacaacgcgacgcttcttgtgggcgttcactgcgcgcttgacacgtgccataatctattcctcagctttctaaagtcttattatttccgggtaagccctatgctcacttctgcagaagctggtgcagcttcttggcctggccgccgcgcagcacatcgtcggcggacagttcacgacgcttgcgagcggacttgtgctcgaggttgtgacgcatggcggaaccgacatgcttcaccttgccggtgccggtgatcttggcgcgcttggaagcggcggaattagttttcatcttcggcattgctgccctccttgctggtttgcttcttgtcggaagtcttctgagaaatcgcggactgcgcgtcggccgcggcctgagcctgagactcctgcttggccgcgagacgagccgcctggcgagcctgacgctcggcgcgggactcggcgccacgacgacgctgctcggactgggtgtggaccttcttgcccttcggcgcaagggtcatgatgatgttgcggccctcctgcttcggcttggactcgacggtgccgtattcctcgacatcgtcggccagacgctgcagcagttccacgccaccaatcgggcgggagatctcacgaccgcgcaacatgatggtgaccttgaccttgtcgcctccgttaaggaagcgggtcacatggcccttcttcacgtcgaaatcgtggtcgtcgatcttcaggcggaaacgaatctccttgatttccgcggtgctctggttgcggcgagcttcacgagccttgatcttctcgttgtacttgaacttgccgtaatcaatgagcttggcgaccggaggcttcgcgttcggggccacctcgacgagatcgaggtttgcctccttggccaggttcagcgcgacggaagtcgcgatgacgcccacctgctcgcccttcgggccgatcaggcgtacctgcgggacgcgaatctcgtcgttaatacgtggttcgtcgctgatgatgactccaatcctctacttcaattccgtggcggggcctttgctggagtcctgttcaatgctttggattcatggcaagccaaaaccagcgccaatatgcgctcagcttctgcagacgcatatcagttctttgcgtcattcctgattgcgcgttgtatatcgcaatcgctaggctgtttgccttgaacccgaggccttgaaaggcttccaggtggggttgccccgctttcttgatttctcaagccaaataggaatcttaccacatgcccggacattcgcggaccgtgtgtcgatgggtggataccggctacagtaggcataatgactcaggtatgcgtgatttttggtgcgggcgaatactatgcgggcacgcccgtggttcccaccggtgcgtatgtgattgcggccgatggcggactcgaccatacgcgcgagttgggcatcgtgcccgatgtggtggtgggcgacttcgattcgctggagggccggccgccccgcaccgatgtgcgcaccatcgcgctgcccgcgttgaaggacgacccggacatgctttccgcgctgaaggtcggctggtcggcgggttgccgcgagtttcacgtgtacggcgggcttggcggccgtattgaccatacgatttccggcattcaactgatggcgctgctggcccgacacggggcaagcgggtatctgtatggcgacgggctcatcgtcacggccatcaccgatggcaggctttcgttccccgcgcatccggtgcccgaggacggccgcatggtgtcggcgttctcccactccgatgtttcgcttggcgtgaacgaaccggggctgaaatatgagcttaaagacgacacgctgaccaatacggtggtgcagggggtcagcaacgagttccgcgacggcgtggacgcggccatcagcgtgaaacgcggcacactgatcgtcaccttccccatcgaagtggcgttgccacaggtgagcagattccatgaattcggcggcgatatcggcgagctggacaccgaagtgtccaagctgctggttcgctgacttgcatgccgcgcgcttgctcgtgatgattcgagacattcctccaaaggagaggaaaatcacatgtcggttgcgggcaatccaaattgtgagcgctcacaaaaaatacggcatttttacccaaaacgcacgctgaaacgttgccatgtgtacagagtcggcattacagtagcaactgttggtaaacaatggcccggtgtgccaaagcgcgccaaggccaccctacaagggagaattacatgacagttaagattggtatcaacggcttcggtcgcattggtcgtctcgccttccgtcgcatcttcgagctgcaggctcgcggcggccaggctggtgacattgaagttgccgccatcaacgatctgaccaccccggctaccctggcttacctgctgaagtacgacagcacccacggcaccttccgtcatgacgatggcactccggttgacgtcaaggccaccgaagactccatcatcgtcgacggcaaggaatacaaggtctacgccgagaaggacgccaacaacattccgtgggtcaagaacgacggtgtcgagtacgtgctcgagtgcaccggcttctacacctccgctgagaagtcccaggctcacatcaacgctggcgccaagaaggtcctgatctccgccccggccaaggatgacaccaccccgaccgttgtgttcggcgtgaaccacgacatcctcaaggcttccgacgtgatcgtctccgccggttcctgcaccaccaactccatggccgccatggtcaagctgctggacgagaagttcggcatcaaggccggcttcatgaccaccatccacgcctacaccggcacccagatgctgctcgatggcccgcgtggcaccaagaccggc

SEQ ID NO: 3781 - DNA, 6451 bp, Unknown
  R35_2m  MAG No. k141_2166
cgaccttcttgggcgggtcgagcgggttgacgtaccgcgcctggaaactggtcgggttgccgtccgcgtccctgcggacgatcaccgatccccatttcctgcgttttctcggttgcggcctgttctccgtgtccttcattggcttccccttggatagacggtatgggtccgggcgcctatcgtcggcgggagatctcgaatgagcatcatggaccggccggtggtggtcggccggtgggggcagtcgagattattcttgggtgcctgtaggtgcctcgtgaaaaacgagggtaatcggcaggtttcccaaaaatggaaaaccttggaataaagccaaaaacagctgaccacgattatcatcagaggtatgcatgatgatggtagtcatggctccaagtgtctcatgggcttgagaccggggaagagacgtgattgcgggaatggcgcggagagctgggaatgggcgtgggcaatagccgggacaacatgccgcagcgtgaagcgtcatacgagttgtctcgcgatggccaacgcgccggcaacgaccatgagcgctgagaagagaacgcaaaagagtccttttgcgttctcttcccggtttttggatccgatcacgacggatatcaggaccaatccgacggccagcggcaccaaggccagcagaagcagtggcttttccatggcgcctcctttctgaacgctgtgattcagagatatctttagctaatcatgggatatgggcggcttggtgccgattggtgatggggctcgatcctgatgttcgtcggtgccggaatatggtgcattccgtcaaatagaggtgggcacttggatacggtgtcgctttattggatttctttgtttctatggtttgattatgccacgagtccaacaaaacgttaccggccccagcggctattgacaaacttgtcagtttggacgtattgcgtgtcgaacacgctgagccgcgacaaattagatgcctgctgctcggatgcgggtctattggaagtcatatttatcggcacatttcaatgcttgctttggaacatattactttggtcgatcatgatgttgtcactgtagacaacatttaccgtcaggattacgtgcgaacagacattgggaagaaaaaggttgatgtgctgaaatccagggcgtcaagatgtctttctatagatagcattgataaaatgataacttgtcatagtgaacttgatgaattaattgaccgagagaaaatcaacttagtaattcaagcggcagacgttccaagcaccaccgaagtcgcaaggatgattaactactcatgtgataagaaagatatagcgttcattgttaatccaggctattttggtaattcggtaagtttgcctgaattctattatccgaacaataaatatgactatatttcttcacacttggcaatcaaaggcaagctattgctgcaccatgagtccggtaagcttagctatcgattatgttcaacattgggatcgttggtagcggaacaggttgaagattatcgatgtcattgctgtcctgctcattatggagaaaagggttacttcgatatatatgattatgcttggcatactgagcaagtttgtaaagaaccagtgccgcctaatcttctgtaggattccagtactggtagggtaaggataaattattagatgagtaattcgttaaagctcgtttctgctcctgtgcgcgaaagcaggttgtgggatatcccaggttacgtgccatggttcacggcggacagcgcgacggccatcggcgtggccctgcggtatctggcggtctctctgatcggatacaagctcaccggatcgaccacagcagcgggttggttgggctcgctggccgcgatcgcacagcaggcggccgccgtgttcggcgggacattcgccgaccgtcacgatcgcaagacactgatcatcgtgaacgcgacagcgggcgtcatctgttgggggtcagtcgctgcgctgctcatggccggcaagctggtcttccccgtgctgcttgccatcgcggtgttcgagtctgcggtcaacgggtttctcggccccgcctcggatgcgatgctcaaatccatcgtcgatattcgctcatatccgaaagcgcgcagtctcaacgaaggccgtgacgcgaccatcaacatggccggcagcccagtcggcggcctgctgtacggcatcgccccgtggttgccgttcctgtcggctgcggtcatgtacctgctggcaggcgtggctgcgacacgtatccgagtcggcggaaatccgcggaacggcagcgatagcggcaacggcgatagcgacgatgacggtgggaaagcgggcggcgcgtcatttttccgtgatttcgccgaaggatggtcgtggtcgctgcaccgcaggatgctggtgttgacgatggtgtcgtccgcgctggcgaatttcggggtcaatggcttccagtatgcgattcagctgcatctgatgcgcaccggcgtgaacgcgacgctcatcggattcgtgaatacgggcgtattcctcgcgatgctggcgggtgcgttcatcgccggacggatcagcgataccgcaccggtcgggccggtgacatgctgcggattcgtgttcatctgcatcgcttcgctgccgatgctgctgaccgacaactactgggtgctgcttatcgccaacgccgtgatgtgcctgccgttcccgatcatcaacgcgttgcagctcgggttcattttcggtaagacgcccgacacgatgcaggggcgtatcaccgtgacgcttaccgtaccggcccaggcactgtccgcgttctgctcagcgacggccggaagtctgctgcccgctttcggattcagcgggactatgctggtgttctgggcggtgatgctcgtcagtatgctgctaatcgtcagttcgcgcagcctgcgcaccattccacgcgccgaccagtgggatcgcacaccgctggagtagccgcggacggccaccaaccatggggactatgcaccgctgcgcgctgctctccgcacacgtcttccattccgcaaaccggctgcgctgacaggacgatgagtgcggtcagtttgcggcagtcagtttgggaagaactcaaaatctcgattcagcaggctcaaatcacgagttttcagattgtggtctggaaaactcggtggaagaggctgatcccgggagaaattgagaaatccggatgtccgtttgcgcgaccgattctatgaaaacttccggatgcgcgcgggagtttagcgcgaaacatgaatccggcgaagttctcccgggaacggcttcaaggtcgatttttgagaatcgcggaattccaacgtttttgttgagagattatgcatgagagtaccggattctcgtaaactcccgcgtccggcacgggggttcagcggcgaattcccgaagtcagcgtaaactcccgcagaatctgggagattatggcccgacgaggtctaccagaacgaactcccagattggccgccgttcagccagacgaaaacgacccagcaccggcggaatcgaacaaacaagcgccacaaccaccatcaagcagtcggcaacgtcattatgagctgataggaaccaaccttcttgtccatcatcccagtaaacgttgcgttagttgacatgtcagggtattattctcgaacagtgtgtaaacacactattcacgtatacctctggcgtgtccggcgatgggatgcccgcggcggatatcggacacgatcttcccgatccggtcctgttcccggaccacgcagtccgcgaccatgcacgccaggggaaccggattgccgtacgcctgccactgctcgagccgtccggcgtaggtgctgccggcatcatgcctgatggcgatgggctcgtaccccgcctgcatgagcatcatgttgaggatctggcgtccggtacgcccgttgtcgtcggcgaacgggtggatgttctcgagtgcctccgcggaggcgcgctccgacgggggtaccatcatcggaaagtccgccggaaacggcggacttttccatatccgcctccgcatcgtccgaaacgcccattctcctcatcagagaatcatcaagaagttgttccgtgcttactttcaagaatcttgatgcattaaccaggtcgtatacagaccagcctgttttccccgacatctttagggacatggccgaacggccaattcccatcgcttcggccaagctggactgcgaataaccataagccgtcaatagcattttgacattgaaggtgattgtcgactccagctgctgcttttgataacgcccggtttgttgcgcactttggttgaggtctgaatgaagggacatggtccgtcgccggggtacgatttcagtcgccaaacataaaaccgctatggaaagaggcgacgaaccatgtcgaaccagattctacaggtcgacgagaacatgctcgagacgaagctggaccgtctcgtgtcccggaagggcgaggagctgttgaacgcgatgctggacgcggaggccgacgagatcaccggggccgcgagatacgagcgtgcgtccggtcggagggcctaccgtgcgggccactacgagcggaacctgaccgtgaaggccgggacgatgacgctcagggtgccgaagctgaagggcgcggtcttcgagtcggcggtcatcgaacgctaccggcgtcgcgagcagagcgtcgaggaggcgctgatcgacatgtacctggccggcgtcagcacgcgtcaggtcgacgacatcagccgcctgctgtggggcgagcggatgccctcccagacgctctccgacaagctcaagcgcgtgtacgaggacatcgatcaatggcggaaccgtcccctggcggcccattcgtacccgtacctgttcgtggacggcgtgtggcacaagcgcacgtggggcgggtcggtcgagaacgtgagcgtgctggtcgccatcggcgtggacgacaccggccaccgtgaggtcgtcggcgtcgcggagggcatgaaggaggacaaggccagctgggagcagttcgtcaggagcatgatcgaacgcggtctcaggggcgtgcggctcgtggtcggcgaccggtgcgccgggctcgtctccaccgtgaactcgatgctgccggacgcgcgctaccagcggtgcatggtccacttcatgcgcaacgtcctgtccaaggtcagccacaagcacgcggcatgggccgcgtccgccctgaaggccgtgttcgccatggaaagccggcaggccgcgttggagaaggccgaacaggtcgccaccgaaatggagtccaaggggctgaaggccgccgcctcctgcctcagggaaggcatcagcgagaccacgacctacctgctcgacgactatcccgtcgagcatcggcggcggatccgcacgaacaacatgatcgaacggctcaaccgcgagatccgccggcgcaccagagtggtcggcagcttcccggacggcaggagcgcgctcatgctcgtctgcgccaggatccgctacgtcaccgccaaccaatggagcgcacgccgctacctggacatgtcccggctcgacggcatcatgcaatcaaccgactgaagttgtcctcccggcaacgggccgaaccgcttttgcgcaagaattcgggcgttatccattgccgttctgggacaggctgtaacggatcgccacctaggtcacgctctcatcgtccgcgtcggtcatgccattcgctgtaggaaatccctaacgattgaatcccactgcgcgtcggtcagaatgctttcgcccgcgcgtcatatgagccattaggccgatatactctgagtataccaattccatgaagtagcgaggagaacaggtcatgccgactttggaatggatgggaaagaacaaggtggtcgcctaccaccgtcaggtgccgtaccgtgttcttgaccgcgttcctgaaaaaagcgtcctggattcacgtggatccgattgcggtatattgttttttggtatttactgatttcagtatttccgtattccggtattgcttatttgtctacatttttttggtaaacgtagacttcgtcattaactggaatgtatcccttcaggattttatccttacgaatttccttcccgattatcttgggcgaataggccagtagataatcaagagtcgcctgatacggttcgagtatgaagatgcatcggctcagcgactccaggtaatgaagctgctttctgcattccctcttattgaaccaatggcgccatcttatcgagaacttcttttgctcactctgtgaagagtcatagataagcggaaatggtaatggtttcaaacctggttcagccattccgttgcgaaaatacttatgccacttgcgcgacaatgaggggaatctgattttaatccatgctctttgtgcccaggttggggatacg

SEQ ID NO: 3782 - DNA, 100857 bp, Unknown
  R35_2m  MAG No. k141_2184
tccctgaccagcgtgcatcagccgttcagcgaaatagcccaacgcgccgtgcagatgatcatcgacagccgcaagggcaatcagggtgatatgcacgtcatcctccccaccagtgtcgtcacccgggaaagtaccgtaccgtctcagtcatcggcccgataatcggccagattcaagctggcggccacccgattggacgcgaacgcacccaccgaaaccagcgcatagcacagcgcaagcccgccgaagaagctggccagcgtggccggttcggtcatcgaagcggcgaacagaggggccataagcagcatggaacagccgccggccacgatcaccacgatgttgagcggggtgagtacctcgatgaatcgcgcacggttcaaggtcttgacatcagtgccctccaacaccagcatgcgatattcgccggcctgatcgtacacgctgccggcctgcatcacaccggagctgaccgcggcaagcacagcggcgaacactagcgtcaggatgccgccggtgccgatgtcgcgaatgaacacggtggacgggtcgttggcgtcaccgaccacggcggccgagccaaagaatccgcagatcgaggtgatgccggcgatgaacacggccagtgcaatgccggacacattgcgccaggcgcgcttcggattgtcgagaatacggcgcatggcaatcatcgtggccgcatccttggggcgcttggccttggccttggcgcgagcggtgaccacccaggagcccacgaggttcaccagcgcgaagcacagcagcatgaaaccgatgatcacgccgtacatcactacttcaccggcctgagccagcaccatcggattcttgaacagaagaacggcaatcaccatgatgacggcgaacaccaccacacgccagccggacggcagcgtagtcacaacgcgtgaagtgacgccgagtggcgtgatggccacgcgccgaagcgtgaccagcgaagagatcagcgccaacacggtcacgccaacaagcgtaatgatcaaggcaatcggccccacccacagttgctcgaacgtaaacgtctgattctggaaatgcagcaacatgattagggggatcaacacgcagtaccccgcgatgccaatcagcgcccccaccaaggcctgcccagccgcatcaagcgccgtaaggcgaataacttgccccgtggtcgcgcctgccaagcgcagggatgcgagccgagcgtcacgacgggacgcagccaatcgcgcggcggaaccggcaagcgccacgaacggcacaatcagcagcaggcaggcaaagaacgccagcacgacgtatgccgtggcgtattgatccaggctgtggggattggcgatacgctgcttccagatttccgctgttccgggtttgcaagcgtcgagattgattgcgcatccaatggtgtggtcggcggaggcgcgccacatgaacccatgcacgccgcccaaaacggtgagaaagatagtggtggctgcggcaaaagcaatgatggccaacaccgaagtatgacccgcactgccacgcgagccggggcgatggaacaatcgccacaatgcgaaagcgctcatcgtacgcctcccagctggccgtcctgcatggtcacggtgcgcgagcagaacgaagcgacgttggggtcgtgggtgacgacgaccacggcggaaccgttgtcccgcgcggcggccatgagaatgcccatgacctcgcggccggtggcttggtcgagcgcgccggtcggctcgtcggcgaagaccacggcaggtttgacggcgagcgcacgggcgatggcgatgcgctgcatctgtccgccgctcatctcccccggccggtgcgtggcgagcgcgcgcaatcccatgcgttccagccacaggatcgccgtgtcggtggcggtgcggtagggcatgccgtcgagcatcatcggcagggcgatgttttcgaccgccggcagttcgggcagcagctggccggattggaagatgaagccgaaggcgttgcggcgcagtttggtgcgctcggcgtcgctcatatggctcaggtcagtgccacggaagacgaccgtgccggcagtcggcttgataatgccggccaacgcgtgaagcaaagtggatttgccggagccggacgggcccatcacggctactgtctcaccctcccggagcgtgaagttcacgtggttcagggcgagcgtgtgcatggtcggcatggcgaagccgggctgggctggctgggatggctggccggcctgaatggcacccggtccggccgcagcgggattcgccgacgcataaccggctcccgtgccggctggcatcacgccggtgacgccgtgccctgcctgtgcgcgggccatgctggcggtgtagtccatgaccaggtcgtgcgcctcgatgaccggggcccactgctgggtgtgcgatgccggctgctggaactgttggggttgctgagactgctgaggctgagccgccggtcccgacgccggctgaggctgctgcaattgcgatgctgctgtgttcatactcccgagcgtacggagcgaacgcccagccgaccatcgggctgcggtatgaacctttctggatcaccggcccgctcctcatccgcaaggattagagatacgcagtcgacgcgacaatccatatatcagatgttcattgctcgagaagacgaggaacagtggaagaccggttcggaagctggaaccacaacagaccaagcaaaggagcccacatggccatcgcaatcgacatcccgcacacaccaatcgtgtccgtacaaaagtcgtacaacaggagtatgactacagagaataacaagaacagtcgttttgaaatgagactcacctaagagcaacgttccagaatcgaccaagcggccgagtccaaaggcatgacttcgttgcaatgggcattatcgaatctgctcgccgccgcagatcgggacatccatgaagctcatatcattcggctcaacagtaaagcgtggaatgatttcaccgcagcattaaacgaacctatgggcctacgtctgaatgaattgttggagcgtgatcccatatggacgtgaccaacttcactgagcctcggcacctgactgcgagcgaggatatttctggtttcgactgcggcctgccattggtcaatgattggctggtttccacacactaagtgcatacaacattgagcattcggaagctcccggttggctgaggcgaaatagtccgaaccccattcccgtaattttgctaggcatgatgggcgtggatatcagatttcaaaccatgcacgtcgacagtcagttactccgagatgcggtatttcattctctgaacgatatgattttcggcatatccctgaatcatctagaatgttcactccgctcaatgtccacaatcaccaatgattaatggctggagaccgctatttgacgccgaccattgtctgaatcgcattcagacacaacactcctcattgcgcgcagaccagcgagttccgccgagtcggcgatgtgtctcttcagcggttgatttaggttttccgcatgcgacagctgaccacaccgctaaaaatgccattttcgcactgacttggggcggaggtcgtggcgaaacgcacgagggaacgtgtgtcatccgatatggtcatgcccgccagacattgaagcgtcctgtctatgcgcggttgatgtcccggtggcggggtcaatcgatcgacatacggaccgggacaaattcggctgtcccggttcgggatttcggcctcttttggcgaaccgggacaggcccttccatgaacacccgatatatgcaaatccaaaaccccggaattccgccattccccgacggcgaccatcgcacgatagggcgtcaggtgaatgagattctgtcccggttgcccaaaaagaggcaaaatgacgaaccgggacagcgaaatctgtcccggttgtcccaaaagagacgaaatgacgaaccgggacagcagaatccgtcccggtccacacgcggttcacacggcattacccaagtgaactcatcggcaaaacattggcccagccaacaccactaccgatgtccagcacaggccagctcgtccaggcgggcggcgaagcggggccagtcggtcttcatagcggtgaggagcttgcggttgggcacgtcgtcaatcgggacccagcagatttccatgctttcgtcgtcgtttgccttgggctcgacggtgtggccgggcttttcaaaggcaaacacggtggtgtaggcccacgggccatggtcctcgcggtaggagccgaccacctcgatgtcttcgggggtgatgttggcttcctcgtagctttcgcgcagcgcgccttcgatggacgattcgccgtccgcagtggcaccgccggggataccccacgtgccaccttcggcgctccacgcggcacggtgctgcatgaccacgtgagtcaccttgccgctcgccgggtcgcggcgagccagcagaatgccggacgcaccgttggtgccccaatgcttgcggccgcaggcgcagtccacccagccatcgccgggctgatgcacgttttcgaccggcggcagaatgccagcgtgctggttgcccgaggccttgctttccggctccagttcgccacggccgacattccacaggtcggtccacgtgatgcccagttcgccggccagatgccgggccagcggcaggctgaggccgatgataccgtgcggatcgccctcgatgctgtcgatgaacgcgccgccgaagccttccagcgtgaacgatccggcgacttccagcggctcgccggtgacgatgtaccgttcgatgtcgtcatcggtgaattcgccgaaatggactttggcatggcttgcgccgcgcacggtacgtccggtcgcgaaatcgatcaggcagtggccggtccagagttcaccggtcgcgccgctcatgcgcttcagtcgttcgcgggccacggcttcgctgtgcggcttgccgtagcattcgccgtccaagaggaacatcgaatcacagccgagaatcagcgggccgactgtcgcctcggtcagtcccggctgtccggcaatagcggtggcgatgggttcggtgacggtcggcatatcgatgccggagaagtcgcgcgtggtggcgatttccgccttggaatagtcgatgggcttgccggcggcggctttgcgcaggtcttcgacggcagcttcgcgttccgaatccttgatctccttggccttgagcgggtaggcgatcacgcggtcgccggtcgcggcggcggcagtatcggccacatcacgatacgcacggtgaacggcctcggccttggctgcggcaagaatcatcacacgctgcttgatgctcaaatcgtcgacggtgacaccttcctcacgggcggccgcttccagcgcagcaggctcatccacgtgcgagacgcgaattgtggggcagatacccgccgaatacagcacgtcacggcgaggcttggacttggaagcaagaattagcggaatggacatgacttaagtccttatgctcccgctggcgggagctgtcgaacgaagtgagactgagggtggtctctgccggtatggcggaccactctcagaccgcctgcggcggccagctcccgccagcgggagccttctcctcgacttagcgacgctcgatttcgacgccggcggtgttgatgggcaggtgaagcacacgccagtggccggaagcaagctgctccgatgcgatctggtcgatggcttcgcgggcgttgccgtagtgcagcacgagcacgcaggggccggcaccggagacggcggcggcatagcccttggagcggaagagcgcaatgagctcggtggacggcggcatcagggtaccgcgatacggctggtgcaacttgtcctgcgtggcggtgaacagtagcgcgttggactgggcctgagcggccgcaagctcgtcagcgaacggcgattcacgggttccgccagcgcaagcgcacgtatcggcatcctgagccggggcagcggcgacgccggacttgccctgctgggcggcctgggccagcaccatgggattcatcgcagcgggcagcagacccacgcgagacacgttgtagacggcgtccttgtatggcagttccctaggcagcgcctgacgggccttctcagtggacagctcatagtcgggcacgaacacggcggcggtgatggacgggtccaccgggtagttgacggcgtggaatccgccgtgcagcggttcaccaccaggaacggcgaccgagccgacgccttccgcggtttcgaagtcccaagagacggtcaggccaccgaacacagccggggccacattgtccgggtggccttcgatctgggcggccatatcgaagatggccggacggttgaggtcaccggtctgggcgaaggccgcggcggcggcgatgccggccacgatggcctcggcggaagagcccatgccacgagcctgagggatgttgttggtcgcttccagcgtgaagccgagtcggccgaggccgaacgtggcacaggcacggcggaaggtggagaccacgaggtgggtttcgtcgcgtgggagggtgtcggcaccctcgccgtggatgatcacgtgggcaatgccgtcgttcgggtcgtcgttgagcgtgaaagtgagctcgtcatggtagtcgagcgccagacccacggtatcgaagccggagccgaggttggcggacgtggcgggcacgcgcacgtgaacgctattgcagattgggttcatggttgttccttaaaaaggagctccccttgtcaggggagcttgggtattcagctttcaactcacgggcagccgttcgaccgcctcatcagagggagcctagacggtgtcagtccagcacgcgcaggatggacgggtcaccggtgacgaagtcgagcgcctgcacggccttgacggtgttgcgcagggtttcctcgtcggtcaggtgggtcacgatgcgcaactgctgaatctcgccgtcgtagccggggtcggtcatggtgggcttcagatcctggttcacaccgttgatggagacaccgttcttggcgaactcggcggcgatggcggccagcacgcccggcttgtcgtggatcaggaagcgcacggcgaatgcagccttggaggcggtaatcggagccttcggcagattcttgtacagcgggatggacgggccggtgcagccagcagcaatgtggcgggcttcggtcaccacgtcgcccacgacggcggaggcggtcggagcgccgccggcgccacggccgtagaacatgaggtcgtcggcggcctcggccttgacgaacacggcgttgaaggagccgtgcacggaggccagcgggtggttctcgtcgatcagggccgggtagacgcgggcggagacgccggcctcgccgttctcgaccacggcgagcagcttgatgaccttgtgctcggcggcggcggcggcgatgtcgtcggcggtgatcttggtgatgccttcgacggacacgtcgtcgatggtcacggaggtgtggaagccgagggtggccatgatggcggccttgttggcagcatcgtagccttcgatgtcgccggtcgggtcggcttcggcgtagcccttggcctgggcgtccttgagcacgtcgtcgaactggagacccttggtggtcatctcgtcgagaatgtagttggtggtgccgttgacgatgccgagcatgctggtcaccttgtcgccgaccagggactcgcgcagcgggcgcaggaacggaatcgcaccacctacagcggcctcgaagtagatgtcgacgcccttggcctcggcggcggagtagatctccgggccgtacttggccagcagcgccttgttggcggtgaccacggaagcaccggattcgatggcggcaagcacgaacttgcgggccacggtggtgccgccgatgagctcgatgacgatgtccgagttggtggccacgctcaaagtatcggtggtgacgatggactggtcgatccacgggaacttctcggtttccttcgggtcgaggcaggcgacgccggtcagttcgatcgggcggccgatacgagcggacagttcgtccttctgctcgacaatcaggcgggcggtctgggagccgacggtgccggcaccaagcaggcctacgcgaatcggggtttcgctgttgtgagccaattcagggtccttccaaaaagttttctatatcccacgcctattttacggattatttccgacagcagaccgaaagtactcatcaagctgacggcccttttcgtattatgacggttttggccgcacattacagactgtcaggcgctcacctctgcacgctgattactcgctgacgtcgaggttgagtaggtcgtctacggtctggcggcggagcatgacgtgcgcgccggactcgctgacagcaaccaccgccggaatcagcgcctggttgtagttgctggccatggtgcggccgtatgcgccggtaaccggcacggcgagaatgtcaccgcgcttcaaatcggcgggcaactgcacctcgtgaaccacaatgtcgccggattcgcagtgcatgccacacacacgggcaagcatcgtttcagcggaaccggtgcgattcgccagacgcgcggtgtagtcggcaccgtagagtgccgggcgaatgttgtcggacatgccgccatccacagacacatacacgcgctcggcaatcgggttgccggcactgtctttggcatcggacaagtgcacgtgcttgatggtgcccacgcggtacagggttacgccggcgggcgccacgatgtaacggcccggctcgaagctgatggctggcgcgggcatgccgagcgcacggttggtgctgttgaccgcatccgccaagcgagtgagttccacgtcaatgtccattgaatcttcgccttcggtgtaggccacggagtagccgccgccgaggtcgatttcgggcaggatgtaggcgtcggtggcccacagggtcttgcgcagcagcattatgcgcttggccgcgtgaatgaaggcgtccgcatcgtggatgttggagccgatgtgcgagtgggctccgaccagttcgagtacgtcctggttggcgaggatggtcttgagcacggcgatggacggaccgtccgcaatggcttccatcgcggcggccagcgccttgtctgtgtcggagacttcctcgtggctcaggtcgtacgggtacttgacgtcgtagtgcagctcgcgctctgatttctcggtcttttccgcgccattttccggggaatgcgtcgcagagatacgcgcgttggtagcggcaggcgtcacgtctttgagggcgttcagcacgtcgagcacagcggcgtcggccccggcggccagcagcggcacgccgaacttctggtcctcgtgagcagtggagatgtactcgtggccgccggcgtggacaccgacggtgacgcgcagcatcacacgggcgcgtttgccgagcctgcgggcgatggcggcgacgcgctccggctcgtcgggctcgtcgatcacgattttggcgaagccctgttcgatggccagcgcgatttcctcatcggacttgttgttgccgtgcagtaccagacgacgtccgggaacgccagcggcgagggcgattttcatctcgcccatcgtgcaggtgtccacgaacatgccggcctcggtgaccaatcgcacgacttctttggacaggaacgccttaccggcaaagctcacgtgcgtagtggaggtgtcgaatgcttcggcggcagcgcgcacgaagtgcctggcacgtgcgactacttcatcagtgtcgatgagatagagcggcgagccgaactcgtcaagcagcgattcggcggtacgaccatgaaattcgatggagccttcggcattcacagccgtagcggccggccaaattggagaaataggcataatcacatcttctcgggggcggtgacgccgaggaggtcgaggccgttggcgatgacctgctggacggcgtcattgagcttcaggcgggcggcggcacgggccggctccgggttcttggcgatctccaaggccttgcgagcctcatcgtcgccacgggtttccggatcggtcagggccatcggcaccacgcgctccacgttgtaccacttgtgataggtggcggccagctcttcgagataacgggccaccttgtgcggctggcggtcgtcggccgcagtggcgagcacgctcgggaactgggcgagggcggcaagtacctcgccgtcggcctcggtgtcgagcagggccaggtcggcaccctcgtagctgatgccggcggcggctgcgttgcggtccacgttcttggagcgggcgtgcgcgtactgcacgtagtacaccgggttgtcgttggtgtgcgaggcgagcagggccaggtcgatgtcgaagttctggttgtagtcggagcgggccagcgagtagcgggcggcgtccacgccgaccacggagaccagatcgtcgatggtcacgacgttgccggcgcgcttggacatgcgcacgggcttgccgtccttcatcacgttgaccagctggccgatgagaatctgcatgttcttgccgggctcgtcgccgaaggccgcgcacatggccatcatgcggccgatgtagccgtggtggtcggcgccaagcatgtagatggccacgtcagccgggttttcggcgcgatggcgcttgtcccagtagtaggcgatgtcggcggcgaagtaggcgaactcaccattggacttgatgatcacacggtccttgtcgtcgccgtgcttggtggattcaaaccaagtggcgccgtccttgtcgaagatgtcgccgcgggacttgagctcttcgatggcggcgtcgaccttgccgtcggcgtacaggctgttctcatggaaccagacgtcgaagttcacgcggaagtccttcatggacttctgaatctcatcgaacatcatcggtacagcgcgcttgcggaattcctcgcgcacttcggtatcggcttcgccgagcggttcgccgtcgtcgttcaggccttgatcctggtgggccagtgcggtcaggtccacgccgtcggactcggcttcggcctgaacacgggcggcgatctcgttgatgtaggcacccttgtagccgtcgcacggggtttcggtctggtagccggcgtcgcccaagttattggcctcggcccaggcggcgaccagcgacttggcgaagcggttgatctgctcgccgtggtcgttgaagtagtattcgcgcaccaccttggcgccgttggcttcgagcacgcgggccatggcatcgccgacggcagcccaacgagtgccgccgatgtgaatcggaccggtggggttggcggagacgaactcgagattcagggtctggccgcccagatgggcgttgcggccgtattcgttgaccttgttgagatgcttgtcggtgtcggtcacggcaccggcggcgagtacggtgtccaccacggcggcggccgaggcggagtcaagcgtgatgttgatgaagccggggcctgccacctcgaccttggcgatgccgtcggcttcagcgagcgcggcggcgaacggctcggccagatcgcgcggcttcatgccggccttcttggccagctgcatggcgatgttggaggcccagtcgccatgcgcgcggtccttcgggcgcatcacggcgagcttgtcgacgggcggaatcagctcgtcggtcaacgcgccggcctggccggcggcgacgaggttgtgggcaatgctggaaatcagttcacttaaggcttcagggctcattcttctaaggataccggcgatggcgacaccgtgccgcgtccggtcattgtcggcggccataatggaacgacgtgcgaaagaggtgcatatggccgggctcaacccccaatcattggtcacgttgtggcagatcgaacagtatggttcgttctccgccacggccaaggccacgggttggtcgcagccggccatcagccagcagatcaaaaagctggaggcacagtgcggttcgactctggtgcaacgcacctcgcatggtgtggaactcaccgccaccggttcgatgctcgcccgccacggcgaggccatcgccgatcggctggagcgggcggcccgtgaggtcgaggattatcggcatcatcggtttgctcacctgcatttggtggccccaccgtcaatctgctctactatcgcggcccgtaccgtggtcaagctcagtatgttcacggacatcgagctgagcctgattcagatggagccaccggaggcgatcggtctgatttcccaaggcaaggccgatgccgccgccgtgttccggtacagcagcatcccgaacttcctgcacatcggcgacgacctgaccttccattcgctgggtgacgatccgatgcgattgttggtccgccgctccagcgacatcgccaaacgattcgaggagaccggcgaacccgtgccgctgtccgccgccaaagacgagcattggatcgccggctgccccacctgccgcgcaaatttggtgaaactggccacccgtgccggattcaagccggatatccgccactgcacggatgattactgggccacgcagaacctggtcgaggttggcatgggcgtctcgctggtgccggcgctcgatacacatatcaatctgcagggcgatctggtggcctgtcccattgccgacgattttgcggcgcgcgaggtcggcatcgtgactcgtgccggcgaccatcgcccagcgcttggttcattgctcgaggagctcgagcgcacggcactcaaatatttgagtgccaagtagtcgcacagcgataagcaagcttgcgagcgccatcacgatttcggggagccaggccgttgagcggcccttctgcaccgggaacaatggcatgttatgagcatgaacaacattccccagtcaacgactgtgagcaacgcaaccgccggcgcctcttgctttgatgccaatcacatcgacgtgacgaccatcgaggatctggagcaggtcggttcggataaatggacccgttaccccggctgcatcggcgcattcatcgccgagatggattacggtctggcaccgtgcgtggccgaagccatcgaagaggccactgaacgtggcgcgctcggctacattcccgacccgtggaagaaggaggtcgcccgctcgtgcgccgcatggcagcgccgctacggctgggaggtggatccaacgtgcatccgcccggtgccggacgtgctggaggcgttcgaagtgttcctgcgcgagatcgtgcgcgccggtaactccatcgtggtgccgactccggcctatatgccgttcctaagtgtgccgcgtctgtatggcgtggaggtccttgagattccgatgctgtgcgcgggcgccggcgagagcagcgggcgcaatgatgaatggctgttcgatttcgacgccattgagcaggcgttcgcgaacggctgccatgccttcgtgctgtgcaacccgcacaacccgatcggcaaggtattgacgcgcgaggaaatgctgcgattgtccgatctggccgccaagtacgacgtgcgtatattctccgatgagattcacgcgccgttcgtctaccaaggccacacgcatgtgccattcgcctcaatcaaccggcagacggccatgcaggctttcacctccacttcagcctcgaagtcgttcaacattcccggcaccaagtgcgcgcaggtgattctcaccaatccggacgatctggaactatggatgaggaacgcggaatggtccgagcaccagacggccaccatcggtgccatagccaccactgcggcctatgacggcggcgcggcatggttcgagggcgtgatggcatatatcgagcgcaatatcgcgctggtcaacgagcagatgcgcacgagattcgccaagatgcgctatgtggagccgcagggcacgtatatcgcgtggctggatttctcgtcactgggcatcgatgacccggccgactatttcttcaagaaggccaacgtggcgttgacggacggccgcgaatgcggcgaggtcgggcgcggttgcgtgcgtatgaacttcgccatgccctacccgctactggaggaatgcttcgaccgcatggccgccgcgctcgaggcggacgggctgttgtaaaaattgtggctcccctcagagaggggagccgcggaacggccgaattaatcgaagtcggcacccaacgcttcgagtttgccgcggaagtcggcgtagcctcggtcgatcaggctgatgccgtgcacgtccgaggggcctgacgcggccaaggccgcgatcagatggctgaacccaccacgcaggtccggcacgtcgatgtcgcgtccggtcagcggggtcggtccgaagatcacggcggaatgcttgtagttgcgctgccggaaacggcacggcagcgagcccaggcactcgcggtacaactggatggtggcacccatctcgaccagcggcttggtgaagccgaaacggttctcgtacacggtctcgtgcacgatcgacaggccgttggcctgggtcagggccaccacgagcggctgctgccagtcggtcatgaacccgggatgcacgtccgtctcgatcgccacgggcttcaagtccccgcccggatgccagaaacgaatgcccttgtccgtcacctcgaatttgccgcccaccttgcggaacacgttgaggaacgtgatcatctccggctgggtggcacccttgacgaaaatgtcaccgtgcgtggcgagcgcggcggacgcccaggacgccgcctcgatgcgatccgtcagcgacgtgtgcgtgtacccctgcagttccttgacaccctcgatgcggaaggtgcgatcaacgtccacagaaatgattgcgcccatcttctgcagcacgcacaccagatccatgatctccggctcagtggccgcgcccgacagttcggtcttgccctcggccagcacggccgccagtaaagtctgctcggtggcgcccaccgacgggtagggcaggtggatcttcgcgccgtgcaggccgttgggcgcggtgatgtggatgccgtccttgtgttccttgtccaccgtggcgcccagcttgcgcagcgtctccagatggaagtcgatcggacgtccgccaatcgcgcagccgccgagtgcggggatgaacgcctcgcccagacggtgcacgagcgggccggagaacaggatcgggatgcgcgacgaaccggacagtgtatccacgtcggccacatcggccagctgcacacgcgaggcgtcgatggtcacaatgccgttcgcaccgtccacatccacgtccacgccgtgcagacgtagcaaatcggacaccacatgcacgtcacgaatctccggcacgttcttcagcaccgacttgcccggtgccagcaacgcggcgaccatcgccttgctcacgaagttcttcgcgccacgcaccttgatcgtgccattcaaaggcttgccgccctcgacatgcaacacgtcatccggattctcagccacgccactctcctcaatcaatcaagattcaaaaaatgctaccgtccagtttgccataagccatgtgccgactccgtgaaatgcaccccagccgaactttgatcaccgtgcacaacggatcccataccccccgtcgaatcaaaccgataacgtgatcttcctcacattttccgccacggcgttctccatacttctacgctacgattcagggcaatggcatcagacgccatggccacaagcaaaggagcattcatgaccacagtcgccgtcatcggctgcacgcacgccggcacgttcgccaccacctcgattctcgccgagcaccccgattggaccgtccatgttttcgagcgcaacggtacgctgtccttcctctcctgcggcatcgccctgtgggtgggcgaccacgtatccgacccgaagaaaatgttctactcctcccctgccgctctggccgaagccggcgcgaccatgcatatgcgcaccgacgtgacgtccgtggacctcgacgccagaaccctcacctaccgcgcgctggacgaggccggagaccccgccgaacagaccctcgctttcgacaaactggtcgtgaccaccggctcgcgcccggtcatcccgccgatccccggcatcgacagcccgcatgtgctgctgtgcaagaactgggatcacgccatcgccatcaaggaaaaggcgaaaaccgccaagtcggcagtggtgatcgggtcgggctatatcggcgcggaaatcgccgagcagttcagcgtcaccggcgtcaagaccacgctggtcgacggccttgatcgcccgctggccaataatttcgataagaccatcaccgatcaggtggcggccgcgttcgaggagcacggcgtcacgctcgcgctcggccagaaggtggtcgagttccgcgacaatgacgacgacaccgtcactgtggtcaccgaaaagggcgagtacacggccgaaatggcgattctggccgtcggcttcctgccgaacaccgacctgctcaagggcaaggtggacatgctgccgaacggcgcgatcgtggtcgacgactacatgcaggcgtccgcgccgggcgtgtacgccgccggcgactccgccaccgtgttctacaaccccaccggccagcacgattacattccgctggccaccaacgcggtgcgccagggcctgctggtgggccgcaacatcgagacgccgaccgtgaagtacatgggcacgcaggccacgtccgccgtgcagctgtacgatctctcgctcgccgcctccggcctgacccgcgccggtgccgaacgccgcgggctcacggtccgcgagacctcgctcaccgaggattatcgcccggacttcatgctcaccaccaccccagtcacgtcgattctgacctgggacccggaaacccgcaaggtcaagggcggccagttctgttccaaggccgatatctccggcgcggcaaacgtgatttccatggcgattcaggccggcttcaccatcgaccagctcgccaacgtggacttcctgttccagccgaacttcgacaagccggtctactacgtcggcgccgtggccatgaaggcggcggccgagtaagacggctgtacccaccgcaaaaaagaaaccccggcgtgatgggcgccggggagagaaaggagagaagaagaaagaggttaagttatgcagcttgttcggccgtgattacatataacagcaacagtttcaatgcaacatgggcactgtctgggaatcgtctgggaatcacggcccgtacaggctgttgcttgtttttggagccgatttaccggctggccttgatcttgtgggccagttcggcgtcccacatcgcgccggtggcggacatcaccgagtccgcgccggcgtcacggtacgcctggtagtcggcgggcgagaccacgccgccgacgccgttgatcgcgaaatcgagcccgagcttttcacggatcgcggccagacgggcgaccatgtcgaggccggcgccacgaatcgcattgccgcacacgcctgagcgatcgcggcccgcgccgggcagggcctgattgccattggcatcgaccagtttggcggaaatcgtattgatggtgctgaagccctgcacggtgccgtggcccacggtggaacgcaccataagctccagagcgtcgtcgctggggatgtaggcgagcttgaccatcagcgggatgtcgccgatctcctgcttcacggcctcggtgatgcggcccacgagcagcggattgtggcatagcaggcggttgtggccctcgttggggcagctggtgttcatcaccatgagcttggcaccggtctccttgaccagacgggcggtagtggcatggtcggcgatgtattcctcctcgctcatgccctccacacgcgagccttggaagctcgggaccagcacttgaccgggaccggcggcctcgatggcggcgcgcatgtccggctgccagacgtcagggctctgcgagggcacaccgaagctgttggagatggaaatcggctgttcatagttggtgtcggccagcacgccttcgtccagttcggcgctgcccggcgtcagtgaaccgtccgccgacttggggtgtacggcgagcacgttcgggaacgggttgcagccccaggcgcgcgaacgcacggttttgtaggtcgccagatcgaaacccatgtggaaagcggccgtggtgaaacggctgttgagcagcgggcctgcgggaatgccgaaaggcaggttgaccggctggcccaaaaaggtggccaaggcaccctcggaggcaccctcgctggtggttccggcggcatcggcaccgttgccatccttcagcgcctcggcgaacgcgccgaacggcccttgctcatagttgtcttcgtaactgcggctgacatcgtaaaacggctcaaaatcactcatgcttcaacgataagccaacctgcatgcgcacacgcacactcaacccatcatcgcgccgacaaacgaaataatggcgaaagcggcattggctaccacaaagatgatgaacgtcggagctgcccagccaaagtacgtgtctggaatactacgattcgtacggtgatattggcgcatctctttgccgtatatcacgaatatgataatcgatccgatcacgccgatcacagatagcgacaatgagaatatcaaatatgcgttgtcatcaagatagttgccggcaagggtatcgatggcgccggaaagaatcgcattgttgaagatgtgcagtgcaatcgaccaagccaacgagtattccatggccacgaatcccagaatcaggccaaagaggaacgcgaatgtgccttgcactacgtcgtcatggaacaggccgaacaccattgccgaggtgacgatggcgaagttcttgcccaacggcttgagctccttcatcagtacgccgcggaacagtacttcctcgcaaatcggagcgaccagcccaacgtacagccacatgcttacggtgacgctggattcggcgatgctgtctgacgtgggagaggcaagatcggtgcccagcatggaaaaagcgacctgcaccaacataacgatgccttgcatgcccatgcccagcacgatgaacatcaacgcccagagaggctgcatgcgcccgccgccatattggctgatgtggccaagctgattgggctccccgtacgagtcgcgatgctggccaccaagccagaattcgcaggtgaagatgtcacggtggcgcatgagcagcagaaatccgaacgcgacgaacaccgatatcaggctgatgatgccatcccactgcacgccggacaaatcgctcgcggttattacgccgacgataatggtggcgaccattgcgcccaagagcatcatgccttcataggcgagagtcagtcccattacacgattgaccaccttgcgacgccacgtgcgccatacacggcgaggatcgatcggcatgcccacgggcattgctgcgggcatcgtggcaggcattgcgttgggcattgtgactggcattgccggagccgtttgcacgaatggttgcggcgcagcggaatagggttgtggcgcgtagcccactggttgagcgtagtacggatgagcgaggggctgtggagccgactgttgcgccgggtatggggaataggcggattgcgccggatacgtcggctgcgtgggatacatcggctgggcaggatacgtaggttggacgggatatgtcgggtatacgagctgcgcggcgtattgtgcaggctgcacagcaggtattgcggcttgcggcacaggttgtgaaacaccttgtgaaacaatccgtggaacaccccgtgaaacatcttgtggaggtagcggttgtgcccatgcctccggctgacccgcatattgcggctgcatgctcggcccaggctgaacatactgtggcgtctgtggcatcggcgtctgtgactgtgccgcagactgcggtgccggtcgaggtggcaacggttgcgctgacagcgattgcgccggagccgtatcggaatcgttcgacggattcatgtcattcatggtcatgatgctcaacctaaccgtcattactggatgaatcgtgattatgtccacaaatgtgtacgaattcaggcacagtatttcgaacgctaggacggagttcatgagtgttgaggaaagcgccgccacgccggtgttggtggctgcggtggataacgaccgtatggcgttgttggcactgaagggaatattgccgcaactcctgcccgccgcgcaatggatgtggggcgcgggcaccagtgagacctttgtttgatgcgatgcgagcgacccaataatctcaatcagacacagagccaacggccctgggcctgcaattatggactcgcctttcggcgaggctcaatgctggcctcgctgctgtcgcggctcggcgcagggcctgctgaaaacccaccgggctttcagcaggccgatcgcggctaaataatgccgcgatcggccaacggccctgtccagtctgcgtcctcaggctcgcgggcggactcgattctttcttcggcccagtgtttggcggggatggtcttgggcttgaaggggaacttttcggcgcgcatcttttcgtaggcggcgatgtcgtcctcgtgctgcagcgtcagatcgatatcgtcgtagccgttcatcagacgccaacgcacgtaatcgttgacctcgaacggcagggtcacgtcgccgcaagtgacagtgcgggtctccagcgagacagtcatctcacgaccaggctcttcctccagtagcttccacaggagttcgacggactcctgcggcataatcgcggccagcacgccgttcttggcggtgttgccgtagaagatgtcggcgaagctcggcgcgatgaccacgcggaaaccgtaatcgtgcagcgcccacacggcgtgctcgcgggaggagccgatgccgaattcggggccggcgaccagaatctggcccttaccggcgtattccggcttgttgagcacgaagttcgggtctcggcgccatgcgtagaacagggcgtcatcgaagccggacttggtcacgcgcttcaagaacacagcgggaatgatctggtcggtatcgacgttggagcggcgcagcggcacgcccacgccggtcagtgtggtgagtttttccataacaattttcctttcggggatctctcccccagtcagtcttcgactgacagcccctcgtcagagggggctcacgtgtattggctcagagatcggcgggagacgagattgtgccgcggatggcggtggcggcggctacggccggcgacgccagatgcgtgcgcgagcccttgccttggcggccctcgaagttacggttcgaagtggaaatcgagcgctcgttcggcaccagcttgtccgggttcatgcccaggcacatcgagcagccggcgttacgccattcggcgccaaagtccttgaacaccttatcgaggccttccttctccgcctgcaaacgcacgcgggaggaggccggcaccaccagcacgcggtggatgttctcggccttgcggtggcccttcataatcgcggcggcctggcgcaaatcgtcgatacgaccgttggtgcacgaaccaatgaacacggtgtccacggcgatgtccttgatcggcatgcctggcttcaaacccatgtatgtaatcgcacgttcggcggcggcgcgcttggtggcgtcggcgatcttgcccggctccggcacggaggcggtgatcggcagaccttggccggggttggtgccccacgtcacatatggaccgagcttggtggcgtcaatatccaccaccttgtcgaatacggcatcgtcatcggtcttcagcgtcttccagtacgccacggcctgatcccacagctcgccttccggcgcgtgcggacggcccttcaggtactcgaacgtggtctcgtccggcgcgatcatgccggcacgcgcaccggcctcgatggacatgttgcacacggtcatacgttcgtccatggtgaggttgcgaatcgcctcaccacggtattcgatcacgtaaccctggccgccgccggtgccgatcttggcgatgatcgccagaatgatgtccttggccgtcgcgtccgcgggcagcttgccgttgacgttgacggccatggtcttgaacggcttcagagacagcgtctgtgtggccatcacgtgttcgacttcggaagtgccgatgccgaacgccagcgcgccgaacgcgccgtgcgtcgacgtatgcgaatcaccgcacacgatggtcatgcccggctgggtcaggcccagaatcggggcgaacgcgtggacgatgccctgatcggcgtcgcccagcgggtgcaggcgcacgccgaactccttgcagttcttctccaaagtcgtcaactgcaacgcgctcgtctcatccgggttcgggcgatcgatatcaacggtcggcgtgttgtgatcctcggtggcaatgagctgatccacgtgacgcggcttgcggccggccaagcgcaggccctcaaacgcctgcgggctggtgacctcatgcatgagcatcagatcgatgtacagcaaatcaggagctccgtcgctgcccttgcgcaccagatgatcggcccagaccttctcggccagtgtcgttcccatagtgattcctccaaaaaattccgcgcgaggtattgtgttcgcgcgttgttcgtggtattagcctatgtgcttgcgatgggcccggccatgagcatgccggatattgagatacggtcaaatgatggcctcaatatgactcggacccgactcgaacatgacctagtcatgactcggttccgctccagacatgtctcttcggcatccacgaacgccctttcaacttcatggccaccctgtgagacacttccccaatttgccatttcactatgtgagatggcataatcgcccttattatgactgattcccgggaagaaccattgaacaacagcttgaccgagtccgagccggttgaagacaccaccgccaaggacgatggggaaatccattccggcgttggcgtccttgataaaaccgtaaagattcttgacgcactggaatccggcccgtctacgctgggccagcttgtggccgccaccggtctcgctcgaccgaccgcacatcgtttggctattgcactggaacgccaccgtttcgtactgcgcgaccagcatggccgattcgtactcggctcccgtttcgccgaacttgccgccgcagcaggcgaggatcgtctgctgaccgccgccggcccgatcctgcagaccctgctcgatcgcactggcgagtctgcgcagatttaccgccgccaaggcgatcagcgcgtgtgcatcgccgctgtggaacgcacctccggcctacgtgattccattccggtgggtgccatgctgtcgatggaagccggttccgccgcccagattcttctggcttgggaggattccgaccgtctgcaccagggattgcgccacgccaagttcaccgccaccaagctggccgccgtacgcaagcgcggctggtccgagtccgtgaacgaacgcgaagagggcgtgtgctcgatttccgccccgatccgcaacgcctccggccaggtcatcgccgccatctcgatttccggcccgaccggccgcatgggtgccgcccccggacgccgctatgcgccgctggtgatggccgccggcaagtacctcaccgaggcactggtcaaagccgttcgctagtcatcacatacattgcccccgctggcgggggcagttttgttatgcgctacctaaacaggccggacagttggctccatagcgacggcttgcgcagcaaatcatcaccctcgccctcgccaggcgcggtttggttcaccgcataggtgtaggcgcgtttggaactgggcttgcccaccagttcgccaaactccagcaattgcgtacgcggctcgtaagggtgacggatatcaaattcgatcaatcgcgtggcacgtttggccggagccggtccgtacgtattgaatccgcaggttggcgtagcgataagcaacagaccctcatgttcgccgacgaaaccgttgcgatgatcatgaccagctacgacgccgaaatacccctcgcgcagcgcctcaaactcgtccgactcatccgggcaggaaatgccttcccccagatacccgccggcttgagtgcgatcctcgtccagcacataataggtatccgcatgcttgcggtagccctgcatggcgaaagccgcattggcggccaccggtttgagtacctggtaatactccggcagcggcatgtgctggaacaccattgatttggctccgatatgttcgggcaaagccttgaggaaggccaatgtctcgggcgaaggcgtgccgaaaccgcctccatgcgcatagtcaccggaattcaccagtaccagtcccagtacgttgcgcgtgcaatccacatccatcaccggcaatgcaaaagtgccgggaatggtggacgcggaaatcggcgcatcggtttcttcaccattggttgccgcaggcgagccgtccttatgacacatatatacggtctgcttggccagcgcatcgctcggcggattgatgcaaccgggaaactcgcggtagattccgtcgagttcggcattgctcaaaccgcactggaaatcgtggttgccgtaggtcaccgcccacggtatgccccgtgacgccaaaggagaggtaaattgaccgatggccttgcgcaccaattcacgcgtatggttcaacgcagattcaggaatcgcctcttcgcaccaacggcgtttgcggaagctcttggcaaaggccggatcgtagccggcgatctggttgccggagaaaatcaccagatcaggccgtgtggcatcaaggctggcctcaatcagggcgatggtgtctttggagactttcggcccatcctgaatgtcggcaatctgcagcacgcggaacttgccggaatagtggaattgcagtcgtccgagacgcgcagagatagagaccgggcggccgtcttcggcatcggccggcttgatacggggtttcgacgacatcccctctggcgtacgctgtgtttccgtcatgccctccactgtacacacaaacgaaaaggcccgccggagcgggccttttctacaagttcaactactggagcagaatctctgcacaacatcatcgtcgtaacggtaagtctttccaatgcccgtccaacgtaacagtcctcgtgaccatacactatttgtgggctctgctctgttcagttgttcttgtacctcataatctattcatcactcccgtttctcgcaacctgcagagagtcgttgtgcgttttttatcacaactgttcaatcgcactttctggctatcggaaaacgagctgaaccgttcacatcgaacccgtctgatgttcggtttcgttcgtttcaccgccgctcacggcgtgtcgcgagcacgctagcacactcagaaccaaccaacaccgaactaacatgaacacccgttgaattctggcgcgttcagccgttttccggccacgccagagcttacgatatagactatggcacagatatttgacgcaccctcgaaggcaattctgcgcagccaaatcgcagagcatattgccgaaaacgacaacaacgaccgccgcgtcgatcaggaaggcgaggcaccgctgcccaaggaccgtttcttcgaccgcgagctcagctggctcaagttcaaccagcgcgtgctcgaatgcgcggagaacgaagacatgcccctgctcgagcgcgccaacttcgccgcgatcttcgcctcgaaccttgacgagttcttcatggtccgcgtcgccggcctgaagcgccgtatcgactcgggcatcgccgtgccgtctgccgccggcctgagcccgcgtcagcagctgcgcgcgatcagcgagaccgcacaccgtctgcaagacgagcacgcacattacgcgatcgacaccattctgccggaattggagaaggagcgcatcgtcctgctgacgtgggacaagctcacctcctccgagcaggagcgtctctcgcgctactaccgccagcaggtgttcccggtcctgacgccgctcgccgtggatccggcccacccgttcccctacatttccggcggttccatcaacctggccgtgattgtggagaacccggcctccggcaagtcgcacttcgcccgtgtcaagatcccgggcaacctgccgcgcctggtgccggtggacgacatgaccgacgaggagtccaaggacgagcgttacggcttcatcgccatggaaaagctcatcgccgcgcatctggaatccctgttcccgggcatgatcatcaaggaagcccgctccttccgcgtgactcgtaacgaggacatcgacgtggaagaggatgacgccgagaacctgctcaacgccatggagaaggagctgctgcgccgccgcttcggaccgccgatccgtctggagatcacggacaccactagcccgttcctctcccagctgctcgccgaccagctcggcgtgagccaggacgaggtataccgtctgcccagcccgctggacctgaccgtgctctttgagctcggcaacgtggaccgcccggacctgaagaaccgtccgttcgtgccgaccacgaaccgtcagatcgccgaggtcgagtcctcccgtgcgcaggacattttcgccgccatccgcgagcgcgacatcctgctgcatcacccctatgactccttctccacttccgtgcaggccttccttgcgcaggccgccgcggacccgaaggtgctggccatcaagcagaccctgtaccgcaccagctccaactcgccgatcatcgacgccctgatcgacgccgctcatgccggcaagcaggtgctggctttggtggaaatcaaggctcgtttcgacgaggacgccaacatcgcgtgggcccgcaagctcgaacgcgccggcgtgcacgtggtgtacggcatcgtgggcttgaagacccactgcaagctcatcgaagtcgtgcgtcaggaagcggacggtctacgccgctactgccacgtgggcaccggtaactacaacccgaagaccgcgcgactgtacaccgatctgggtctgctgacctgcgacccggtggtcggccaggatctgactcgtctgttcaaccagctctccggttacgcgccgaagtccagcttccaccgtttgctggtggcccctcgcaccgtgcgcaccggtctaatccagcgcatccgccgcgaggaggacgccgcccgcgccggcaaggaggcctggatcaagatcaaggtcaactccatcgtggacgagaagaccatcgacgccctgtaccgtgcctctcaggccggcgtgaagatcgacatcgtggagcgcggcatctgcgctctgaagcccggcgttcccggtctgtccgagaacatccgcgtacgttcgattctcggccgcttcctggagcactcccgcatctacgccttctgcaatgcggacggcccgcagatcggcgagggtccggcttccggcccggaggtctacatcggttcggctgacctcatgcaccgtaaccttgaccgccgtgtggaggctctggtgcgtgtcaccgccccggagcagattgacgggctcatcaagtacgtggacctgcagatggccgactccaccatgagctggcacatgcagcccgacggcacatatgtgctgcacaccaaggacgacgagggccgcccgctggtcgacagtcaggaatacctgattcgcaagcaccagcgccgccccaattcgcacaactgatttcactcgatgctccctgtcaacgcaagctgactgagggtggttacgatgcccggctcctctttcgagaggatgccgggcatcgtcgttcagcgcgcaaaactacgtagcagcggtccaacgtgacctacaatacaagagatgggtacgaacagtatgagacgaatcgtggaagccgccggcggtattctgtaccggtggaaggatgatgccgagccgacgcaggcatcgtctccatcagcgaaatccaatattgccaccgatggcaccatcatcgcgaacaccacggattctgacggcaaggccacggcagcacacggcgcatcggacgcggctcccaccccggacccggcgcaggccgacagcccggccgcggcggacaacgtactcaaccgcatcgaactgtgcatcgtgcatcgcccgaaatacgacgactggagctggccgaaaggcaaggtcgacccgaacgaatcgcaccggcatgccgccgtacgcgagatcggcgaggaatcgggcctgtccgtggaacttggcccttatctgggcgacatcgagtacccgctgtccgaagaaggcagcaaacagcgccataccaaggatcggtcggcggataccaagcatatccagttctggatggccacgccgatcagcgccatcgacaacctgcggcgcacccatgcgtttggcccggtgcatcgggcggacatcggcgaaatcgacgaagttttgtggctgacgccggccgaggcccgcaagaagctcagccattccaccgataaggacatcctcgcgctattcgttgatcgggtcgaagaaggtgcactggacgcggtgccggtgattatcgtgcgccacggcaaagcggaagcgcgcaagctgtggaagggttcggacgcgaaccgtccgatcacgccgcgcggcgcggctgcggcatacgcgctgaaccgcgagctggcgtgtttcaatccgacccgactggccacgtcgccttgggtgcgctgccaggagacgttggagatgttcgcgtggcagaccggacgagacatggttcatctcgatccgctcaccgaagatgcatacgccgctgcgccggacaccgcatgggagtgtctactcagcgaaatcgagttcgcacttgagcgccgtcagcccatagcgatatgcatgcaccggccggtgattggtggtatgttcggacacctgcgcagcatgtgcgttgcgccgtctttgagcaaacgcctgatcgccgagacaccgttcatgccgaccggcacggcggtggcgctgttcgtcactccgacgcctcatggtcccaaaatcatcgatattcagaaggttcaaccgcttgtctactagacccgcatttcctgattcatccaactcctcggccgctgccgccgcggctcatgccgcgcacaatggtgccgccggcagtctgggcccgggcttcggctcgttgcgtgcggccggagcggcattcggacctgctcgcatgggttcttcacgcccctcgcgcccggctcagctcgacccggctgtggccgatggattggccggtggcatggacccgcaggcgttgagcgagatgagtcatctgtctgctgccgcattgctggatcgtgtgcgccatagcgaagacccggcggttgttgagcgggtgctcacgttggtggagacggtcggcgtggatgaaatcgccgaactatggagcgatgccgagccggattcgctgcctggtgtgctgtggcgactgtatatgttgcgtacgtggatgcgatcgaatcgcgactcgatcgcgcatctgtggcgcttgggtgagccggtggccactaccgcctccgccatcgccggcgtggatcaggctcccagtgaagatgacatcgtgcgattggccgattcgattctctccggtgcttttgtgggcgattttgccgtggcgcttgagcgtgcggcggcgtttaccgatgtggtggcgttgggcttgcgcgtggaggcgcggcgcatggtgacccgggccgaggccaacggcgccttctcctcggatgccgatgagaaggccgtgcgcaccaaagccgcccgccttatgcacaccgccggcagcctcatggccaccgccaaggatttccagcacggtgccaacctctggcgtcgcggacggttggagtagccctgctccaggctccctctgatgagggagctgtcacgggcgatgcccgtgactgagggagagacccaccaaccgcaccccaacaatcagctaccagccaacaccacacctcccccggcgcggcgagccccatcgcaagctatactaagtatccgcgtcggaccgtgcttaagccccgggctccattttttgccgccgcgagcggcccttgcgccgacaggcgctttcgcggttcggcgcttcttttcttttacccgattcacgccccgaacgttgcgatgggcacgaccagtatgccgtcattgcggcgataggccttcccacctcggccggtaaggaacatcatgaactctggttcgcgaacttgggccatggggttgccacagattttgtcgcggaaggatttgagcttatccgcattgtcatcgttcaccttaaggtcactgagttttatttcgatagcaccccacctgccgtcagacaactcgataatgacatcaacttcaagccccttgtcatcgcggtagtaggcgatgcgattgttcgcgcccggcatggccgacagatatacattcaaatcacgaatgcacagcgtttcaaacagatcgccgagcgtctgtgtatcgcgcatcagagtattcggcgcggcacctaaaaccgcagcaggcaacgaaggatccacgaaatatcgcttgggcttggttcgcacacgactctttgcgcggagtggcggctcccaaccctccaaatccgtcagaaggtacaagtccttgagcattcccaaatagctctttactgtctgcgtatccggttcacggcgctcatcgccataggccatatccgcagccagcgtcgcatattttggtgcctgcgatacgttcacggcgagcgcacgcatgagtgcacgcgcggtttcagggttcttgttcatcttgggcacgctgatatcaagcacactcttgatatattcactcggaatttccagagcaaactcgtcatccaaatcaagatttgcgggccacccacctcgacagcaccatctggcaatatcttcaatgttggttgcacattcggcaggctcgaattgtccatcaaacaaaccagacaagctcactacaccggtagattgccctgactcgcacagactcataggccacatacgcaagcgagaaattcgacctgtgccactgtggtgaattgtttctcggtccttcggaatggccgagcccgtaagaatcagctgccccttgcgattcgcattgtcatccacatgacgacgagcggcatcccaaatttgcggcacatcttgccactcatccaccaaatgcggttcattacccatgagtaccaatgccggatcagtctgtgcggccgcaaaggtagcggcatcatccagacgatccatacttcgcgagcgggaaagcgccgtccatgtctttccacaccattttggcccgacgatttccaccgcgccgaatgctttaagtaacttacctaacctgccatcgaccacgcgagcacgataatcaggttgagtcaaggtatcactacgattgttcaaatcgttcattttccggcctttctcagctacccaatcacctcaatatagattttacacctttctcattcccgattttacactatttccattcccggttttacaccattccgattcccggttttacaccgcaaggtgtctagtttcttcctatgacttaatccaccgagaatcaatccaacgaatcttcgcgcacgactgcgagcgctaggccaaactgacccattccgatgagacatatttcacaataccgtagctttttcagctggtttccagaaaccgttgacttactgtccggttcggcctagatacgctctttttcgaatctcatgaaatcaacgtcaacaccttggggaaactctcatgaaggcaaccatcaccaaagcgactatcgcagttctcgccggactcgcgatcctcgccgacgcctttctgcttttttcgatgaagatatccaatagacgccacgtgaatgtcattgccatagtgacggatgcacgcgcacgatgcgagcgtcgagccgctccacgatgtcgtggtgatgcgtggagaacagtacagtcttgccggcatcagtgaaggcgcgcaatacctcaaccactacgtcagtattgcgctcgtccaagccgtcggtcggttcgtccagaacaagcaggtccggattcatcgacatgcagcaggcaatcgccacacgctttttttcaccgccagacagacggtatggcgcccgctcccgcatccgatccaagccgaacaacgtcaccatgtcatcgactctgcgctgtacttcggcatccggcaaccccatctgcaacggaccgaacgcaatctcctcttccaccgacgggcagaacagctgggtgtcggagctttggaacacgaatccgatgcgctgatgcagcgctttggcgaacaggctgttcttcgcctcgacttcctcgcgaaccaccggagtaccgccaaaccgatactcacctgagtccggaaattccagcgcattgatgatgcgcatcagcgtggtcttgccgctgccgttcggcccgagcagcgccacgcgctcaccgcgttcgacggtcagcgaaaaatcacgtagcacggcgtgcgacgaggtttcatcgtcggcgtcgccgtaatctttataggaaaagtcgatgtgattcagttcgaccagcgggtcgccgcggaaccatgagttatctggctgcatggctgcagtttgtttatgattacgctttaatccgaacattattgggctccattcattcgaaccaccctcatcccgaatacaccgccagcgcaatcattgcagcaatgcacacggcatacaccccgttgcgccacgtcagcagacgctcgtggtggatatgatacgtaccgtcaaacccccggcacaccatcgattcagccatttgccgcgcctgcgtattcgcacgcagaaacagcgcgcccatcaactggccggcggacgtcagcttggtccggtcgcggcccacgctgcgcaaccgcagcgcatccagcaactccaccatcgaacgaccgagaatatcgatgaactgaatcgtcacgtcgcagatataaatcaccgaatcagggtagccaactgcgcgcagtccggcaatcaggcgattccacggcaccgtacgcgccagtgcgatcaccagcgacaccgccacgaacgcacgcaccaccagccggaccggcgcactgtactgcccaatcagcaggctcggcaccgccacgaccaggctcaggatgcatacggccagcaccgggccgagcaacgccctcatcaggcgcgccggccgggtcgccatcatcagcagcaccaccgccagcatgatgtacgagaacagcatgttgcatgtgatgttgacgcagacaatcgtggccagtatgcccagcagccgcacgcccggattgaccgagcccagcaccttgtcgaccgggctcgactcaatcggcaacgcatgaccaacctgctcgagtacgctgccgaaatgccccaggttgtgttcgatgaaggatgacttgtcagccggaggatcgtaatcctccgactcacgcatccatgcaggtatcgtcaacgcgcggatgtcttgccgttgccgctcaccgcgagcgccagcagacggaacacgatagtgagcacggcgatgccaatcactgcggagagaatgtagccggcgatgtccggcagaccctgcagcgagtagtcaggcaacagcgcatcccacgagaagccatgggcgatgtactgcggcacgtagttgagccccgtggcactcatgaagtcctcggcgccccactcgccccaggcgtcgccggtggcgagcaggccgatcggggaaagcaccgccaccacggccagcgcaatccacgcagacttgcgcagtccggcgtgcgcgacctgtttgccgtcagcaccggcggtctcggcgaagttcacacgggcattgtcttcgataatctccggtgcggtgcggcgcacgaattcgacaaccaccacggtcaccagaccctcgaccacgctggctacggccaggtgcgggatcagcatggcgggaatcgtcacgttaaaggtgaacgggaagtagagcgcctggccgtcagcggctttgaacagcagcggctgcacgccgagttccagcgccacgcagaatgcggcgagcgtgatgccgatatagccggacacgaattcggccacgcgttccttccagccgtcgggcagcaccttgcgtagcaacacgtacagtccgtaagccacaaacggcagcacgaacgccatgttgaagcagttggcgccgagcgtgatcaggccgccgtcgccgaagagcagcgcctgcagcagcagggccaccgacacggcgaccgtcgcgtactggggaccgagcagcagagcgatcagcgcgccgccgacaccgtgcgcggtggtgccgccgggcgtgggcacgttgaacatcatgatgaggaacgagaacgccgcgccggcgcccaggtaggccatcttctccggcgtgctgttgcggatcacgtagcgtaggcacagcacccacaccggaatcatgatgacgtagaacaacgccccggtggacggcgaaatgaaattatccggaatgtgcatcgccaatgtgacggtgtcaggtacttcgattatatccaacttccctctttttgttgatttcggagctcaaccacaacctcccgctccaggaacgtgatatgtaatatcacaactgtgattcgtctaatgcacaaccatgcaaaatagcttgcaattactagcgacacaccgtgtaccatatatccggtttccgtgttttcggatatttttccgctatattttttgcatatttcgatcattcgttacaaagtgacgcaacaggctctctacactgtggcatgaaggacgtggggattctcacgccacaagcaattttctccaaggagaacggatgatcgccaaagaaatcaccggcaacatcatcagtcagcagtacagcgacggcaaacttaatgtgtcgattgccttcgactggttcgaaaccgataagaagcgcatgcgcaaggtggccgaggacggcaccgagttcggcatcatggttggcaagaccatcaaggatggcgatgtgctcgccgaaaccgaagacaagcgctatttcgcacgcattaaaaccgcacagctgattgagattccggttaactcgatgacggaaatgggacgcctgtgcttcgaactgggcaaccgccacctgagtctcaaggtcgagaacgaccgcgtgctggtgccgtacgaccatccgaccatggaatacacgaagaagatcggttatgaaccgcatatcatcgagggtgggtttgacggcttcctgatcgtcaaggcccacgccggcaccggcacactgattccgggcaccaacaagaccacgggcgacgtggccgaggaggagcaggaagccgaggccgacaaggaattcccggccgaggaggccgccggccatctggatgtgcatacacacgacgcaggtgagggtgagcccgccgaatatgagatgaacggcgtgctgcaccgcccggacggctcccacagccacgacggcggccgcacctggcacacccactgatagccccatgaacatcaacgaaaccgaatcgcgacgtctggccatgctgcaggtgtgcgacagcgtcttccccgtgggcgcgttcgcgctgtccaacggcatggagaccttcgtacagcgcgacttcttgcgccgtggcgccgatttcgaggagtatatgaagaactacctcgaagtcgcaccgtacaaggaaatcgggcagatggtgctggccggcaagtacgccaccgattcgcgagtctcccgcaaagggctggccgagcgactcatcgaacttgacgagctggcctcggccctgcaatccgcacgtgaaatccgtgaaggcagcgagcgcatgtgtacccgcctggtcaagctggccgagcagatggatgccggccaggcgcagacctcggatgggcatcgtgggttcgccaagccaagtcctgccgacaatgccaccgcagccgctgcggattcgcgcgaaaacagcatcatcgccgtgcacgagcatcacaccgaacgccaccagctgcacgatgccgccgacggcctgtacggctcgccgtcgctcgacctgtatgccgggctgattcgcgagcgccgctgccgtggcctgcattcgatcgcgatgggcctgtacgcggctgaccatgcgaacgacgtgcgcgacgcggccatcatgtatggatattcgctgttgagcgcgcttaccatgtgcgccgcgaaggcgattccgctcagccagtacgctggccaagtcgccctgcatgattcgttcccgcgcctcgtgcgcgcggtgaatatcgcgatgacgttgaagcccgaggatctcggcatctccggagcttacctcgacatcgccgccatgcagcatgaaatcttgtactcgaggctctacatgagctaattatcctggctcccctcaaggaggggagccaggataacctcacccgcaaaccacatacctaaccaattcccacataaaggagaaaccccatgtcatacgtacgcatcggcgtcgccggaccggtcggttccggcaaaaccgcgcttatcgaacgcctgacccgcaagatggctgacgaatacagcatctgcgtggtcaccaacgatatctacaccaaggaagacgccgagttccttatcgagcactcacgcctcgcgccggaccgtatcgtcggcgtggagaccggtggctgcccccacaccgccatccgcgaggactgctcgatgaacctcgaggcctgtgaggaaatggcccgcacccacccggacgtgcagatcatgttcgtggagtccggcggcgacaatctgtccgccacgttcagcccggacctggccgacgccacaatctacgtcatcgccaccgatgagggcgacaagatcccacgcaagggcggccccggcgtcacccgctccgacctgctggtgatcaacaaggccgacctggccccgttggttcacgccaatctagacgtgatggcccgcgactccaagaagatgcgcggcgaccgcccgttcatcttcaccgacctgatgggcggtgccggagtggacgacgtcatcgcatggatcaagaagagcgtgctgttcgaggacatgtgatgttttggcccgcccgtatccaaaaacggacgggccgaaacataccgttgcaccaagtgcggcataattgcccatgtcatcgtcaggcaccaatcataagaaggcagcgattcgtccatgggcagtagcacttttcgtctatccactgcattccgccacggacgtaccaaaatcgacgatatttatttcgaggcgccgttcaaactgatgaccccgttcaccaacggacgtcattcggatttcgtcgtgatgctcgcctcccctggcttcctgaggggcgatgaagcccatatcgatatcgacttcggcccaggcaccgattcgaccatcaaaacgcaaagctacgagaaggtgttcgacaccgcggacggctcggccgaacgcaccatcgaactcagggcgcgtggcaatgccaaagccgtgttcctgccgttcccagtgattccgttcaagaacagctcattcatgaacctgaccaccgcgcatatttccgccgagtcagcattcgtgtatgcggatgtggcgacatgtggccgcgttgggatggatgagcgttgggccatgaaacgttttacgaatcgtatgcgcgtatatgtggccgaacccgaagccgtgaccaaggccgccgcagccgaattggcgcaacagcacgcacatcgccgaggccggccttccaaggcggaagccgccgctgcccaaccgcgcgaacatctggcctttgctgaccgcatgctgttggaacctgatgcttttgactacaccgaactcggcatgtggcgcgaattcacccactgcggcgttctctacgctcacctgcccgaactcgaccctagcgacgctgtacaagatgccgcaactaaagaagcatcctccgccgccatccgcgagcgcatcgagactgcccgcatcgccgccgaagacgcgctcatcactcgcatccatgaacacgcagacgccatcggcttcaccggcgagctcggcgtgagccgcgtaatcaatggcatctgcttgcgtgtactgaccacccgaggcgacgacgccttcgacctcattcgagatgtggccgatttcgtgaccgatttcgtggccgaaggctaaaaccaagtggctctcccctttgaggagagccaccagttctctcagaacaggaagtaccgctgggtaagcggcaactcgtacgccgggtcagagtggaccggttcgccgtccaccgtcacttggaaggtttcgggattgacctgaatgtcggcgagcacgtcgttgaacttcagatccttcttgcctaccgtgcggcagccatgcactggtaacacctggcgctgcagctccagcttgcccttgatatcgtcatccacggcggcctgcgaaacaaacgtggcgcaggacttgccaagcgcacggccgagcgcgccgaacatatcgcggtagtagacaggttccggggtcgggatagaagcattcgcgtcacccatacgagagtaggcgatggagccacccttgatgaccatttccggcttcgcgccgaacatggacggctgccaaagcacgagatccgccatcttaccgacttcgatggagcccacgtattcggaaatgccgtgggtgatggccgggttgatggtgaacttggagacgtagcgcttgacacggaagttgtcgttgcggttgttgtcgtgttcgtcttcagggagcggaccgcgctgcttcttcattttgtcggcggtctggatggtgcgggtgatgacctcgcccacgcggcccatggcctgcgagtcggagctcatcatggagatgatgcccatgtcgtgtagcacgtcttcggcaccgatggtctcggggcggatgcgcgagtcggcgaaagagatgtcttcgggcacattgcggtcgaggtggtggcagaccatcatcatgtcgagatgctcgtcgatggtgttgcgcgtgaacggcatggtcgggttcgtggaactcggcagcacgtttgggaagccagcggcacgaatgatgtccggagcgtggccgcctccagcgccttcggtgtggtaggtgtggatggtgcggcccttgaacgcggcgatggtgtcttccacacaaccgccttcgttcagagtatcggtgtggatagccacctgcgtgtcggtttcgtcggccatgccgagtgcagtgtcgatgacggccggggtggcaccccagtcctcgtggatcttcaggcctgcggcaccggcgcgaatctgctcacgcaacggttcggggctggagtcgttgcccttgccaaggtaggcgatgttgatgggcagcgcttcggcggcctcgatcatgcgggtcaggtggaaggctcccgggttgcaggtggtggcgttggtgccgtcggccggaccggtgccgccgccgaccatcgtggtcacgccaccggcgagggcagtgcgaatctgctgcggggagatgaagtggatgtgggtgtcgagtccgcctgcggtgacgatgaggccttcgccggcgagagcttcagtgccggagcccgcttcgagaccgggggtgataccgctcatggtctgcgggctgccggccttgccgatggcgctgattttgccgtctttgatgccgatgtccgccttgtagatgccggtgtagtccacgatgagggcgttggtgatgatggtatccggcgattcaacgtcgagctgcacggagctttggcccatgccgtcgcggaatgatttgcctccaccgaacttcagttcatcaccgtagtgcgtgtagtccttttccacctcgatgatgaggttcgtgtcaccgagtcgcacgcggtctcccgtggtcggcccgaacattcccgcataatccttgcgcgtaataatcttcatgtcaaaagtccttgctgtttttcagctccccttgtcaggggagctggctcgcgaagcgagactgagaggtagtccgctccccgctggcgggagctgtcagcgaagctgactgagggtggcccttagctcagattcccgagaatccaagctcatgcgccttcttaaacgcggcctcccgcacctcagggtcatccaacttcccctcaaccagtgcgctgaagccgtgaatctcacgcgtgccaccaatatcaatcaaccgcactcgatgcgtttcacccggctcgaacctcacagccgtaccagccgcgatatccaaccgcttgccatacgccgccttacggtcgaacttcaggtacttattaacttcaaagaagtggaagtgcgaaccaatctgaatcggtcgatccgcagtgttcaccacgtccagctcgatgtcttcggaaccttcattgagttccaaatcatcgtcagccagcagatattcccccggcaccaacttctcggtggattcgatggggttatgaatagagacgagcttggtgccgtccgggaacgtggcctcgacctccaccacttccagcatctcggccacgccatccatcacatcttcaggcttgagcagcgtgcgaccgtatgccatgagctccgccacagtgcttccctcacgcgcccgctcaacgcattcggcggaaatcaacgcaatcgcctccacatagttgagcttcacgcctctggctttgcggtctttggcaagctgccccgccaagtacagcatcaacttgtcagtctctcgtggtgtaagtctcataacatcctctgttgttgactggagtttttcaggcacaccaatgtgagccctaacatcgcccaataataagagcgttataagaacgggacgtttctcataacgctctatggccataaacgggggtcgaatcaatcacactctcatggattccttggcggcttctacttggtcggggccgccttcgccggtggcgatgaaacggccggaggccaggacgtagtagcggtcggcgcgctcgacggcgaattggaccttctgctcaaccaagaccacaccgatacccttgtcttcggccatcatgcgaatggccttctggatttcggcgacgatattgggctggatgccttcggtcggctcatcgagaatcatgagcttgggacgggtgatcagcgcgcgggcaatcgaaagctgctgacgctggccaccggacagcagaccggcacgtcggccagcaaattccttcaagaccgggaacatttccacggcttcgtcgtaacgggccttggcctctgaaccgtagcggtcggcgaccacgtgcaggttttcgtccacggtcatggtgccaaaggactgctggccctgcggcacgaacgccatgcccttgcggatgcgttggttcggtgcagccttggtaatgtccttgccctcgaaactaatcgaaccggacgaaacgggcagcaagcccagaatcgccttcaacagcgtggtcttaccggcaccgttgttgccgacgatgctcacccattcgccggcggccacgtcgaaactgatgtcgttgacgacggtcactttgccgtaaccggtgttcaaatcctttacttcaagcattgccatgattattcactttctacggcgtcgtgcatattgatgttgaggcgcgttgtatcaccctcaatatgcactgaaaaagcgcattccgggatgcgatggttgttgtcagtgcggtccatattgcgcttcttcctcttacctactcccctcagtcaccttcggtgacagctcgtccgcaattaaggacgggccttgcctgcaacctgctggttcgactatcgtctcgccttcggctacaaacagcccactgggctgtttacttaacgcctcggcctcagggaggggagacagggagttagttttctccgccgcccaggtagatgcggactacttcttcgttgttttggatgtcttcgaccgaaccctcggcaaggatttcgccctggttgagcaccgtgaccgaatcggcgaactgacgcatgaaatccatgtcgtgttccacgatgatgaccgtgcggttcttgctgcatcgcttgagcagctcaccggtctgcacacgctcggccggagtcatgccggccaccggctcgtcgagcagcagcaggtgcgcgtcctgcacgagcagcataccgatttccagccactgtttcttgccgtgcggcaggatgcctgcgggcttgtttgcatccacagtcagattgcacacgtccatcatgtattcgatgttctgcgaaacgccgcccatcggctggaacagctcacgacccttcttacggaagccctcggccagctgcagattctccaacacggacagctcttcgaccaccgatgcggtctggaaggtacgcccgacgcccagcttgacgatgtcgttcggcttgcggcccaacagctgctcgccacggaattccgcggaaccagtggccggcaccagtccggtaatcgcgtcgatgatggtcgttttaccagcaccgttcgggccgatcaggaatcgcaaatcgccgtgctgcacagtcaaatcaagattcttgacggccacgaatccatcgaactcaacgtgcagtccacgaacttccagataatcgctccactggccgccgcgatcatccagcaccgcaagctgatcgtgcagcttcgtacgctcttcaacgatttcggccttcatctgggccgcttcgtcgcgcatacgcttggcttcgtcgcgcatctcaatcatttcggcgcgcaactgctccaaatcggcctgcgatgcaggtgcgggagccgatggattcgagctcatgttcttctcctcactcatgcgttcaccgcctttgcagtagcagtaccggtaccggcaacggcaccagcaccagcaccagcaccagcaccagcaccagccgaagctccaaccgaactctttccgagcccgatcttctccttaatccaaggccatacgcccttgaactgtcccaagcccttcggcacaaaggcaatcaccagaatgaagatcaggccttcgatgtacgtccacgcggacggatacgcctcagacagctgcgtttccgcaaagcgcaccagcagcgtgccgaccaccgggccgagcaaagtggcacgtccgccgatcaccacgccggcgagcatcaggatggacggcgtcacgccgatatcggacggcgaaatgatgccgaccactggcacgaacattgcgccaccaatgccggcgaacattgcagccaccgagaaggcgaacaccttgatggaggcggggttatagcccaagaacttcatgcggttctcttggtcgcgcacgccgataatcaggtcgcccataaacgatttgcgaatccagtagacgataagcaccatggccagcgtcaggaacgcgcagatgtagaagatcatctgcttgttggcgttatcagtcaagtcgtaaccaaagaatcccttgaaatcgttgagaccgttggtgccaccggtggttttcgactggccgataagcagcacggcgaacgcggcaaccagcgcctgcgaaagaattgcgaagtaggcgccacgcacgccacggccgaacacagccagaccgaggattgcggcgataatgcccggtaccgcagccacgccaatcacggcgatgaccggattgcggaagagttcccagaatccaggaaccttggtgatgccgtactgggacatgaagtccggcacttggcccacgccaatgtcctcaagcttcatgtggatagccatcacgtacgcgccgagaccaaagaacaggccttggcccagcgtcagcataccgccttggccccaagccaggccgatgccgaccgcgaccatcgcgtagcacaggtatttggacagcaggccgaggttgtacacgctcagcacagtcggagaaaggaagatcagcgccacggcaatgaccacaccgatcaaagccttatatttcgtggcgtattcgctcaaagtcatcttcattgtcgtttccttacccttctgaagcactcacgcgaggttcctggagcggatggagaccaagccctgcggcctgaactgcaggaacaccaccacaatcaggaacacggcaacctgaccaatcgaggcagaggtcggcagttcgatggacgactggcacaagcccagcacgaacgaggcgataaccgcgcccttgagctggccaacgccgccggccacaacaaccaggaaggcctgcacgatgaaggtcgtaccgaagttgaagctaatcgagttcagcaggctcagcgccacgccagcgataccggcgatgccggagcccaggaagaacgtcacatggtcgaccatcttggtggagatgccggaaacctcagcgaggtcgcggttctcggaagtggcgcgaatctggcgacccagcggcgtgagcttcaggatcgcgtacagcgcagccacgcagataatcgacagaataaagatgaacagtcggcctgcagagaagctgtagccaaagatggtcaccggattggtcagcgcttcaggagccgaagcgtagaccggagtggcaccgaaaatatcgcgtgcgagctgctgcaataccagcgatacaccgaaggtaaccagcagcgtatcaagcggacgattgcgcatacgctccagcagcaacacgtccagcagtaaaccaagcaaaccggctactacgaaaccgaccaccagcgccacggccagggacactgttttattgccgatgaccatgctcatgacgtatgcggtgtatgcgccggccatcatgaattcgccgtgggcgttgttgataacgcccatctggccgaaggtcaacgacaacccgagggctgcgagcagcagaatcgatccgttggacagacctgccacaatttgtggaaataacatacccatgttgttgtgtcctcttctctcagttgctctcgacgctggcgctcaggctcttggcccagctgtaggtcttcaggtacgggtccggcttgatgggaccgtccgacttccagacggtgtggatgagcttgtctgagccgatcttgccgatgtatgaggtcttgtagatgtggtggttttcgccgtccaccttgaccttgccttccggtgcattgaaggtgacaccgtctgctgcagccttgaccttgtccacatcgaacgacttggccttctcgaccatgcccttccacaggtacacagatgtgtacgccgattccatcgggtcggaggtggggcgattggctccgtagcgcgccttgaagttcttcacgaacgtcttgttttgcgcattgttcagcgtctggtagtagttccaagcagtgagctggtccttgacgttgtcaacgccgatagcggaaacctcttcctcggcgatagacatggaaatcaccggcgtggtggcggctttcagaccggaagccttgtattccttgaagaatgcgacgttggaatcaccgttcagcgtgttcaccaccgcatccgcgccggagaacttgagcttgttgacgatggtggtgaagtcggtggagcccattggggtatattcctcgccgaccacttccatgccattgccctcggcgtatgccttgaccacgcgatttgcggtctgcgggaacacataatcggagccaaccaagaacagcttcttgtagccttgctccttaaggtaatcaagcgcaggcacaatctgctggttcggtgcagcacccgagtagaagatgttcgggctggcttccatgccctcgtattgcagcgggtagaacagcagcgcgttatccgcctcgaacacaggcagcatggccttacgcgaagaggacgtccagccgccgaacaccgcggccacgcattccttttcgatgagggtcttggctttttcggcgaacacagccggctcggacttgccgtcctgctgcactaccttgagctgcttgcccagcacgccgccctttgcgttaatctcatcaacggccatgtgcagcgaatcactcaccgtctgttcggaaatggccatcgtgccagacagcgaattcacgaaaccgattttgatggtgttgcctgaggtgtccacacatgatgaggtgtcgcttgccgcagtcgcgttgttctcttgggcctctttctcggccacggtgcgaccccagccacaaccgctggtggcaagcactgcggcaacaatgcacaccgcagcacccatcttcagtctttgcaatcgagtcatatgactcttcctccccacatacgactacattccgcgaacgttgcccgcccgcggaatgtctacgctgattgccgtaccgtgccctgatgcctgatatcgtgctgaaccacttgccgtatatcgacggctggcttccggccgactgcactatacgatggcagtgcctgcgtgaatttccgttgcctgaatatttcatatgcgtctcatacataacgctcacgttacaaaatcaacggtgttacgcggcccgccgtcgaacgctgtttacattggtgtgcgatacgcgcgcgactgccgcccaagtgacttccccgcgaactacgggtaggctggggagtatggaacttcacgttttgaatcatccgctggtcgagcacaagctcaccgtgctgcgcgacaagaacactccttcctccactttccgcgagctcgtctcggagcttgtgatgctcgaggcctatgaggccacccgcaacctgtccgtagttgccgcaccaatcgaaacaccggtcgctccgatgaccggtaagaagctggccaaaccgcgtccgatcattgtgccggtgctgcgtgcaggtctaggtatgctcgatggcatgacccgtcttatgccgaccgccgaagtcggcttccttggtatgaagcgcgacgaggaacaccccactcagcaggtcacctatgcgaaccgtctaccggaggacctgtccggtcgtcagtgcttcctgatcgacccgatgctcgccaccggtggcacgctggttgctgccacgcactatctggccgagcgcggtgccaaggacgtgaccgcgatcaacatcatcgcggcgcctgaaggcatcaagttcgtggaagagcacatcgatccgtccatcgacttcaaggtcgtagtgtgcgcggtcgacgagaagctcaacgacaagtgctacatcgtgccggggttgggcgatgccggcgaccgtctctatggcgtaattgactgattttcctggctcccctcagagaggggagccaatgtgatgggctttttatgcaaatcgacattattgcgccgggacgcgtgaaggaacgatatcttcgcgacgccatcgacgagtattccaagcgactttcgcgctactgcaggctcaacatcattgaagtggcagatgagaaaacgcctgaccacgcctccgaaggcgttgaccgacagatcaaggccaaagaaggcgaacgcatcgccaagcatctgaaggacggcgcgtttgttattgcccttgccatcaatggcaagcagctgtccagcgaagaattggccgccaaaatcaacgaccttggattgcgtggcaccagccatattcagctggtcatcggcggctcaatcggccttgacgacgcgattctgcgtcgtgctgattttctgctgagtttctcgaagatgacgttcccgcatcagctcatgcgcgtgattctgctggagcagatttatcgcgcttataagatcaacgctggcgagccatatcacaagtaaaacgccatacctcatggggcgggaaatcccccatggggcggtaattgccccatggggcggtaaaaccctcatggggcggtatgccaaaatggcttaattccgcggtttcacatattcttcaaaccgccccatgggcaagttaccgcccgatgagcctgtaaccgccccatgggcacatcaataacgccctcaacctcacactgcgtcggggacgaacgcttcgaagatgtggcggtcgaagtagggcgcgcactgggcgagctcatcgctgctgcgcacggtccatgaaaccggcatcgcacccatcgaacgagcgagcttgacttgcggcgaagtgccaccggtccagtcataggccacgaaatcaggacgagacagccagtcgaacgccagtaagccggcggcccattcagccgcaccattcttgctcagcttcgccggccagctcagctgaccgcggcacacctcagggtgatgctccttgtaccaattcaccgcgcccggatggaaggattcgatcacgtatggaccgtcataatcctcaagcagggcgtggcccttctccatcagctcctcggtacgagcatcccaagcgctattgtcgctgaacttgtattccacaatcagcggcgcacggccagccaccactttgagcacgtcggagaacagcggcacatgctggtagtagccagcgggggcggtggaaggcgtgaccaccagcggcggattcgcgtcggcaccgggcagcggcttggccttcagatcgccgggcttgctgccggggaacagcgggatgcgggtgagctcgtcatatgtcaggtcttcgatgcgacgagggtcgccggccacgcgcagcaaatcggcgtcatgcaccacgaccacttggccgtcaagcgtcagctgcagatcaagttcgatgccatagccggcctcgcaggcggcggcgaatgcggccagcgagttttcaggagcgatcggaccggtcatatccgcactgccgtagccggccttgacagccatgcgacgggcaagcgacacataatcatcgttttcggcgatggatcgctcagtggtatcggcttgggcgctgaccgaattatccccaccataatcagcgatatcggtatagccgaccaaaccagaacccgcatcgtgcaagccacgatgggcataccataccttcggaatggagggcacgaaattacgacgcttgtcattgaacgtgcgcggggccacggcccacacggcagcaccggcggcggccacgcctgccagcgccacgtttctccagagcttcgacgacattggaatccttcctgttgggctgcctctagcctaacgcttctgccagccattgtggagtggttggatcgtccggtttcagcgcgcggtccaggtggttggcacgcagcggctcccagctgaaatctgccagcagatcggcgggtttgcaagggattggagtgggttgcagacgcagcaaccaggcgcagtatccgatgatttgctcgggggttacgttgcgggcgcgcaaggctcccatatccagcgaacgttcgcgcttggctaaacgccgaccggccgcattgtcgatgagcggcaggtgcgcatactcggggtgctcggcgagaggcttttccgtgttgccgcattccagctcaaagccgccagccaacagacactggcgaatccacatttgcagcgcggtggagcgcagcagatcacggccgcgcacgatatcatcaacatccatatcgaggtcatccacgaccacgactagttgatagccgaacagtccatcggctcggcgaatcacggaatcgcctacctcgcgggccaaatcgtagtgctgtggactatagacacggtcgttaaagcatgcgacaccatcaacgattccggcatcgccctgctgttccggcggcacggctcccgacagcgcagcggaatcgtcaggcactgtacgttgcttttctcccgctgccggtttcggcatggcgatacggatggaatgctggtcgccgcgaaacagacgggcacggacctcgtcgggatggtcgtgcagcaggcggcggcacgtgccggggtacaccataaagccgtcgccctcgttgggggccgaggcggcgcgaatgtcggcacgcgagcagaaacaggggtatagcacaccttgcgagcgcaggcattcgagagcgtattcgtagcgctcagtgcgctgggattggaacatcggttcgccatcccagtcgaggccgagccaatgcaggtcgtccatcatgagctggtccgcaccggcaaccacgcgcggcttgtccacgtcttcgatacgcatcagcatgcggtcgccacgcgaacgggccgaaagccatgcacccaacatggcgtacacgttgccgatatgcatgcgccccgacggcgtcggcgccaatcgtccggtcactggctctcccttcgtccgttaacactcactttcctaccatatgcgacagtgaacaccttgatgccacggttcttccactcttggggaacacaattgagacggatcggacagatacttccgtttcaaggggctgatttcgatgttgcaggaggtctacttccatttcaaggggctggtagccaagtagacacggcgcaacaatggcggaatggcgttgccataaagccgctgatactcgcggttcggcagaagagcagcccctcgaaacggaagtagacctccgaaagggggcaaatcagcccctcgaaatcgagatagacccacaaagacgaaaaagtgggtatgactgctaccatacccacctgtttaagagattttgcagagaaaaatcactgttgcgaaaccgcccgaactcccctcagtcagcttcgctcagagaggggagccagtgattgtcacttatcttcggtgacgttgtccacgctcacatccgggtcgtcggagacgatctggtcgctggcccaggcggtgaggtcaagatgctcaccaccggtctggtcgaccagcacggtgtcgccatcgtggaccttgccggccagcagcatacgggccagctggtcgcccacttcggtctgtaccaggcggcgcagcggacgagcgccataagccgggtcgtaaccggtgttggccagccattcgcgggccgacgcggagacgtccagcgtgatgcggcgatcggtcagacgctgggccacgccagccacctgaatgtccacgatgccgccaagctcctcacgcgtgagcgggtggaacatgacgatgtcgtccagacggttcaggaactccggcttgaagttcatgtggacggcgtccatcacggccttcttcttggcgtcggcgtccatgtcctcgttcacgaggaactgtgagccgaggttggaggtcatgatcaggatcgtgttcttgaagtccacggtcctgccctggccatcggtcaggcggccatcgtcgagcacctgcagcagcacgtcgaagatctccggattggccttctcgacctcgtcgaacagcaccacggaatacgggcggcggcgcacggcctcggtcagctggccgccctgctcgtagcccacgtagcccggagccgcaccgatcaggcgcgagactgaagccttctccatgtattcggacatgtcgatgcggaccatggccttctcgtcgtcgaacaggaagtcggcgagcgccttggccagttcggtcttgcccacaccggtgggaccgaggaacaggaacgatccggtcggacggttcgggtcggagatgccggcacgcgaacggcgcaccgcgtcggacacggcggcgatggcttccttctggccgatcacacgcttgcccaggtagtcctccatatgcagcagcttctcgttctcgccctgcatcaggcggccaacgggaatgccggtccagtcggagacgatctcggccaccgagtcggcgtccacacggtccgggaccatcggctcatcggccgggttggccgcgccggcatcggcagattcggcatccgcgctttccgcggcggcgagttccttctgaatagccggaatctctccgtacagaatcttcgaggcctcagccagatttccctcacgggtgaacttgtccgcctgcacacgcaggtcatcgagcttggcacgcaggtcaccgaccttgttgtggccggcctgctccgcatcccaacgcgccttgaggccgctgagcttctcacgggtgtccgcgagttcggcttgcagcttgcccagacgctccttggatgcaggatcctcagccttcttgagctgcatttcctccatttcaagacgggtcaccttacgctgcagttcatcgatctcctcaggcgaggagtcgagctccatacgcaggtgggcagccgcctcatcgaccaggtcgatggccttgtccggcagctgacggcccggaatataacggttcgagagggtcgcggcggcaaccagcgcgtcatcgccgattgtcaccttgtggtgcgcctcgtaacgctgcttcaggccacgcaggatggcgatggtgtcttccacgctcggctcgcccacgaacacctgttggaaacggcgttccaatgccggatccttttcgatgttctcgcggtactcgtccagcgtggtcgcgccgatcaggcgcagctcgccacgggccagcataggcttcagcatattgccggcgtccatcgagccttcggccgcacccgcgccgacgatggtgtgaatctcgtcgatgaaggtgatgatctggccgtccgcgttcttgatttcgttgaggacgctcttcaggcgctcctcgaactcgccacggtacttcgagccggccaccatggagcctaggtcaagggagatgagcttcttgccttgcagggtggtgggcacgtcgcccgccacgatacgctgggccaggccttccacgacggcggtcttgccgacgccgggctcgccgatcagcaccgggttgttcttggtacgacgggagaggatctgaatcacgcggcggatttcctgatcacggccgatcaccggatcgagcttgccttccttggcggcggccgtcaggtcggtggagtacttctccagggccttgtacgagccttccgcgtccgggctggtgaccttcgcgccgccacgcacgccgggtacggccttgcgcagggaggctgcggtgacgccgttcttctccaggatttcggccgactggttcggcttgctggccgcgatgccgataagcaggtgctcggtggagacgtattcgtcgcccatctgctgcatttccttctcagcctgggcgatggcggcggtcagctggcggctggcttgcggctgcgaagtgctggagccggatgcgctcggcagtgcgaccaaagcgttacgcacggcggcgccgatggcctgtgggtctccgcccgcggcctcgatgagggagcgcaccacgccgttttcctgacgcagcaacgcatccatgacgtgcagggtctcaacctgcgcgtttcctgcggcggacgcactctgaatcgcgtcgccgacggcctcctgggccatagtggtgaacttctgttccatatcgtattcctccatatcatgcggcccgcgcggagcggctcgcgggcttcgaaagccccgcaagcgccaccgcagaccacaacttgtcgttatctgatatggtcaaccgacctagaacccattctattcccaaaacttgagtgcaggtgactcaagttttggattttggtggggagggtgaacagtagccccctctgatgagggagctcacatctatttcaggaggccgacggcagcttcggcggcggataggatttcgccggagaggatggcgttggctacgccttcgatttgcggggtggtccaggtatcgcgtacgtcggggccgatttcgttggcgtactggcgcaccacgcggtatacggcggcgcccgccgcacccggacggtacggcttgcggaagtcgaaggagcggcaggagcacagcagttccacggccagcacgcgcgcaaaggccggaatcgaccggcgcagcttgcgggcggcggcccagcccatcgacacgtgatcttcctgcatggcggagctcggaatcgaatcgaccgaggcgggcacggcgttgcgcttcatttcggagacgatgccggcggcggtgtactgggcgatcatgaaaccggagtccacgcccgggtcaccagccaggaacgccggcaggccgcggttgcgcgccacgtcaaggaagcggtcggtacgacgctcggagatagaggctacgtcggcagtcggaatcgccaggaaatcgagcacataggccagcggcgcgccatggaagttgccgttggactccacacggccgtccagcgtgacgcacgggttgtcgatggcggaggcgagttccacgcccgccacggaggccgcgtattccacggtgtcgcgggcggcgccgtgcacctgcggggtgcagcgcagcgagtaggcgtcctgcacacgcacggtggagcccgggcggccggcttcgatcagaccagagcccttgagcatgcggacgatgttcgcggcggaatcgccttggccgcgatgcggacgcagcgcctgcaagtcggcggcgaacacgcggtcgttgccgagcatgccttccacgctcatcgcggcggcgatgtccgccgtcttgagtagcaggcgcagatcggtgatggccatacacaacatgccgagcatgccgtcggtgccgttgaccagcgccaagccttccttctctttcaaatcgacgggcgtgatgccggccgcacgcagcgcttcgccgccgccgatcttgcggccgtcagcgttgcgggcctcgccttcgcccatcgccaccaaagcgcaggcggcgagcggcgccaaatcaccggagcatccgagcgaaccgtattcgtagaccaccggggtgatgccggcgttcagcatatcggcgtagacctgcgcggtttccgggcgcacaccggtgcgtccggtgcacagggtgctcaggcgcagcaccagcaggccgcgcaccacctcacgctccacttccggtccggcaccggcggcatgcgagcggatcagacttttctgcagctgcgcgcgctgttccttggggatggaagtggaggcgagcgcgccgaatccggtggagataccgtaatgcggcacggtgtcgtcggccaaatgatcgataaccgcgcgacttagcgccatctcatgcttcgattcgtccgaaatcgccactttggcaccgccgcgcgctacggcgataacgtcctcgatgctcaatgccccaacgcctacggtgaccgtctgctctgccatgttttcctacctctctatcgtgccgagctccacttggtattggatatattcatctcgccagcatggcatatcaacgttacgggactgtccacaatatgcaccgccccgcgccagcgccgcgcgaacgctcctatactcacggctggtttgttatgcgcctgaccgccgccggtgctgcggcgggtgcttgtgggataagagaagaacatgatttttcaggccggttcgctgctgctcgttatcatcggtgtctacatactcaaacatgtccacattttcagcgagcgtgattacaaaatcgtgcagggtctggtattcaatctgacgcttccttgtgcgattatcctgtcgttcgccacgaacaagcacgacatgcgcatgctgtggatcgtgttgttcggcttcttcgcctgcgcgattccgctgttcatcgtgtatttcggttctcgcggcgacgagaagaactaccgcgccttccagatgctcaacgcctcgggcctgaacctgggcgcgttctgcctgcctgtggttcagacgttcatgggcccgtccgccggtctgccgatcatcatgctcgatatcggcaacgccaccgtggccacggccgggtcactgaccatcacacgcacgctgctgcatatggataacaatttcaagtcgctaccgctcatcctgcgtctgcgcaatattgccagggacttcctaagctcaatttccttcgacatctacatgctgatgctggtgttcatgttcctgcacatcacgatcccacagcccatcgttacgctcatcaccccgttcgccaatgcgaacgccttctgcgcgatggccatgatcggactgatgatggagattccgaacaatcgcaaggacaaggtggagttgggcaaggtgattgtctggcgcatggtattcggcgcgattatcgccgtggccgcctagttcctactgccattcgacatgaggattcgcgagatcatcgtgttgggctcgttcgcccctatcacgatcttctcaaccaagttcaccgattcgctaaccggcaacgccaagctcgccggcttctcgctgacagtgacggccatcatcagcttggtggtgatgaccgccctgcacgcacttctgccgggagcgtaaggcgcgttcttggttcccctcagtcagcttctccgcctggacggctcccctcagagaggggatccagaacgagtcacgcccgaacgattacgttgcgcagatcgccgatgccctcgacgtgcacgatggtctcgtcgcctgggtcgaggtggccggaggcgttcggggtgccggtcatgatgacgtcaccaggcagcagcgtggagaacgacgaaatcgcggcaatctgctcggggatgccgtgaatcaggttcgcggtggtgccagacgccatcggcacatcctcgccgttcagcgtgaaggaaatcttggcgtccttccagtcgaggtcgtcacgcatcacaatccacgggccaagcgggcaggaggtatcgaagcccttggcgcgcgtccacgtggggtcgatgccctgcaggtcgcgcaacgtcacgtcgttcacgcaggtgaagccgagcacgtaatccatcgcgttttcaacggacacgttcttggcgatacggcccatcaccacggccacttccggctcgaagttcatgtccttggagcaggccgggtacacgatcggatcgtcggggccaatcaccgaggtggacggcttggtgaagatcaccatgtcttccggcgcgtgggcgatttcggagtggccggcctcgtgcatgaactgggcgtgggcctcgtagttcttggccagaccgtaaaccttggaggggatgaccggggagagcaggcggatgccgtcgccgtcgaccgggtaccggttgccggtaggcttgacctggtcgccgcccagcggatgaccgtcaagttcgatgaggtagtccttgccgtccgtttcgtccttttgtacgaaggcgtagcgcggcgaatcattcaaagaaaaacgtgcgagtctcatgcctgtaagcctactccttggcagttccttccgcagaagcatccgtccaaggagcaagcagaccggccttcaatcgaccaaaacgcacgttcgctgggattgctacttttcggtccaggttttgtcgtacagcgactggccgctttgcgtgtgcatgatgacgcgcaatgatgccttgccgctggaggtcttgcacatcgagcccagcagattcgcggtggattgataggtgctgtccatagcatccagtgaggaagcgacggtatcgcctagcgaggcgtagctgtcgtcgagcacgtactcgtacaccaaggtgtcaccgtcgacacggtagttgaaggtgatgccggtatctgcaaacgtatccgcttcggattcaatggagtccttgaattccgaatagtcgacgaaatcctgaatcgaatcgtacagcccataatcgccgtcggttagatcgtcatgggtttcgtccaacgtgtcgtccagcgcatcgtcaagattatcttgagctttgctcttatcgctgctatcaccgttgcccgaagaggactgactatagaaggaatcggttttcgcctcatctatagccttgctggtgtacgagacaccgccgacgatcagcgcgatgaccagtattacctgtatcaccatgcccgccgcactgatgatgatgccggcgatggccaagcccttgcccttgccgccctgtttcttaatctggttgaggcccacgatgctcaggatcagaccggggagtgagacaaggaacgagcagataaaaccggcaatagccaggccgttgtacttctggttcgcttcaggcggcacactgccgtaagaaccagaccatcccggctggccgttcggttggccgccttgcatatacgggttatagggcgtttgcggaggcacggccccgccgcccggataccgagcactgacgctgccgtagaccggaggaaccgatccgcctgccggagccgtccccggatagggcgaattgggtgctgctggtgcgggcgcaggcgcgggcgctgtcggtgcgggcgcgggcgcagcggcaggagtcactggtggcaaagcctgcgtaggcggtaccggctgattgaccggcgcaagaggctgggtggactgctcggcaggtgtaaacgcctgcgtaggctgctcaacaggagtgaacgcttgagtgggctgttcgcccgctgcgattgcttgggttggagcattgttggcggcggttcccgtttccaccgtcatcgcatttaacggctcagtcggattggcgtcagcttgctgccccggcacctggccgttcggattgacattcggatcagtcatgacatgcactccttcaactgcatcgcaccccacttgcgagatacgcccctcgtcttacgcgccacattgtgcgttacagacaactgtactcctcgtggcgagccttaagtaccccaggaaatttggcttccaaaaacacaaaagcctgaaaccggctattgcctcagcaatattcagtcggtttcaagctaaatcgttaatcctctggtgaaacgacggtctacttcttcagcagaggcgcgacctgttcctcgtaggcggtcagtgcggtgtcgattacgttgtgcatgtcgtagtacttgtacgtgcccagacggccgccgaacacggtgttcggctcggccgcggccttggcctcgtaccgcgcgtacagggccttgtccgcgtccgtgttcaccgggtagtacggttcgtcgccgcgctcggcgaaacggctgtactcctcccacaccacggtcttgtccgggttctgggcatcgcggcgctccgggttgaagttcttgaactcgatcgcgcgcgtgtacggcacgtcagcgtcggagaagttcatcaccgggcaaccgaaatggtcgccctcgtcgtaacggacctccttgaagtccaccgtgcgccacttcaggtcgccaagcccgtaaccgaagtaacggtccaccggacccgtgtacaccaccggcacgcccgcggccttcagcgcctccttgttgtacggctgagactcgtcgaagaagtccacgcccagcgaaaccgtgatgcgcgggtcatcgatcatgcgctccatccacttggtgtagccgtccgcgggcagaccctcccacgtgtccctgaaatagcggttgtcgtagttgaagcgcaccggcagacgcttgacgatggccgccggcagctcggcagggtcggtctgccactgcttgcccgtgtagttcttgatgaacgcctcgtacagcggtcggccgatgagctggatgcccttgtcgttcaggttggccggatcggtgccggccagctcgcccgcctgcccggcgataagcttctgcgcctcggccggcgtgtaatgtgcatggaagaactggttgatggtgcccaggttgatcggcagcggatagacctcgccgtcatgcgtggcatacacgcggtgcacatagttcgtgaagctcgtgaaacgattgacgtagtcccacacacgcttattggacgtgtggaacaggtgcgcgccatacttgtggatctccgcgccggtctccttatcgaagtacgagtacgcgttgccgccgatgtggtcacggatatcgatgatgcgcacgcgcgcgccggtgtgctccaccgcctgctgcgccaccgtcagaccgaacaggcccgcgccgacaatgactaggtctgggtattgagtagtttccggcatgcgcgcattccctttcataaagtcaatatatcaattattatgttcgatttccgagaaaatatactatgattattcgccatcgcggcgaaacccgccactctcccaatagccagtccaggatgttaacttgcttgatgccggcgtggtctgatgtgacttgatttttgttccgcatttcctctcacttgataggagatgatggaatcatggcaaggggcatccgttacacgagggaattccaggagaaggcgctgcggcttctgggcgagtcacgcgcgaaccattcgtcggagacgaaggccttggcctcggtctcgcagagcctgggcatagccccggagaccctgcgccgttggcgcaacagggccgataggacggtcacggcgcaatccgcgcgcgatgcgcaggcggcggccgagctgaagaggctcagggcggaggtcgcggaactgcgcaaggcgaatgagatactgacgacggcgtcggcttttttcgcggccaggctcgacccgacacggcgttgaaggccgcgtgcatcgacgcgtaccgcggccgtttcgggggtcgggccgatctgccgggtgctgtcggccgggccggactgcggtttcctgaccgcccgcggctaccgcgccttcaagacggggcctctcagccgcatggcggcgcgccgcgaggcattggcgcgtgacatcacgtcgatccacggggacgagttcatgcgcgtgtacgggtaccgcaaggtgtggcgtcagctgctcgaccaaggctgggatcccttggaggccggccgagaccaggtcgcccgcatcatgcgcgaactcggtctgcggggcgttcggggcggccgcaggccggtcaccaccatccccgccagggggacgggcggcaggctcgacctggcggggcgcaagttcgccgcccgcgcgccgaaccggctgcacgtcgccgacatcacctacgtgcggctggcggacggctcgttcgcgtacgcggcgttcgtcaccgacgcatacgccagaagaattgtcggctgggccgtcgcctccacgatgcgcaccggggagctgccgctgcaggcgccggaacaggccatcgcgtgggcgcgcgcccacggcgggacggaggggtgcgtgcaccattccggccacggctcgcagtatataagcctggtgtattccacgcgcgtggaggaatacgggatgctgccgtcgaccggcacggtcggcgactcctacgacaacgcgctggccgaacgcacgaacaacacgtacaagcgcgagctgatttggatcaacaggccgtaccggacggtcggcgagctggaatacgcgaccatgaggttcgtctcgtggtacaactcgaaacgactgcacgcctccctgggctacaggacaccggaacaggccgaggacgagtattatcagaaacaggcggcacaaaccgtctcacaatagaggcggaacaaaaatcaggccacttcagccgccccgctttgttatactgagcaccatccacaacacaaataaaggaaacagacttgactctgcaggctacgcctcttgtatcgattatcataccggtctataacgccgaaaaatatctccgatactgtgttgattccattcttcagcagtcatacaccaatcttgaagttattcttgtggacgatggagctaaagattcatccccatccatttgtgacgactatgcacaatccgattccagagtaacagtaattcaccaacccaatgggggcatcgcgaaagcgcaaaacaccgggctcgacgcagctcacggtgattacatcgcgttcgccgacaacgacgatatcctcgacagccgtaacatcgagctactgttgcacgcattgaaatcaacagacgctgacatgagtaaaggacgctggcgtcaattcggcgtctcgcaattaccgaccatctgtaatgaagccgctcagggcgctgacgaaccacaccacattaccgtatttcgtaacccgctacgggcttatcaatccatattctgcaaaagtctgagaattatcggagaacgtttcggtcgtcatactgaggcgcggtatttcaacgaagcaaactggtgcaggctctacaaacgcgagctgtgggacggactgcgattccccgtcggccattatgcacaagacatccgcatggctggccccttatactctcgtatgtataaagtcgccgatgttgatgcgactttgtactactggcttcaggaacccgactcagtcacgcactcaaaacgcaccccgacattttggcacgataatgtactttccgcagcggagaacttccagttcacccttaatcagggaatagtgccataccgcaattacttcggattgactgcgagtgttcgtgatgaaggacgcgggctgcatcatgcgaacagcagcacaggctctgctcaggcccagttcactatctcagccgaagatataaagaactaccaggacgacgttcaaaacatgaaatctcttattcgacggctggccccgtcacaaaggttcctctgcaagatactgtacttcatccgatcaggagaaaatcttatttacaaccgtcgaatccattccatgaaatgacccaaacgcgcgctcactctggttgtggatacacctcttttgtgaagaaaaacatgctggtattcgcaaaatgtcatacttacatgccccgctggtacactctgtaggtatggttgaaagaatactggtcactggagccggcggttatatcggtaggcatgtcgtcaaggcgctgcttgatgatggacaagacgtcatcgcctcggatctccgcttgaacgatgttgatgatcgtgcggaacacatagagaccaatctgtttgaatctggtagcgatatctattccaagcttggaaagccgggtgtctgcctgcatatggcttggcgcgacggtttcaagcacaactccgacaatcacatgggtgatttatccgcccattatcgattcatcaagaacatgttggacggaggtcttcctcaaatcgcggttatgggaactatgcacgaagtcggatactgggagggtgccattgacgagcacaccccttgtcatccggcttccatgtacggcatcgcaaaaaatgccctacgtgaggccacgcttatgctcgcacaagaacacaatgcagccgtgcaatggctccgcgcatattacatcgtcggagacgatctacgcggtagttccatcttctccaaactgctgcaagccgcacatgatggcaagccgtccttccccttcacgacgggtaaaaataagtacgactttatcaatgtcgacgaacttgcacggcaaataagcgcagcggtttcccaacgagaggtgaccggtatcatcaactgctgcactggaaagcctatatccttggctgagcgcgttgagcaatacatcaaagacaatgatctcaacatcacactggattatggggcgttccccgatcgtccctatgattcccccggcgtatggggtgacgcgaccaagattcacgagattctagcgacacgatagatcaacaaaacatatgggttggggcggattccatcgcgatgtaatccgccccaacccatatctgctattagcagcaactcattgagtactacttctcaaccttttggaacatccgcgatacatacgccactactgcatccgtcacgcgcaaaagcatccaagacaagaccgcaataatcaacatatccgccacgaatagtaggtaggcgttggatacgccgaggctgtcaggattgacaatggtgtacacctgcatgatgacttgatgatggactaagaaaatcgcataggaatatttcgatagtgaacctatagccactcgaacgggttgacggtcgaaccactgcgagatccacactaggaacaggaagaaggccacacccaccagtgtgaccgccacgttgcctttcaggatatcggtagactgctgtactgcgagaagcactaccgcagctgcacccaccacatggggcacttttttgataaagcggacaaaatacatcccgaaggcaagttccggcaaccgggtggtcagtaacaaatcagatggcataccttgcgagtccggatacagcacaatcgtcagcacatacaatatcgcgatgataacgccggtaatccaaggatgacgcttcaccccataccgcagcaaagggaatatgacatagaacagcagaataaatcccaggaaccattcgccaagtgtatagaacgtcggtattccggcattagccagataaccatccattccaatcacggagagcagcacactatatttcggtgcctgtgccgcgacgataccgccctggcgcaagaacaggtacacatttgccgcaatgaaagcaatccagaacatggggaagattgatttgcatcgcttccaatagaacctctttagatccagcttctccgcatcctcatgcgaatacatcaatgcagcgccggaaataatgaggaactgagagacaccaagcgaaccgatgtaaataccgaacggagaattcgcaaaaattgggtgttccactaaatatggattattgaaatgcgtgataacaatcaatatcgcagacagtccacgtacccaatctaggtagaatagtctcggcttacgcttcgtgacattaccagtcatgttactcatcctcgtttatgcccaattgcttacgatgcaacttcaccaacgccggtcccagcaccggaacatgtttagtgacgttcttcatcactcgcagtaatgtgttacggaatcgctttccttcagcgatggcaatgcaagtttgctgcaagtcctcacgaatccatggcacagtgatgacctttaccacttctcgcaactcatatgagagattcgtaatctcgatacgtgcataacgatccgagaaaatatacgctgggtaatatccattggcctgtggcacatatccataggcccgctcaatgaagtgtaataacgtaccatctaccttattgggctccggcggaaagtccgtgtattcccatccatggtccagtaagccacgaaatgcttccggacggaaccagaacatagtgcccatcggtgccaccggttctttgtcggcattcaacggaacgtgcatattcagtgtctgttccaagaagtccttggtaccggggaaattcggtccccatgggaacgtgtaccccgggaaatagctggcatggttcggaggagtcggcatagcgatgccgaggcgcggattcctctcgaacaagtcgataacgttggaaacatactccttgctggcaagaatgttctcaaagcacttatacgcgaacccatcaccgatactctgaggagacagctgcgtaaccttcttgtcgtgggcaaaacaaacgtaatcgtactggaacaggtcttccccgcaaccaaccagcagggcactgacatcacgtcctctgttctcaatcaccctgacatcgaagttatatgggaactgcttgcagtattcacgcacaattcccgcgttggcttcggagccaaccgtaatgatgatgtcacagccttcgggcatcgactggatgtagtggaatgtggactccagcagatccatgtaataaacatgaattgccagtgctatttttttgccttccggcagaggaacgctcagcgattgtggcaatacataatcaagatgcaggttcttcatcaaatcggcgacgttcatcgtacgaagcgcgttctgccagatcaagtccacgtcatagtcggtgtggtcccgcaaatattcatataggtccagagcagcgttgcctacggcctgggtcatcacatcacgatacccgtggaagaatgagcgacgtttgaaaatcgggcaacgcttttctgcgaccagtcgtttcgccgcataggtaatggggccgtacgtgaacccttccaagtcggacgtatcgacatatacatcccacttgaaacccttatcggcaaaacgcttggtgaacagggattcatgcagacccacagaatcgtaatagtcattgatgggaggaatgctgtcccagtaatccctgaacgcctggctcgtgtgcaagcttttacgatatgcatggaaatgcgactgaatgtgttccggcagatagggatacgggctgcgtccaaaaggatcgtgctcgacacgatggaatttggtgataccccagaaatccaaatcccgcttgctcatcgcctcgaacatttcggagaacggatacactggccccataatggtggcgttgaatagtacaatctcatcgaattgttccagcttgtgccagccgtaactgtccaaagcggttttgtatgcccatacatcaaaacccttgttctctcgcacaatcagcttactggtataccgcagcagcttctcgcgcccggcatcattcaactttccattgcatacaatggtcaggtcagagaagtgcggcatgaaaccgtcaagcagcttcagcacataatcgtccacgaccccctgagcgtcgtaaaagaagaaaattcccagacgattgataggcgtatcagacgtaagaatcatggattgctctattcctcttccaagtgaagtaaacagacacgaggatatcatatgtgcccgttatcattactggcatccgtccctcagccagtatgatgaatactgattggctgtaccgtatctggatactggaggaatgatgggcagaatagcgctatgcggggtcttcgatattcccaactacggagaccatctcttccccttagtattgcgcgaagagctctcgcgccgaggatacgccggtaacgtggtgttgttctcaccgtttcaagctgaggaaagcttcgtggagaactctaacgtccactcgcttgacgatctcgaacgtatgcatatggaagaaccattttccgcaatcgttgtgggcggaggggagattatccactggcatcgctttgggcaaaaacgcaccttcaacagtaccgactttgaggcttatcctatggataaggtctggctcgtcccttgcttcatgaagatgaagtataatgttccactactgtggaatgcgcccggcattccgttcgacttcgatgcggacaaggccctcgcccactacctgttcagtaatatagactacctgagcgtccgcaatgatttctccaagcaggtgctgattgactgcggtataccggatgcagccattcaacgcgtgccggatactggtttctctttgaagaatgtcgccaccaaccaagaactccacgatgcgcgcaaccacgtgttccccggattagcgcattatgcggtgttccattgcaaccgctttatcccggaatccgaaatcaacaatgtcgtggccacgctcaaggaattacatgacgatggacatgaaatcgtgctgctgccgctggcctatacccatggcgatgaggatatcctccacaccatccacgatgcctgcccattcccctgcctcataccccaacacccgctctctttacttgagatcatcggcatcctgtcagactgcgaaatctatgtgggtaccagcctgcatggatccgtaactgcgtccgtattcggccgtaagacggtaagcttcgattaccagcagactaagaagacacgggacctgtaccaccaacttggacgtgacgctttctatgtcactgatggtaataagctcgcaggaaccgtatcgaacgctttgaagacacagcaaccagtcgatttctccgatattcagcaacagctcaatcaccatttcgacaaactgttcacactgattacacaggggaacatcatcactccgaacccttcttcgcaggctgcacaattctcggatctggtgcagaaatgctttgacgcagaatatcgatccatcggattggtacaacgaatcgacgagctgaacatcgcattgaagagaaacgaggaattcgtgaatcacttcaaaccgcgagctgagtatttcgagagtgagctgaacaaacagctgaatcgagtgcacgagcttgaggagctccaacagcacccggtgaaaataatattgcagaatatcaagcataagtgaggaacgccaagtgacagcatcaatcagcatggatacaactacaacgactcagagtatcagccaagatgataattcctcattgactagttactcattacaaggatttttgcaatttgttatgcataattctaagcaaataattatctccatgttgttccttctgcttgcatttggacagaagctttttagcaacactttttccattgatacacagggcatcatccaaaacaatgatgcactctataaatcatggtttgaacttgaacgttttggcctagtgctgtttaaaaagctgaccggcacctatctctataacaatgcgttagcttcattcaccatggtggtgttctttggcatttccgccatagtatgggcatatctcctatgctcggcttctcgtgccacaaagctgcaaccggcatttttcatgattccttatgtcgcttcacctattttcgctgagatgttgggatttttgctactcggtccggaaatctccatcgctgccacactaactgcgatatctctcatgatgtgggccaatgcagcagccagcaacagtgcaaaacggcgtattttgctagtcatagtctccgttgtgtgcgccacaatcgcgttcacgatgtatcttgccatggtcacgatttttattaccggcactgccatgctctatatattgcagtttggcaatcgtgctcagtgggatgaacggaaaaagtcctcttggatttttttggtgggaagcatactcatcttcggcgcatcgtaccttgcatacaagatactcaatgaaatcgcaatgcatcttgctggcgtgacgaccagcgcctacatatccgatcaatctcgctggggaaaagattcgttcggcacgataatccgcaacatcggtcaccatgcacaagagttgtattccggctccggcatcttttatagtgcactgttttccattgccgcaatagtctttgcagttgtggcagtcgcatgctccattcgcaagcgtatttcggttctcgcagttttggtttctatactgctgcttctcgctccgatgattatgtctgtggtactgggtaccgccccatcagtacgcacagaaatgacctatcctctggcgtttgccttcatgctcatgatgttactctccagattatcgcgcaacacagttcaacaagcaatagcgtggatcctcatcactattgttggatggaaccaagccctcattaccagcagaattttctacaccgaaaatatcgtattcaatcaagatgtgctcaccgtgcaagccattaagaacgacatcgataagctgggactgggcgaatcccccaagcaaccggttgtctttatcggcaatcacacggcaaaatgcaatgatgattgtttcacgccagaacaactcgctctgacgggccgttccatgttggaaatcggattttccactgagcacggtactggcgtgaagcaacaattcataattgatgtactcggggtccactataacggtgcaacgccccagcaaatgaaacaaagtgaaacattggctgaatcaatgcctcactggcccgatccaggaagcgtggcagaaaaagacggcatcattatcgtcaatttctgatcaaccctgaatttcagattttggtttatcgacgcactcaccgcgttcaccgtgctcatcatcgtctgacggcctcgatgcacgcagctccttaatcacgtaaacggtgaatattacggataagaccacatctaggaacgatagtgtcttgaatagcgtattgaaccaaaactgagaaacttcagatatgagtccggcatggtatgccatccacctcattgaggaaggtcaatgcggtgaacgcgagaagatagagcctatccggcaatttattgccgacacaaacggcgataagcagaaacgcgataacaggaatctgatagcgctcatgctgctgagtcgagatgatgaatactgtgttataaaataggcaaaccaataacgtcagaatccgaacgtccagacaacctactgttctcttaatgtaggcaatcagaatggcagtgataagggcacagataagaataatggcgatgttgattttcccggcatcgaggccaaacgggaaatcaacctcttgaagattgacaccaaagcgaacgaagattccccaagtattaaaggcactgagattcaggaaagggtacttccccgatcctccgaggtaaatgcgcagaggaaggctgggaccgcttacaaccataaaaggcaaccatcctaaaagcccgattgccagtccttcaagcgttgcgatcacaatcttccgtaatgggtagaacagtatcacgattgccgcaaagggaaatatgaaataacagaattgaagtttcgtcagacaaccgattgcatagaaggcagaagcccaatagatacgtttcgtcgataccgaataaaagcagaggaaaagcagcagtacgagcaatccgtcgaattggccccaaatggctgcattaaatagcagtgtaggactaaaggtggcgacaacgacagccaaggctttatccatatcggacagtggctgtttcttatcgacaattacatagaccgcaatccccagtatcagattgaatgcaatggggaaaagtttcataaggagaaatgtggaagcgcttgccgagaaatattggagcaccggagtaatcagtctaaaaagtaccggaaccagtggagggtaatccaaggaagggattgaatataaatggaatatattgtcgatcggtgtggttgcccatacatagttgaatgtcattacatcggcaacaccctgatttgagaatgccaacacgacttggaacagccctgaaaagaccaaggaaaaaatcagaatcatgagcagtccgtctactggctgtcttttctttgaaatatgtttcatgcgcttccccttaacggtatctcaatcacagtaatgatttagaagttgactatgacgacgccatctttttccgcaacacttcctggatcaggccagtgaggcattacggaagcatcttgttcgctctgccgtatttgtttattggttggctggttataatgcacgcccagcaccgcaatcatgaactgtttcttgactcccgtgccatgcttagtggaaaaacccacttcgagcagagaacgacctgtgagaccgagttgatcagccggataacaatccggattgcccttggcaacgtgattcccgacgaaaacaactggctctttaggtcgctctccaagacccaattcatctatacgggactttattgcttgtacggtaagcacatcttggttgaagacaacattttctgtgtagaagattctgctcgttatcaatgcctgattccatccaatagcgataatcagaatccaagcaacaattgtgacggcttcgacacgtatggactgcacgtttcttcgtatattgaaaacgataccggagaataaaaccattgtgatgaacgagaaggccagcggatatgtcatttccgtacgaactgagggaatccctcccagtacgaatgacatgatcgtgggagacagcacaatgaggagtactacgaggcaggagaagagcgatattttcttagttatgacatgatatatcgccgtgacaaacacacatagtgcgcaaatggagaatataacgctatagaagataccttctcctgagtataacgccagcacatgcgagcctatgttatgcaatataacgctggacgaatccttaccccaacgcgattggtcgctgatgtatgcattggtcgtcactcctttgaccttcatcgccaaagcgttgagcagcttatacaatgcatatgaaataacgaagataatcacactaccaataagaaatacacgggattcgttcttgtcgtgattctgatatttgctgtcactgtatctcaggacatagagtatggccgttccggtgatgaaaaacgtgaccatagctagatacatggtaaatgaaagcgtggcacatacgattgaggttacaatcaacaacgctgatagttttttgggtctatttgcgttactccacaacattaaggacaacgcaactaagaaactcgccacagatatttcagggccgagcaacagaaaaccgagcatttccgcaaaaataggagaagccacataaggtatcataaagaatgccggttgaagctttgccttggtggtggatccacaaagcaaatacgaccatattaccgctgagatcccaaagaagaccaccatggtgaatgatgccagtgcattattgaactggtaggttccactcagtttcttgaaaactactagcccaaatcgttccagctcgaaccacgatttatacagcgaatcttcattttggatgattccctgtgtatcaatcgagaaggtattgctaaaaagtttttgtccgaatgcgagtaacaagaatagcacggaaacgatgagctgccctgcatagtgcttactgaattgcaacaatccgcacacggaatatacagtcttttcctctgcggtagaggtctctgttgccagtgacatcaacggtctcctcccggtatcttgaagtacctccttagctcaagtatcgtcaaacgctaagaccggcacttgcaattcgattgttcgcagttttggaaacaacggcacgaaattcatccaggcacggaaaagcctcgtcattccccgtaatatcggcaatgccacttacagcattgtttcaatgtgataccttgggcaatgcttggactccagatagattttacctacacattcgccaacaatgcccaatgaaatcataatgaagccaccgataagccatatcgaacacatcagtgacccccatccggccatcgcatgccccaccgttaatgacaccatgacatagacgaatatgacgattccgaccaagaccgataatgccccccacaccagtcacgaaacttaacggctttgtcgagaacgaggtgatgccctgaatggcaaaggaaatcatttttttcgacgcaacaaggagatcaaacttatgatgaagaacttcggctgtatggcgcaatccttcggcctcgttgtaacaaggcaacacgaaatacacaataggctcgtcacggttttcctcatgtatcgccaattgctcagcatattcagtagacaacgccatatcgctccagactcctagccaaccatactctcacggcgactttgtaatacagtaaccttcactgacctactactatcagttatctattgccgtaaactgtattgcacggtcactcagcacaccctgttcgccattccggtcatttctgatggcaaagtaatagctattgtcatcattcgtgaacgccaggaactcgggcttttcggcatcctcatcggtctgtgcacgcaacgtagcgaaaattcgatattcaccattgttgaacatatccagtggaatcgaatatttcactgtatggtggccgggtacgattggcatgcccttgcactccgtttgcgtgtcgacgtcataaacttgtccgcttctacgggaatcctgcagaacaattcccaaataagcagggatatcctcgttaaactcatactcaatagagaattcaagaggcgtcttgccatccacaacctttggcccatcactggtcacgttgagaatcggcacccgagaattcaacccgttaggatgaacgtatttcttttctcccttggtcttgaagaaatcattgttctgagcattttccaagctgtactggtctgccacattacgaggttcaccagaacaaacgatctccccatcgcttatcagtatagctttgttgcaatacttcttcatcgaatccatgctgtgtgtgaccaggatgaccgttttcgttggatcttccttcacactcttgaagaaagcatcgcacttcttctgaaatgcagcatcaccgaccgctaacacctcatcaagcaccagtatgtctccttgagccttaatggcgaccgagaatgcgagtcttacctgcataccactggaatagttcttcagcttctggtccataaactcgccaagctcggcaaactcaacgatatcgtcgtacatcgcatcgatttccgaacggctgaagcctagcaacgcaccgttcagatacacattctcacgaccggtcagctcaggattgaacccaacaccaagttcgatgaatggtaccagcttgccacgaacatccacggttccctgctcgggcacataaatctgggagataatcttcaataaagtagatttaccggagccatttcggccaacaatgccgaaaaaatcacctcgtcggacatcgaacgtaatgtctcgcaacacatgctgctcggtgtaccctttgattcccttcgtccagttcaggaatgccatcttcaaaccacttgcttgctcggtcggcaaccggaatgacttggctacatgcttgacgctaagaacaactgggctctgacgctccagactcacttcataatcacttttcattgcttacagcacctccgcaaacttggcattgtgcttgcggaatacatgcacacccaccatcaggattaccaaggtcaacacatacggtacgaatggtagccacctgctgttgatatatgtccacactgtcggcacatattccggtgacagcaaattatgacgaatgtccataatgacctgggtactaggattcaacatcaggaacttagaagcccacgcaaaatctggtgcccgctgggcaatcatgctaatcggatagataattggcgtggcatagaacatagcttgcatcagcacttcccaaatgtgggccacatcgcggaagtagacatacaacgtgctcagaatcagagatatccctaatgccaacaaatacaactgcaatatgttaaatggcaccaacagaatacgccacgtataatgcgcgtgggcaaagaaaccaaagcatatgaccaccaccatgttaatgccaagggaaatcatggaccccatggtgttggatgctacgataatgtagttcgggaaatgcaccttacgcaataagtctccgcgatcaacgatgccgcgcataccaacggtggtggcctccgtgaagaaagaccacaagcaagtaccacacagcagggaaatcggaaacgttggggtgccatcagagaatttcaggaaccggacgaacaccacatacattacggcaaatagcatgagcggtttcaataccgaccacgccatgcccaaaaacgagccctggtaccgaagctggaaatcagttttcaccagctcctgaaataccactaatgaatagcggtacttgttcctcacccactgcacaagtttcttcataaacatccaattctagcaagaggcgtatcggcaccagccttggctagcgcaacacccagcttacgctcgtgttccagttttaatagctgctctagaaatctgaagctatgccacctgttccgtgcaatatgtccatccttgtgaagaactcattcttattaaggcatcagaatgctaacatagtactcactgacggctaccatatacactatgactcaagaagtgtttaccccgaaaaacatcattgtgaccggtggctgtggcttcatcggctctaattttgtccactatgtatataacaaccatccggatgtgcacatcacggtgttggacgcactgacatacgccggcaaccttgacaacatcaagtcattgctcggcgaccgcgttgattttgtgcatggcaacatttgcgacgccgagctactggacaagctggtacccggacacgatgcgatcgtgcattacgccgccgagtcgcataacgacaactcaatcgccaacccggagccgttcctgaaaaccaatgtggagggcacgttccgcttgctggaagcggcgcgtaaatacgatgtgcgttatcaccacgtcagcaccgatgaggtctatggtgaccttgcccttgacgaccctcataaattcaccgaggaaacgccctaccacccttctagcccctattcctccacgaaggccagttcggatttgctggtccgtgcatggcaccgcacctttggtgtgcgcatgaccatctccaactgctccaacaactatggtccatatcaacacgtggaaaagttcattccgcgacaaatcaccaatattctggaaggtatacgtcccaagctgtatggtgacggactgaacgtccgtgactggattcacaccgatgatcactcatccgccgtgtggaccatcctcaccaagggtgttttgggagagacctaccttatcggtgccaacggtgagcggaacaatatcaccgtgctgaaggacattcttgaagtcatgggcaaatcccccgatgatttcgatcacgtcaaggatcgtccgggacatgatcgccgttatgcaatcgactctaccaagctccagactgaactcggctggaagccatgtcacaccaatttccaaagcggtctagaacacaccatcaagtggtacaccgacaatcgtgattggtgggagcccgtcaaagctgcaacggaagcaaagtacaagcagcaggggcagtgagcttgttaccgcttgggaaaacgtattggaatcgataagaaagacggaataaatgtcattggaattcgaaaaggaactcaaggtcaccaagaccaatattcctggcctgctggtatttgacttaccggttcacggagataaccgtggatggttcaaggaaaattggcagcgcgcaaagatgacagctctgggacttcctgacttcggtcctgtgcagaacaacattagtttcaatgccaaaaaaggtgtaacgcgcggtatccatgctgagccgtgggacaaatacatctctatcgcaaccggtgagattttcggcgcttgggtagatctgcgccccggcgacagcttcggccaggtcttcaccacccgtctagaccccagcaaggcaatatatgtgccgcgtggagtcggcaatagcttccaggcgttgcaggatggcaccgcttacacctatctggttaacgcccattggagcctcgaacagaagaagacctacacgttcgtcaatctcgctgatccggagctcaacattcagtggcctattccactggtagattccgagcgctcggaggctgacctgcatcatccaatgctgaaagatgccaagcctatggcgcctaagcgcaccatggtattcggcagtaacggcaaactgggccgcgctatccgccgctatgcggaaagccatggcctacacggatttgaatatcacgacaccgatacgttcgatatcgccgatgctaaagcctacgccgccattaactgggacttgtatggcaccatcatcaatgctgcggcattcaccgccgtcgatgaagcggaaacgccgggaggtcgcaaaaatgcatggagaaccaacgttcagggtgtcaagaatctcgcccgcatcgctactgagcatcgcatcacgctagtgcatatctccagtgattacgtattcgatggtaccaaggagctacacaccgaggatgaggaatttgctccgctcggcgtatacggacagaccaaggccgcaggtgacgctctcgtagagaatgtaccccaacactatctgcttcgttccagctgggtgattggagagggacgcaacttcgtgacccgtatgctgggactggctcagaaccacgcccatgccgaggcaccttccgatcagtttggacgcctgacctttactgatgacatggctaacgctatcttccatctgctcgatggcggtgcctcgtatggcacatataacatgaccggttccggacgcatcgcaagctggtatgacattgcacgactcgtcttccaaactgctggagtcgatcccgataccatcaccgctaactccgtagctgagtatgcccgtgaacaccatgctgccatgcgtccgcagaattgctcgctggatctcagcaaactggaagctaccggatatcaccctcaggattgggagcaatctctcgcgacttatttggcaaaggagcttgagcagcgatgaaaggcattattctggccgggggatccggcacacgcctatacccccttaccacggttacttccaagcagttattgccggtgtatgacaagccgatgatttattatccgcttagcgtactgatgatggcaggtattcgtgatatcctcatcatttccacgcccaaggatttgcctaactttgagcgtctcctgggagacggttcgcagtatggcgtgaatttcagctacaaggtccagccttccccagacggactcgcccaagccttcattatcggcgaagagttcattgcgggcgaaccatgcgctcttgtgctgggagataatatcttctacggcaatggtttgggaaagacgttgcgtcgagcggcatccgtgaagcatggcgcaacggtattcggctactatgtggacgatccggaacgctatggcgtagtggaattcgataaaaaccacaaagcgatttccattgttgaaaagcctgagcatccagccagcaactacgcggtaacgggactctacttctacgacgagcgcgttaccgaattcgccaaacgagttcgtccttccacccgaggcgaattggagatcaccgatcttaaccagatgtacttggacgatgattcattgacggtgcagacgttgggtcgcggttacgcctggctggataccggaactatggatagcctgtatgaggctggggagtttgtgcgcactgtgcaacgtgcgcaaggccttcccatcgccgtagccgaggaaattgcctatgaaaatggctggattactcgggaccagttgcttgaggccgctgaaaagtatggcaaatctccgtatggccagcatctgaagagtgtggcggaaaaccggattatcagtcaaccatctgacgatccacagcaagcctgattgcactctttacagtagttggattctcagataaggcccggcgcattactgcgtcgggccttatctgaggcttctgctgttttcgtgggttaggttcttggttgtggtaggcgtatgtcgagtccgccgcagcggagcatgacgagggcgatgaggttgtcgacgtggcggaagccgtaggccatgcggatggtgaccttgatcctgttgtcgggcgcgtcgctcatccagctgacgatgtggaacctgtcgggcacgcgttcggcgttcgggcaccaccggccgacgcacgagtcaatccagcgggccccgtcgccggcgacgaccttgatggaggcgcgctgttcgggcgtcaacgccttgaagaacaggtcgaacacgtccccgccgaccccgtcgtgcgcccagatcacccgatgccgctcgtggtcgacgaccacggtcagatacgcgtggcccttcctgtagccggtcccgtccacgccgaccgcggtgagcccgtcgaacggcgaggacatcgacgccttgacgcgttccgcgacccgacgggcgacggcgccggcggtcctccacgacacatgaaggaaaccgctgaccgtcttccggttcgcgaccgtcatcagccacgcgcgctccacctcaaaattgctccagcgcctgcagcggcagctcccggaactcctccgtataacgcacacccttagccatgatcccatcatctcctatcaaacgaggggaaaagacggaacaaaaaccaggtcacatcaaaaccagaccacttcatctttagacaccgaacgcataagtcttagtgtccgcgagtctcccatcagaggtatatacctcataatgagtccaatatataccctttttgggcttccaaatcgcccacggtcccttgaaaccttgcacccatttgctgcgtctaacatcatagattttaatctcataatgggcagccgcattatttgaactttcccccagcaacacatgattgttctgccatcccgcatatgttgccgccacacgcgttgtaccgggtgcatacctgaaagcgattgtctgcgatccgataatcttgcgagtccgagagtcacgtgcttccacgtgtagccaatagtctcctaactggtccacccaacccgcccaattggcacctgtccaatcggtgatggttttccaacgtttgctggataaattatacgattgccatttgtaatcaatatccgatgaagggtaatcaaccgatgctccgacagcaatatcttcagagcgataaacccaagttatttgaaccgcgggagtgaattgatagttgccgaacgcattcatatccacgcgaccggaaatgccgttgatggagccgccgctcgtgtactgccagccgcggtcgttcgtggggaacgcggtgtactgcatggtggagccatactgggcgacccaacgggtcttgccgtggatgttggagctgttgagcgcgctgttcaggtagctcgtgtacgagtagacgctcagattgttgtaaccggccgcctgcagtttgccgtaccaggagttcaccataccgtcgtacacgctcggactcgttgggctcttgtgccccgtgtacgtccagttctccagatcgtagaacaccgggtaactcaggtcgcccggattcacgcctgcctggcgcagcaggttcaccacgtccgcaccctcggatgcgccgtcggccgcactttccgcatacgagaagacgtacacgccgaacgggatgccgagacgcttgcattcgctgatgttgcgcttcgcctgcacgtcgaagccattgccccagccgtagctcagacggatgatcgcgccctcgacgcccgcgttcttcaccgcctgccagtcgatcgtgttctgccatgcggacacgtcgatcacgcccttcgcctgctgggcgaacaggttgttgcgcgcgtcgaagaacgcctgcgtaccgttgtacgtgccccagtgcgcaccgtactcgttgttctgcaacgcggcgagcttcaccgacgcgttggccgcgcgcgtcttcgaggagaccgcgttcacgtcaccgccgttcgcagcgaccttctccttcacatccgcggcactcaccggaatgaacgactcgccatccgtcttcgccaacggatcgggctgcttgctctccgtgcccacgatcttcggatcggtgaccgtctcgcccgtctcgatgtccttcaactcgccttccggcgtagccgcatattgctcggacaccaccgtcgcgtcatcggagatctcggcggacaccttgtccggcagctcggcatccggattgtccggcatcgcgtcggcagccgtctcatcggcgactgtcacaccgttcgcgaccggacgcgtcgcggaagtcgcggaccgcgcctgcgagcgcgcgtcggatgaggttccgtccgaggcggtcgcggaggccgcggaccggacgccggacgcgtccgcgtcggcgttcacatccgcgagcgcgctggccggagtgacgcacaccgcgcccaacatcgtcaccgccgcgacggacgtcaccgccgcgatcacgccgcgccccgcaccggacgccgccgcacgcgcacgcaacgcacgcagcatgcccgtcgcacgcgccgcacccgtcgcgcccttcgcatccgagccgtcgaaccgcttctcttccaccatgcgtaactccttgacgcacccatcccgcgcacccgcacaccgccacgcgttccgatggtcgaccggactctcacacgcgggaacaggcaggcgggaacaggcgtaatcccaacgttttcaaccgcgtctcagtctaatgtgcgcggcggataaggcgggcggagcgaagcggacaaaatcagcggaactccgccgcacattccggcgacggcatcatcctatcttttgagaagatacttcctgtttctgctgcgcggcggcgcagtggcgagaacgactccacgctcaacgagctggctcaacgccttacgcgtcgtaggaaggcctctccctgagcgacggctgatttcgtggacatcaagtggcgtatccgccgataatacggacagtatcgcggattccgatgccgtaagccccttacggcccccattcggcttcccaccatcgaccttctccgctagtgcgtaccgatcagggccgatttcatcggccagccccgcttggaccaatctatgcaaaatcaccctgatgtcgtcggaatccagatacagcgcgacatgcaactgcggaaccgtcatatcgccatgcctcttcaacaagagcaacgccatacgttcatgacgagtcaaggggacgcccacatgatcaagccagtcacggttctcctgctgctccacgccgtagcgtccaagaacgaccgtgaaccgatcgggagtcgctcggaacacaggttctcccagtgcatgggatttcatctcgcgaatcaccagagggatgccggagccaccgccttccacggtcacatcattcgcatcatcatacggtatctgatgaagcagctgcatcaacgtcgcattgcggcagcatgacacgccgctgccgatcgtggccagcgtgaccccaccccataatccgccaggattcgacacctccacccgatcggggtagatgtccacggtcacggattctccgaggaattgcgcatcatattccctgtgaaccacggcattggcgacgacctcgcgcagcacctcctttggaatctcgctatcggtacgggctccgacccccacgacgaacgtgggagcccgcaggtttttggcgatggcctccaccgcctgttcgattgcctccggcatattgccgtcgcattgcacacgatccacgaaacgcggaccctcaaccgccgatttctcgacacccggatgtgcgacgacgtcaatgatcagcttgggatagtactgctgcgggtactgtccggcggccaacagtcccgcaagacgcacctctccaaccttgttcaccatattcaatctggtcatgcgctcaagacgagtatcagtcccgcgcagcgtcttggaattacgatgctcagcaagcaccctgtccaccgcctcggcattcagatcggagacgtcggcttcagggacaaccatacgatccgcggaactgagcgtcagggcatgggtcatttcgaacacttcggttggcgacaatctcaaatccttgtcgtccacacggcggtacccaccggtttgcggccctctcgccgtaagatagcagggtttgtgctgaatgccgttttcatggatgtcgatgaccaggaacgacgagccgttctgctcgcatcgggaaacgtcatactccggaggattcgtcaaccgtgctccttgcggattgccatctcccataccatccatgaactgcgatgcaatatggttggcgtcgaatcccggaacaggcgagaaatccccgtcctcgctgattcccaacaacagcacgccgcccttggtgttggcgaacgcgctcacactctcccacacgctggtgccgatggtccgagcacaggatttcgcctcgaaacgggcatcatcgttgccttggacgcgtagatgttccagcacctcggcgatatcgtcattcgtccacatcatcatcccccttgatcagctcatttgtcttatttgttgcgaccacatggatccaagcggtcgcctccaatcgacttcaaacccacgtctgaaatctcatgataacgtgaagataaatactctatgatgagattatcatcattgcatcatgataagctcatgacatcaagaaccggtttatgacaagcggcacgaacacgcatgccgaacagcaacaggaacctgaacgcaagcatcaacatgtaaataccgaaattgaccgaaccaagaaaatcacgggaaatcacgcacgacattacgcgggtaaactatctatagcacatgagtatgggccgggaccaggatgagacggcttcgaactgagtatgaggatgggaagatgatcttcgagacaaacacgcagaaatcggacatcacgagcgccggtggcgatggttccggcgagcgcgccgaccgccgcgaccagccggtcgtgtatttcgtgcttccctgctacaacgaggcggaagggctcgtgcacacggccgacgtgctggccgccaaagtcgcacatcttaccgaaaccggacggatcagcaaacaaagccgcatcctgttcgtcgatgacggttccaaagacggcacctggagcatcatccgcaatctgcacgaacgcgacgcacacttgttcggcggcgtaaagctctcccacaaccgcggccatcagaacgcgctcctcgccgggctcatgaccgcgcgcgcctacggctgcgacgccgccatctccatggacgccgacctgcaggacgatgtgaacgcggtcgacgggttcatcgacggattctgcaacggcgacgaggttgtctacggagtgcgttccgcacgcaagaaggacacatggttcaagcgcaccaccgccgaagccttctacaaggtgttcgagtggatgggtgccgagacggtacccgaccacgccgattaccgtctcatgagccgcgagacgctcgacgcgctcagcgaataccacgaagtcaacctgttcctacgtggcatcgtgcccacactcggctaccagaccagcaaagtctactacgagcgcggcgaacgcgaagcgggcgaatccaaatacccgttgaagaagatgatcgccttcgcgattcagggcatcacctcgttctccacgaaaccgctgagcttcgtcaccggtgccggactgctgtctatcctggtagcgattggcatgttcgtgtacgtgctcgtctcgctcgggttcggccacgccatcgccggctgggggtccatgatgatctccatctggctcatcggcggactcatcatgctctccctcggcatcgtcggcgaatacgtcggcaaaatttatatggaatccaaacatcgcccccgttaccgcatcgaaaccacactgtaggaggggccggcggccagcggacggcccctcctacagtgcttggattatatctattttgtcctcatcacacgagtcaacgcgtatagcaatgccccctgcttgaggcggaaatgagaccgtcgccgttctcctgccttgctataacgaagaggtgaccattggcaaggtggtgcgcctgcgcagtggccaccggcatcatcctgctcacgtatctggccttgtggctgcaatatacgcccgccgacgcgactggcgtggatggcatgcagttccgctacttcctgccattaagcggcatcttcatgctctgcgcttgcgaatgcgttgccgggttgcggcgacgcgtgggtcacacaagccacacaagccacacaacgccgcgcgactcaagcactgcatccaaatctacagccgtaccttccgcagtagacgctgcacgggcttgagcaccacggtatcggcaatcaccgcaaatagcagcgccgccagcaacgtagcgccaaacatcaacacgctgatacccgcatacgaccatccgtccgtgggcgcgggaatccgcgggccgatcagcaccttggacagcggtgagtgcaccaagtaaatcgtgtaggaatatccggccagccagataatcgccttacgcacccgcgccgacgtgatgtgcacgtcgtaccggaagaacaggaacgtcgccattaccaccatcgcaaacgcaaccgtgaccgtgcggccaacctgcatctgctggccggcgaacaggtacggcgtggcgacggtccacgccagggcgaacggcgccaacgcatacaagccgcgccgcgcccgcgtggacggcggatagtattccaacacgaatcccaacagatagtagaccagcagtccccgccaggggaatgactgcaggaacgtcaacgggtatccggcaagattgcagatctgctcggcggcggccacggcggcggccaggccgatcagcagccaggcgcccgaccggcctatcgcgcgcatcatcgcggccaggaacggcgtcgccagcacgaaaccggcgagcatgaacacgaaccaatagacggaatcgtcatacccggagaacagatcgaacaacgttccagacacagcgccgccgaccggacgatggtcgatcaccaggtaggcgacgaatcccatgccgcccgcatacagcagatacggcacaatcagcgagataaaacgtttgtagtagtagcgcacgtacggcgcgaggctgctgggatcggcttggccggcaccgccgcctgcccgggcatcagagccagagcccggcagacggcccgctgagtgggtgctcaccggccggtcggcgtcgcacgtcaggttgaaccggcccgacaccataatgaacagcggattgcagaccatgaacaacgcgaacagcacggatcgcaccgtttccgcgctgccggcgagggtcatcttgacgggcatgtagttgttgatcacgtggacgccgatgaccaggcacatcgccaccacgcgcagcagatcgtagttcacgtcgcgcggcctgccggcgacgccggaaacggtggcgtcggaaacggcgacgccggaaacggaatcgggcatggtcatcacatggatcccgtcagggacttcagatcgaccgggcagctgatctggctcttcagcttgtccaaggtgtccaggccggccgagggatcggaggacgcgcccttatgcgcgtcgttcttgccgccgttcgcaccatcggcgccgttcgcaccatcggcgccgttcgtatcggccgggcactcatccgtcaccttaccgttggagcccgtctcgacgccatccgcattcaccaccggcgtggttaccacgttcagtggatgtgtggcatcgctgctgacccgaacggtataggcaatcgtcaattcttttccgggctcgatccactgctggttgaacataatgtactgacggtcatacaggctcgcggtgttggtaccccatgaatctatatcagcctgcacagcggtgatttcgccaccgtacggggcggtaagcaccacgcggtacagcatgccaccgagcactggattctccgagccgccattaacgaaatcaggcaacgattcggccttagccttagtcagcgtgttcttcatggtgaaggtgaccgtgtattcgtcaccgagctgatcttccgtaaactgacccagctgcgtgttacgcacggctgtcgtgatgcgcttatccagcacgccagaatacagggcattctggctggccgaggcgtcgccgcaggtttttgtgaccgtggtggaggtcttcagataccaatcctgcttgccttgctgcagctccgaaagatagatgccggtttcaggtacctgactgtcagcagacaactcgccactggccttatcgtcgataagtccggtggcaatcagcgcctcctgctcatccggatcagccatccatagcttgaaatgaccgctagcgctggtatctctgattgccttcaacagcggggatgcggtggaagcattcgcgttaccaagcacgtggttcataattgcttgagccgcttcggaaacgaagttgttctgctgctcgaagtccgggtaatccgtgtacaggtctgaagcgaagaacggcaccgtggtggtgccatccagcactcggccgtccgaaagcttgaccttgcctgtggctcccagcaatgcctggaggaatacgggatcgaatgacaatacacccgctacgttctcgtcttcgttgcctttctgatacagccacatgtatttgttcatctgtgccacacgctggaattcggggtcgatggtcgtggtagccgggtactggtcaaaagtgtcgccaaatacctggcgctccttcagcaccgtagcatccattggcttctcaggaatgtcccaaccagaagtggtggcgaaatcaccgatggtaatcgtgcccttatctgccgtgattgcggcgatggtgcccaccatgccgcccgccgaacgcagctcggccgggttctgcaccatcaccagatacgtgcgcttgccgtcctcgccaagcagttgcggtagcaagttaatgaggccatcgtattcgctgagcatcgaatccacggtcttgagcgcagccttttcggcttcgagcacggtggccaccttggcgacgctcggagtcggcaccttgttgagcttggtgagctgctgcgagatatccttatgcgcctgcttgacgatatccggcatatccatcagggcgctgacgtccaccgagccattcttcagggagaagccctgcaatcgtttggacaggttcagcagatcagtgaacggaccgttgaccagcgtatccacggaagccagcatttcgcgggcagcggtgatgtcgctgccaaatcgcgaatggtcgcggaagaagtcccactgcgggccgttcagctcctcgttgagatcattggtggcattgaccaactcttgggagatgtccgacagactcttatcgctgccgcagccaagtgccgaattggccagaccttcggcggatgtcagcacacgctgcgcatccgcggccattctcgagacggatgccgcgtagagcgtgcccacacaggtgacgctggccagcaacgtcagcagcagtacaaccaccactcgcgcccatatcggtgtacggctgaccagcgaacggccgttgccacccacgtgctggggagtcttcaggtttacgggacccgtctgctgatttgcagcgctattcgtagatgcggagcgattggatttcccgttaccggcatggcggcttctcctacgccccacagccttatggctcgaatgccctgaagtgaatcgcatacttatcctgcccgaaaatctgctcagctcatactcttatccagcggcgcgaggccacgcttccggatgccggactccgggtgaatccggaatcgcagacatgccggagcacacgtgacgccacgcatatctcatgccagtgtaccgatgccaccgaaatagaccgagggtttatcccataccgggtgcaaatccccgcatgaccaccacatcgctgtcagaatgttctcagacttcattgaggggtataacagtattgcgcaagaaaacggtcactaaacgcaacaatagttaaagccgtattgatctgttcggcttaggagaacgggagaggtaattacatgttcgtcctcagcaacgcctggcgggccctgacacgttctaaaggacgtacggccctgaccgcgttcatcaccttggcggtcaccttcggcacagtcgccggactggccatcattcaagaagataccaacgcacacaccaccgcgtacgatcagcagaaggccacgttgtccattcgcccgactgcggctacgtggaagaaggtctccgctacggactcggcttccaccaagcattacatgacgtggacctcatacaccgaatacgccacgctcgtccggtcggccaccaactcgttgaacttcacggttaccgaaaccgtgccggcccgcgtgagcggtgatttgaaggccctggacggcggatcgctgggctcggcctccgatgatgagaccggcggccagctcatttggcgagccttctggaccgaggatgccgccaaggccagcgacctcggtaccttcgaaatcgtggacggcaaggacctgagctacgacaacaagtcctccaacccgaacaccaccggcgcactggtctctgaagcgtttgcctccgccaacaacctgaaggtgggcgatacgctcaaggtggcggccgcctcggacgcccagaccacggccaagctcaaggtgcgcggcatctacaagtacacatccgaatccgccgtcgccaatccggtgacggccgcccgcaaccgcgagaacgcgatcttcaccaactatcagaccttcgccaaggccggactcgacccacagtccaacgacaagaccgcctccggctgggcgatgccggatctggacgtggtgttcgacaccggtgatcccgctacatacaagtccttggtatccaccctcaagaagtccaagctgcccgccaagggatacgaggtgtcttccccttcgctggaatcctacaacgcttctctggagccgctggatacgctatcctcgcgcgcgaagaccggcaccattgcgttggttgccgtgggcggcgtgctgttgctcatcctcgtgctgtcaggcgtgtggacgcccaagcgtgacgacgagatcggcatggcactggtgtccggcgtcactcgcgggcgtttgggatggcagttcatgctggaagtgttcatcgtcaccctgcccttctacgtaattggtctggtcggaggcgcgttcgccgccaagccgatcggacctgctctggcatccggccataccatcccggtgacatcggacctgatttggaccatggtctggtatggcctgggttcaatcctgatcctggcgattcttgccgccctgcgccttgcgttcttcagcgcgaacaagctgttcgccgccgatggcgactggggcaccgtgagcgagactgaggcgattgaaacggccgaaaccactggcgctgccgagaccgatgaagctgctgaggccaccgctcatgatgccggcgaggccaataagacgaccaccacaaccgacgatgcggaggcacaggcatgagcgacaagaacaacgatcaggaactcgagaagaccactgacgcaacggctgacgaagtgacttctgagactgagacgaacgacgccattgaatccgttccagctgactccgtgcagttcagcgtgaccttcgatgacgttgatgacgaaagcactgttgacgatggtatttacagcgcactggcatctgccgaaaccggagcaaccgacgagaccagcgaggccgaagcagacgccatcgcttcggccaacgcatccgccgaagtgaccgagcgcaatgccgcccgcgtcaacgaaacactccgactggccaaaaccgatcacaaagacgcattggccgagcatgcggagcctcagggcaaagcggccgaacccaccatgacgctggcctcgcgtatcgatcgcgtgttggtgggcggcggttccgacgacattctgctcaagacctacccgacctttgccctgaacaaggtgacggtcgccggccccaagggcaaggtcaacatcctcgatggcgcgaatttcttctgctactccggacacgcatacgcgctgctgatcagcgacgaccccgattcgggcatcaccgccgacgccaaacgtcgcgcgctgatgggcgtgatgagcggtttggccacgccggtgtctggcacggtgatgaacaagagcgccaacattgttgagctcgagcccgtggaactgcgcggccaccgtctgggcatcgtaccgcagctgcacgccgtgcaaccgaatctcgacgccgaacaaaacgtgctgtacgccatgaatgcgtccaaccgcaacttcctgaagcccaagccggtgatcgcccgcgaactgctggccaaggtcggcttctccgaggccaccagcggcgtggccgtcggcacgttgcctttggtgcagcagcgtttggtggccatcgcccgtgcaatcagcaccgaggccgaagtgctgatcctcgacgagccgacacgagggctgaacgcggatgacgaggtgaccgtgttcgccgcgctggccaagctggcgcacaccggtgacccgaagcattgcgttatcgtgctcaccgcatcacgcgagatcgccgaagcagccgacacactcttcaagatctgatctgtccggtagcaatacacaccagacacaccagcacaggctcttgaagctcacgatgttcggatacataccaaacatcgtgagctttttcgatttcgaggggctgatttgcgtgttccgggaggtctacttccgtttcaaggggctggtcatccgccaaaccccgagtataaacggcttcatgccaacgtcattccgccgtttttacgccgcgtatacttgggcaccagccccttgaaacggaagtagacctcaggaggatgccgaatcagccccttgaaacggagataggcatgtcgagatgtccgaatcagctcctgacaatcctgccgcggctcattgccgcgctaatctgaagataaatctgaccgtacgaggcgaaacctgataatcatgaccggatatattcccacactggagcagatcgacgagttgcaccgcaaaatcgcgccgtccaaggcggcgtacgagctggtgcacacgcattgcgtgattgtagcgaccatcggctgccagatcgtgcgccggcagaacgcgctgttcacgcgccgctgcacattaccgaaggacgcggaggtaccgcccaccgcaggcgtcaccggcggccatgtgccgccgcgtctgctcgacgagcatttagtactcatcggcggactgctgcatgacatcggcacctaccgcgtgttcaagcatgacggctctgacgacgaaccgctcaaattcagcaagaaacgctacattctgcacggtcttaagggctacgagtatctgctcgacgagggcgtggacgagtccatcgcccagttctgccgcaaccataccggcgtgggacttacgcgcgaggatgtggtgcgccaggagctgccattgccaccagccgactatgtgccgatgaatctcgagcaggaagtggtgatgtacgccgacaagttccatagcaagtcagtgccgccgaagttcctgcaggtcgaggcgtatacggcccgagccgagcgatttggcggagagaacaaacaacgatggctggatctggtggccaagtatggcgtgccggatattccggcgttggcggagaagtatgggatgcggatgatttgaggctcaaggccccctcgtcagagggagcttatgaagctatttcagatggaacggagacggtaggtgccgttgcggttggaggcgatgatcatctggtcgttctccagcacgttccagccttcctgctcatagccggaagaggagaccaccacaccggcggagtcgccgttgtcgtcgcgcagctcacggtagcgcatcacacggtagtcggcggcctgcgcgccacggccatactcgtcgtagatttccacgatgcgcgggctggtcttctcacgaccggcggcgcacagggcgatgagctggtcctcggactgaatcatgcagttgtagctggacttcgggtaggcttggcgcagttcgcgcacggcctgggccacagcctcgtcgagcgggaagccgaagccgatgtattccagaatcaccgcgaagaagatagcggagtcggaacggccgccggtggagaggagcacgctgtggttcaccgggtatgaacggttggtgacgatgttgcggccattggcgtccgagatatcgccgttgtggatgaagctcaggccgttcgcatagaacgggtgctggttctccatgatgagcggcagattggagcttgccaagcgcaggtgccagatggcaccgcgagacggttcgtcggccagcgtctcaaacgtgctgtcatgacgggccgcgatggtcgacttgtagattcgggtgccggtttccggggtgggtgcgccaccgtcgcgcacgtgcggcgcttcggcgggatcggaaagctgggctacaccccagccatcattgtggatttcagacagttcacggaaatcctcgacattgtcttgccccaacacggcgttgagactcaggttgaagcctgccgtcgcgtatcccagtaatctgcacatggtatttcaacttaccgaaaccgtgtggcgacgtgcggcgaccgttatagccattctttatagagcgcatcagcgccgctgcaaactggtatgttatcgcttctgtttggcggagcgctgaggcttggcggcgggtttgccgttcttggccttgcccttatcgcctttatcgccctgctcagcgaccgcagcggcggcagcggtctcagcgatcttccgctcctcggccgatacggcggcatcgagctcctgtaccaatcgcccaagcccggacgtggtgtccatcgggtcggggacggcggccgggtcggccactgcacgagtcggcgtgggcgtcgtgatggtcttggccgtatcggtgcgcttcagacgtggtgggcggcgggtggagacgaacagcggctgcacctcgaccagcgggttgtaaggtgccagaccgaaccacttaaccggcgagccggccatgcggcggattgcgtacttggcttgcaacgacagggcaccgcgtgcggaaaccttggattccggcatcagggccttgtgaatcagcacgtaacggatggtgccgatgtccggatcggcgtcgaccttggggtaaatcgacttctgcttaggcagttcgccggttttggacaggtcgtgcatgatctggtggatgtacgccgggatggactgcgaaaccttgaagcccaaacggaagcgcacgcggtagatgtagttcgtgccgaagtcctccaccgagtattcacgggtgaacggctcgtcggtggtttccacgctgactgcccaccaagcacgggcacgcttggggtggtcggcgaagatggagaagaagatgtccgtgtcgagtcgcttggtttccgagtcggaggtcaggtacacgatgttgtccgcaaaatacgggatgcggaaatcaccgtgcagcttgtcgagcgcgggtaggaagtcgttgggccgcatgtgacggcgttgcgcacgttcgagcttggtgccctcattccacgtgtacatgacgaacagaatcgcggcggtcagcaacatggtgaaccaaccaccgtgcaggaatttggccatagacgcgatgaagaacatagcctgaatcgccaagaacagcacggtgaacacgatggcaccgacccgcttgccggaatgccataagtagacgccgagcaacacggtggtggtgatcatcgtaatggtcaacgccaggccgtacgcggcggagatgtgttcggaatccttgaagatggcgagcacggcgagcgtggccacgcacaacacgccgttgaccaccggaatgtacagctggccgcgcgtacgggccgggtaacgcacctgcagatggggcatccagttgaggcgggtggcctcggaaaccatggtgaacgcgcccgtgatcagggcctgggaggcgatcacgccggccgaaacagacagaatcacggccaggtaccgcacgttcggggtcatcatctggaagaacgggttgagcgacttcatcgcggtgtattgcgggttatcgctattggccaacatccacgcgccttggccgaagtagttgagcaccagcgcaaccttgatgaatggccaggtgaagtagatgttgccgcgccccacgtggcccatgtcggagtacagcgcctcggcaccggtggtcgagaggaacacggtgcccatcagggcgatgccggcagcattgtccgggctgaacaggaatttgatgccgtacaccgggttcagggccgcgaacacagaccagtcgttagagagattcgtgacgcctacgatggcgaggaagctgaaccagaccagtaccatcgagccgaatactttgccgatgctttcggtgccgcgcgactgcacggagaagagaatcacgatgatcacgacggtaatcatcagggtcaggcttgggttttcgtcgaacaacccttccaatggcggcagggtctgcaagccttcgactgcggaactgatggaaaccgccggggtaagtaccgaatccgcaaggaatgccgcgccgccgagcatggcgggaatcgcgagccatgcgccgtacttgcgaatcaacgagtacagtgcgaagatgccgccttcgccattgttgtcgatgcgcatggcgatgagcacatatttgacggtggtgatcagcgtaatcgaccagaagaccagcgacagcatgccgagcacggcctctcggtttacgctgccaagccctccctgaccggcaaggaaggtctgcgcggtgtagaggggcgaggtgccgatgtcgccgtacaccacgccgagcgccacgatcgccatgccccaggtaaccttgtctgggctggattgcaagcgggcccaccatcggccgaggccgcctttcgaccatgcgctggcgattttctcggcttccttggtttcggcttccctctgcttggcgagtgcctcgcgctcctccttggtgagagtgcggcgggacaccttgggagcattggtaaaggtgtcggccctcagcagtgcttcttcttcctgtcgggccttggctttggcggcgccagcctgggctgtctgggcctttgaggctttttgggcgcgtgcggtcctttggttcgactcagccatacgttcagtcctccattgaggtggagatcatccccctcgcttatgtcaggtacatcatggtagacctcgttcacaattctgacaaattttacaagtcaacacatcgccgcgacggccgcacacccggccctcacagtccgtatacggcgcgggcggtatcgcgggtgccgcgcgccacatccgcgatggacaggtcgagcgtatcggccatggcccgcaaggtgtaggggatcatgtacggcgcgttggtgcggccacggtacggcatgggcgtcagatacggcgcgtcggtttcgaccatcgcatggcccagacccacaatccgcagcgattcgcggataccgtcattgcctttgtagctcacggtgccggagaagctcagataccagccatgttcgcgcgcaatctcggccatctcacggtcgccggaatacgagtggaatacggtgcgttcgggcgcgccgtcggccagcagagtctcgatgacctcgcgatgggagtcgcggtcgtgaatctgcatgggcaggcccagttccttggccagggcaatatgcgcgcggaaagcctcgcgctgcagttccttggcaccttcgccggtgcggaagaggtccatgccggtctcgccgatagccaccacttgctcggggtatgtggtggcgaggcgatgtacttcggcgagcgcgtcctcgaaagacgtgtcatggtaaggcttgtatttgaggggcagaccatccggccccggcacaccgcgatgcccgtggagcacggactcgttggggtgtattgcgagcgccgcgtgcacattacctggatgatcgagggccatctggacggcggtcatcaggtgcggcagctcgcaaccgcagtcgatgatacccccaatgccgacagattgcgcctgcgccagcaattggtcgacgtcgtacaccgggacttcgggctgccccttctcctgcgcctcatggctcatagcgcgcgcgaaagggattacggaggccacgtgagtgtggttgtcgatggtctgggcgtcgtccggcaatgcttcaggtgccggggcccagctacggtcgcgatggtggtgcttgctcatggtttctcagtgtaggctgtttctcagtgtaggctaccgtcagcaacgctcgtaaggcagtccggtaagacgttcgactacacgacgggtatcgccaatctcggccgcctgaacttgccgtctcttgccacgagcgcaacattcccgggaaagtagcgcaaccggcaagcgagatggccaccatcctgccgccttttctacctcatcagcccattttctacctcattttgataaaatatgatgcagaaaagttcgtatgatgcagaaaatgaggcagtatgagatcattcgactacatcgaatactgatcgaacgcgcgtgttccgcctacacgcaagcaatccgagatggacataccgatccattgcttgctatcgccatgttcattctcgatttcacctgcatacatccgttcaatgacggcaacggccgcatgagtcggctactcacgctcctgatgctgtaccgcaatggctatatggtcggcaaatacatcagtatcgaacaccttatcgagcaaagtaaaagcacttattatgaggcgctggccgcaagcacccaaggatgggacgacaacgccaatgattatgcgccattcacgaactacctgcttggcatcatactgtccgcgtgcaaggaattcgacgaacgcatcaatctcacggcaggcggcagagcgcagggagcaccgcgagtagccaccaagggaatgcggattgaagcactgcttgatcgatccctagttccactctccaaggccgatattctcgctcgcatgcccgataccagcaccaccaccattgagcgcacgctgaaatcactgttggactccggtacgatcatcaaaatcggtgccggtcgcagcacccgctatgtgaaacgccgctaaacgcatccttgtgcgcaacatctcgtcactcttccggcgctccgctggccacgcgaatcatcgcgtactgggactcgtagaggcggtagtacgcgcccttggcggcgagcagctgcgcgtgcgagccgtgctcgacgatctggccgtgatcgatgtagaagatctcgtccgcgttctcgatcgtcgacaggcggtgcgcgatgatgaagctcgtgcgccccttgagcagatgctgcaggccggcctgcatcgcctcctcggtgcgcgtgtcgatgttgctcgtcgcctcgtccaggattaggatacgcgggtcggcgagcagcacgcgcgcgaaggcgatgagctggcgctggccggccgacagggtcgatccgcgctcctccaccaccgtgtcgtacccgtcgggcagttccatgatgaactcgtgcgcgtgcacggccttcgccgccgcctcgatttcctcgtcggtggcgtcgagcttgccgtagcggatgttctcgcgcacgttgccggagaagatgaaggtgtcctgtagcatcacgcccatctgccggcgcagcgatgcgagtgtcacgtcacgcacgtcgtggccgtcgatcgtcaccgagccctcggacacgtcgtagaagcgcgacagcaggttgatgatcgtcgtcttgccggcgcccgtcgggccgaccagcgcgatcgtgcgccccggttcgacgtggaagtccacgaggttgaggatgttacggccgtccttctcgtagcggaacaccacgtcgttgaagtcgacgcgcccgcgaatctgcggcaggtccgccgcgtcgggcttgttgcggatctccggcgtgacgtcgagcgtctcgaagatgcgctcgaggtacgccgaacaggtgatgagctggttgtagaagttgccgatgttgatcaccggattccagaagttgttcgcgtagccgacaaacgcgatgagcacgccggtggtcacgttcacgcccccgaagcccatcacgccgacgaagtagatgaacgagatggtcatcacggagatggtctgcacgcccggccacatgaggaactggatgtgcacggcgtgcatccacgcggaacgcacctcgccctgctgctcctggaaggtcctgaactgggcctgctcctgcgcgaaggtctgcgtggtcttcacgccggcgatcgactcgtggatgtaggcgttcaggttgctctgcttgttggagagcttctggaaggcgcgccgctggaagatctgcagcacgcgcacccagatgatgagcaccgggaacaggatcaggctccacagggccagctgccagtcgatcacgaacatcacgatcagagtgatcacgaaggtgaacacgtcggagatcacgttgatcagaccggagctcagcgtgtccgaaagcgtgttcacatagttgaccacgcggatcaggatcttgccgtgcgggcgcgaatcgaagtagctgaagggcagcgtctggatatgcgtaaagatatcgcggcgcatgtccttgagcatgagctggccgacgcgcgtgatcgccaccgtgcggtagcgcagcccgaactcgtacagcacgatcagcgcggcgaggattacggcgaggatgccgagcttgccgaggtccttgttcgggatcgcctcgtcgatcatgatcttggtcaggtacggcacggcgacgacgatgcagctcatcgagatgacgacgacgagaatgcgcgccacctgtgacatatacggtttgagatatttgccgacgcgagcgatgtcgtggaggttgatggactcctccagctcctcatcctcgcggaatgtattgcgttgtgccataaatcctcttctaaaacccctgtgcggcgccggactggagtccgagctgcttgtggtagatgtcccagtagcggccgtgtgcggccacgagttcggcgtgggtgccgcgttcgacgatacgtccgtgctcgagcaccagaatcaggtcggaatccttgaccgacgagatgcggtgggcgatggcgacgatggtcttgccgccgtccatctccttgaggtgcttctggatctccgcctcggtctccatatcgacggccgaggtcgtatcgtccataatcaggatcgacggattgtccgcgagcgcgcgggccagcgacaggcgctgcttctgcccgccggacaggcccacgccgcgttcgcccacgacggtgtcataaccctgcggcatcgacctgatgaaattgtccgcgccggcgatctgggccattttctggatatatcggtcgtcgctatcatcgctggcacca

SEQ ID NO: 3783 - DNA, 2758 bp, Unknown
  R35_2m  MAG No. k141_2227
attaaccaatagccataaaccatgtttcgccatacccatgaggtatggcaacaaccgagcaattcactgcgataggccaatatccgagatacgctcactgttcgattcgtcgccatgagtaatctggagaaccggcgatgggacccgcctgaacttgtttcgaaccgcacactgctgatagttcctacacacgatttgacattgcatggaatcgttgtgtcttcagtaggattcagcggtttcaggaaaggctattatgggctcgcaatccccatccgcagatgcccggccgggcacgcgcacggccactcctccggcgcacaaactccccgatatccatcttgatattgtgttggtcgtcttctgcggcggtgccatcggcaccgcgattcgctatgcgttcgcgcagattcccgcagccggcagcttccataccggcacgtttgtggccaacatgctggcctgcttctgctatgcgggtctgaccgcctatttggccggctcttcccggttcgacacgcgtgccaaggagctcaccagccgtgggctcggcatgggcgtatgcggcggtttgtctacgatgtcgacgttggcattggaaggcttcaccgcgattcgcgacggtcaggtggcggccggcattgcctatctactggtgacgttcgcgctgggtctggtttgtgcgtctgccggcgtgtgggcaggaacgcatctggccggctcctcgaacgcatccgccgaagcgtccgctgatacgaatgccgctacgaccagcaagggaggtaaggcgtgatgaccgtattcctaccaatcttggtctgcctgtgcggcggcgtaggcgcctcctgccgctatctgcttgacgcgaccatcaaaacgtattggcaacgcgcattcccgctgtccacattcaccatcaatctcatcgccggattcctgaccggtctggttgcggcgctggcactgggcgggacacttgatgaaccgtggcggctggtgctggccaccggtttcctcggcggattctccacgttctcgaccgcgatcaacgaaatggtgacgctcttccacaaacgccgctaccccacggcaacggcctatctggtgctgtcgctgggtgtgccggtcgttgctgcggcctgcggttttctcgtctgaccgccacgacgattcccgacgcggtcagcggtatcatcgcgaggtcgaacgtcacaggtacatccgggaggtatatgggcatggcgaacaatggagcggatgtgaagcacaatcagggcgcggacgtcacgaatgcctcggccacgacgaacactgcggaaaataccgtgggcacggcaaccccgaagcaaaatggactcgccgtgttgggcaagtatatgggtgtttccgccacgcagaccattgtggagtatgcgacgttcgccatcctgcacttgatcggcgtgccctcgcagatctccaacggtatcgccgtggtgtgttcggcgacctacaacttcgtgatgaaccgcaacgtgatgttcaaatcgtcaagcaacttcacccgttccgtgatgcttttcgtgctgctgtggatctggaacttcacgttcagcacactgctgatcggctggatgccgggcgcgacggacctgagcccgtatgtggtgaagttcattgcgatggcctgccagttcggctggggttatccgttgtgcaagtacgtgatttttaggtgacgcattccaattgctcactgtcgttcgccttcgcctatttgtatttggagcgcttatcagaagaacagcatcgcaacacctgcggcgaagcacatgagcagaatcgatgtcaggaagctggcgagcatcggcttcttgcccttggaagcgatggccttgaagttcacgttgatgccgagcgcggccatggccatgccgagcacgatgtacgcaaagtccacgagctgcggggtgatggaggcgatgagcggcacgaaggtgccgatgatcgaagcgccgatgaagccgagcatgaaccacgggaaggccacggtcttcttgccggtgttctccacctcggagtgcttcttctcccaccagatagcgatgatgatggccgcgaacacgagcatgagcacgcgggaaagcttcatgatggtggcgatgtccaccgcgccgaaagcgtcgccggcggcgaccgcgtgggcgatttcgtgcagggaagcaccggcggtgatgcccagctggtccttggtcatgccggccagcgggccgagcgcgatctccagcaacgcgaacacagtacccataatggctacgatggccacggccatggtcacgtcgttatccttctcgtcctgcttgtcctcagacaccttgatggaaccggccagacccatgacggcggccgcaccgcagatgccggtgccaccggcggtcaggatggcgagcatcgggtcgacaccgagcttgcgggcgatggcatagcacacgatgatggtcagcgtgacgaccacagctgcgatcggcagacacttgatgccctgcgtgaacagcacggcgaggttgagcttgaaaccgagcaggatgatgccgaggcgcagcagcttgttggaaatcaggccagcggcgtccttgacgcctgccttgcggccatcattggaaccgacgtaggcactgcggatcgggaactggatgatcataccgatgagcagcgcgatgataagcgcgccgaacaggctgaatccggggaactgcttgagccaggaggcgaacagcga

SEQ ID NO: 3784 - DNA, 7521 bp, Unknown
  R35_2m  MAG No. k141_2251
cttcagcagctcctcggtggtctggtccacgtcgatcggacgacggttgtagagcttgaccagcatctggttcttctggtgcaggctggcctccaccttgtcgtgcagatggtcggcgttgaacaggtcatgcacgcggatgccgacacggttgatcttgtccgcgtaggctgggccgatgccacggccggtggtgccgatcttgtgcttgccaaggaagcgttcagtcaccttgtcgagtgtgcggtggtagggcgcgatgatgtgtgcggcctcgctcaccttgaggtgggagcaatcgatgccgcgggattccaagccgtcgatctcctcgaagagcacttccgggtccacgaccacgccgttgccgatcaccggggtcaggttcgggttgatgatgccggagggcagcaggtgcagggcgtacgactcgtcgccgaccaccacgctatggcccgcgttgttgccgccgttgaagcgcgcgacgtaatcgaccttggtaccgatcagatcggtcgccttgcctttaccctcatcgccccactgggcaccgataagaacaattccaggcataacacacctccgcaacatcgccttttccgccgaacacagactaccgtacagcctctaccgctgccacgccatatgcagccgccggcctgtccaagctacccgcgcgccctcacgcgtccggcgccggcacggcgaaataatacgcggcacacgcgttgctcagatccgggttgtcttcccctacctcgttctgcaacgctcgtagcgtcgcttgagccttgccgtattctttgtcgttcagatactggccgaattcatccagtttgtcctgaaccgccgccggcttatccggggtccccatgacttcgcgcagtatcgccccggcgttgacaccgtacgtttcgtcgtccggagagacggcgacgtacttgccgtcaccgccatcgaccggctcgatcacccgtagattcttggattgtaccgaggagatcaccatcggggcatgcgtggtgacgatgaattgcaccaaggggaacaattcatgcaaaacgcccagaatcttcccctgccacttggggtgcagatgcagatccacctcgtcgataagcaccgctccgggagttcgcgcaacagcctgttcggcgaggaaggggttgagctgtgccatacgccgcgctatgtcggccaccaacccgatggctacgcgatagccgtcgctcagagtttcgaacggctgatcctccatgtatgttccgtcggatgccgtgtaactgaccacgaagccgccgtcgtaggcgatgctggcgtcgtcgaagccggtcaacaggcgaaggcaatccgtgaccacgcgccgcaccgcccggaattccggtatcacggttcccttgcggtactcccgcgcggtcattttttcgaaccagaccgacatcttcttgatgctgacctcggaactcaagcagtcatcatatccatcgaaacgattgcctccctgcaaatatgcagggacaactgccgcaggcacattacatccggcctcatgatacgatcttcctccgccggtgcgctcattgcagtccccatccgtctggcgaacaatccatcaatgtcctgaccttatcacatgaccgcagcccgtcagcggtgccgcccgccgcttcgctacttcaatgccttgccggccgagccgagctgccggcacgcctcgaccacgcgggcggccatggccgattcggcctcgcggccccaggagcgcgggtcgtacagcttcttgttgccgacctcgccgtcgatcttgagcacggcgtcgtaatgcgcgaacatgtggccggcgaccgcgcgcgtgaaggcgtactgcgtgtccgtgtcgatgttcatcttgaccacgccgtagctcaccgcgcgggcgatctcgtcgggcgtggagccggaaccgccgtggaacaccagagcgaagggcttgcgctcgggcatgtccggcagcgcgcacgtggacaccgccgacgcgcccagcgacccaagacggccgtcgagggccgcgtcccacacttcggactggatgtcgcgcagcagttccggacggagcttgaccacacccggcttgtatgcgccatgcacgttgccgaaggtgaaagcggccatatagcggccgtgctcgccgaggccgagccgctccgccacgcgcacgccgtcggtcggcgtggaatacagcttttcgttgatctccgcggaatggccgtcctcctcgccgccgaccgcgccgatctcgatctccagcaccgtatgcgcgcggacggatttctcgagcagctccgcggcgatgtccaggttctcctccagcggcacagtcgagccgtcccacatatgcgactggaacgtcggctcttcgccgcgcttgacctgttcggcctcgtgcgcgagcagcgggcggacccagccgtccaggtactgcttggcgcaatggtcagtgtgcagcgcgaccgtgatgttcgggtagcgcttcgccacctcgtgcgcgaatgcggcgaacgcgagcgacccgaccacgcggtcgttcacgctttggccggagaagtaggaggagccgccgaccgacacctggatgatgccgtcggactcggcctcggcgaatccctgcagcgcggcgttgagcgtctgcgtactggtcacgttgatcgcgggataggcgtatccgccgtggcgggcggcatccagcatttcggcatagcgttcggcagttgcgatagtcatggcttccattatcccgccgccgagtgacgaatcgcattgtcggggaggcctcggcggcgaatgtgcgcaagatcaccttgccctcgaggcgcggagctcaccgaatggcggtatgccgtcggaacggggcgcgactaccatggaacccgtgagcgatattcgacattctccgctggaaggccggcggccgaagcgcaccgagctcgccggtttcatcgacggcacggtcgacgacatccgctgcccgcaccccaaactgcttatcgtgggcatcaaccccgggttatggacggccgcggtcaacgcacccttcgcctatcccggcaaccgattctggccatcgcttttcgcctcggggctcacgccgtggcaggtggacgccagttacggcctgcgccttcgcgatgagcgcatgatgatcgaccgcggcatcgggcttaccaatctcgtcaatcgcgccaccgcgaaagcgagcgagctgaacaccgccgagctgcgtcagggcgccgatcggctgcgggagctgtgcgcgagggtccatccccgggccattgcgatactgggcatcacggcgtaccgacaggcgttcgccgataagtccgccgcgctggggctgcaggacctcaccgcggaagagaccgaccggttcggaggcgcgcagctgtgggtgattccccagcccagcgggttgaacgcgcacgccaccatgccggtgctggtcgactggtggcgcagggtcgccgacgcggccggtctggatctcgccgccgcgcgctagtatcccacgccgttgattcgtttgttaattccggctcccctctctgaggctgagccgtgaaacaaacagcggagctgtttgtaggcgaaggcgaacgacagtgagcagataagaccacggccgtaaggccgtccttgattgcagatgagctgtcggcgtagccgactgaggggagcacacgcatatcggctggatccaggcgttcttggaaatcctcccctcaggccgctgcgcggccagctcccctcagagaggagagccagacattgttaacgatttaaacctaggcgatagcctttcgactgttgacggcgataccagatgtcagcacaaacagcagcgtcaggatcgccagcatggtccgccatccgaggaattcgatgacggagccggccaacagactgccgatgacctgtccgcatacgaggaagaactcgcccttgcctctggccgacgccacttcgtcggcggaatacgagctcaccagcaacaccgtgccctcgttgtagccgagtgcccaagcaacggcgatgcccagcaatgccaccgcaacgagcggcgcgttctgacctagacccaacagacagctgacaagacctagccctaaagcaagagatacaaagaccgtgtgagagcgtttcttggagttgagcagtggaatcaatgccatgggcagatacatgccgagcatgtgcagttgcatggcctgcatgcgcgtgccgtcggattcatgcagcacatgctccatcaccaacggggcgccggccatgatcatggtcatggcgcagcacacggtgaatcccagggcgatgccgagcagaaagcgcgggcggcgcagaagctcaagcaggccgaccttctgcgccgaaccaacgggctgccgcgtgtttccgatctgctggcctgccgggaacatcgccaccgtctccagagcgagtatgccgaggacgcttacgatgagataggagcctgcgtagtggacggggaacagtccctcggcccacgtcgccagcaacgggccgacgatcgcggcgatgacgccggcggacagcaccacggacacggcccgatcctttgtatcggggttgagatcggccgccgcgtaacggtagtagttggaggccgcctgatagatgccgaccgcgaacgtgccgacgcacagaagcgggaaattgtggaaccataccgcgcagaacgagctgattccgccgcatatggcgatgaccgccccagcctcgaacacatgcttgtgcccgatgcgggcgatgaggcgattgacgaaggtattggcgaacaccgtccccaacgcgatcagggcgttcggtatcgtcgccatccacgcgaacggggccagctcactgcccacgagcgcagtgccgttaggtcaacgctcatcgcagcgagactcagcccctgcgcaacaaataaaaccctaatggcgcgctgttgaccacgcattagaagcctcccctcgtgtccgcaggaatcactatctcaggacaatacaatccgaaagccgataaaatggaactgattgccgactctttagatgtagacttacgttggctttacggggaaaatgtgcctatggaaaatactcaaaaagatgatactgccttgcaatacgtcttttacaacaactcctgctccgagtatcttcttgatgatttagatgatatgtatatcgcaatgaaaacacagtattctgccctcattccacgttttttatgttcttgtcaaccgaagcggaaatgaaatacacatactgccattatttttaagggaggatagttctgaattttatgattgtccgtctgattttttccacgcagacaggcacagcattttcacaagaaattttgacagtatcaacgtggaactttcaactgctacgatttactattatgggatttatacaaagacttatgagccgaaagttaccatgctttcctactcacaggctgatgattgcttttatatcgacaacggaatacaggacggtcacataaaggcatttgaaaaggaactgataaaagaatcgctctacttaaaacacattgcccagtaacagccaataggacttgcaaggtttctgaccttacaagtcctctgctgtatcatagtgatgttggctgtgtccattccgtcaaggactgccctacggcgtatcggcttcgccttgttccttgacctcactacgttttctttttttcttgacacaacaaaagcacgcacgaattttcttcaatccgacaggctctcattctttcacatactctatcaattcttctattccacaatccaagtaactgcacagtttacagattagttgtacgtctaatctctgaaattcatttctgcaataacgattaaagttagacctcggtatatccaattccttacaaatggtattcttactaattcctttttctttcagcagttcctctatgtgaagttccaaatgtccatacttcattgcctcacctctacataaaagtatattcaataaatctttatgtagtaattcactatatggtgagggactatatagttatccctataactatatagaaacagaggtatgtcaaaatgaaaaagaaattattatttgccactattattctagtcttgcttgcaggtgttctctattacattagcttacccgattatcttgtatttaacagtatgtcattcagcaatggggctaatcgtgataccgaattgcaagttatcgtatatcaatactggaataccgatgaagtggtagcggaaatcgaagcagaacataataaaatcaacggaactcccactatccttacaatcaatctataccactctaaatggtcttttcacaatggatatgaaccattttataccactactatcaattataattgaaaagcaaaagcagacagtcaatcaaaaaactgtctgctacaaactgaaatttagcgtttagaacgtcgaacaataaagtaaatcaaccactctatgactaatacaccgagataaaaaattccccatacagcaaaactaatcagttttgcttctagtgtctgtacagcaccatgtccatctactgttcttgtaaacaagaaaacactaacacataagaaaactatgaattgaataatttgagatattttccagcttttgcttaccatattgtttcctccttaaattctaatttgtttattttccataatatcatactttgtaattatttgcaccattataattgcaaaataacgcagacaatatctctactatctgcatcattcctttcatgtcttcttgaaatatttactccattttctttcaatctttactccaaatttactccatttgaaaaatccgttacgatattttgcgttattctacgataccttttctttgaagaaaaatgtctgcaaaccttgattttaagcgaacttttcaatatttccaagcactttattctgttgtgagaatttcttctcaattatttcatcaaaagaccaagtgattgagcaggtatctacgagattaaaaaaatcgttggaatgattggatggtctcaccatttgagataagtggagcggacaacgggagtcgaacccgcctctaaagcttgggaagctttcattctaccgatgaactatgtccgcatgccttacggctgctgcacctcacgtgacgagcatgctcagccaaacgaggcacgaatagttatcctagcacgtcacctgccgacgcgcgtggagtaggtgggcggagcgatcggcgtgccgttcatttcgttggccatctgcatgagacgcgctatgcgctcatcggtcggcggatgtgtggagaacaagcgcgagaaaccgaccgcggagaacggattggcaatcatcatcgcggagacggactgggtgccggccgttttgcgcatgggcgtggtctgggcaccataggagatcttgttgagcgcggaggccagggcctcggggtcgccggtc

SEQ ID NO: 3785 - DNA, 48429 bp, Unknown
  R35_2m  MAG No. k141_2291
cgtcctgctgaacaagtgcttccacaacgaccacgtcatcggcatctacttcgccaccgatgcgaacatgctgctggccatcgccgagaagtgctacaagtccaccaacaagatcaacgccatcatcgccggcaagcagcctgctgccacctggctgaccctggacgaggctcgtgccgagctcgagaagggtgccgccgcttgggattgggcttccaccgccaagaacaacgatgaggccgaggtcgtgcttgccgccgccggcgatgttccgactcaggagatcatggctgcttccgacaagctgaaggaactgggcgtcaagttcaaggttgtgaacgttgccgacctgctctccctgcagtccgccaaggagaacgacgaggctctgaccgacgaggagttcgccgacatcttcaccgccgacaagccggtgctgttcgcgtaccactcctacgctcacgacgtgcgcggcctgatctacgaccgtccgaaccacgacaacttcaacgtccacggctacgaggaggagggctccaccaccaccccgtacgacatggttcgtgtcaaccgcatcgaccgctacgagctgaccgctgaggccctgcgcatgatcgacgccgacaagtacgccgacaagatcgacgagctcgagaagttccgtgatgaggccttccagttcgccgtcgacaagggctacgaccacccggactacaccgactgggtgtactccggcgtgaacaccgacaagaagggtgccgtcaccgctaccgccgctaccgctggcgacaacgagtgataacacctccacggtgttgttagttcgctaacgccaaagggctcgggattcgtcccgagccctttgcttattcataagccccctctgacgaggaggctgtcatgcgaagcatgactgggggagagaaaagcggaagcgaaggcgagagccaagactgaaaacagcccataaattccccaccccaactaatccttaaggatgacaactccccatcaattcaatcctgcgcatgatggaaaccacgccattcctccataggcttggaaccagtatccgggcacgaggctcggagccagccatggggggagagcacatgcagaaggatcagcagcagaccgcaatcatacaaccgttggacgctaccgacaccgtggaatcaagtgtcgacgcccttgcccaaggcgaggcggagaacgcggaagtcgccgaattcaaccgattaatgcgcgaacgtgagacgcgcaagaaaaagcgcgtggtgcatcgcatcatcgccgtcgccgtcgtggcggtactgattatcggctttatggtggtgcacgcgattattaccccgtcagatgggggcgtgtctccggtatccacggcaacggtggaacgtggccatttcgtcgaccaagtcagctccaccggttccatagaacccatcaactccaccgtcgtcgccccgcagatcgacggcaccatcggcgaagtcaaggtgcaggaaggcgcaaccgtcaacgccggcgacgtactgtttaccatcaacaacgacaagctcgatagcgacgtgaatcaggccgatctggctctgcgagcagcgaactcaaaccttaatgccgcccagcagcaggtgaaccaaatcaatgcgaccataggtcaggcacgtaatcaggatggtgaggaaggccaagccgctgccgatgatgcggccggacagctgcccgctgcacaaagcggcgtggagagcgcgcaggtcgccgttcagcaagcacaagccacctatgacgaggcggtcgcccaagccaacaagcgtacggtcactgctccggtctcgggcacggtgctgaccatgagcgcggtgcccggtgccgccatcggagcttcctccgatggctcatccacttccgccggcgcagacggtaaaccattgtgtcagatcgccgacctgagtcagatgaaggtcaatgtcaacatcaatgagctggatatcactaaagtggccaaggaccagagcgccaaagtcacgttctccgcggtgccgggactgacgctcgatgccaaggtggataccatcgccagcaccacgtcgcagttggctgattcctcggcaggcgggcagagtggcaacggcggcgtgggatacgccgtgcgtctcatcattcccgcccctgatccgaaactgaagccgggcatgacggccagtgtgaaaatcaccatgcagagtattgacaacgctttgatggtgccgctcgccgccatcgtggatgagggtaaggagagcagcgcggtcatgctcgagaccaacgccgaaacccatgagttcaagcgggtgcgagtcacggtcaaagccaagaacaacaccaaagccgttgtggaaggcaatgtgagcaagggcgatgtcatcatgcttgatggcgcttcggctgccgacaatactggcgatgctgcttcttccacctcgcaaaccgcggcttcggacgaaagggcacgctgatatgttcccgtttcgttccgacgcgagccgggcaaatcgcggcaaacggcgtaatgagaccattgccgtgcccaccgccacagccaacgtcatcgaggttgaaaacatcaaccgcatcttcgagacaggcgacacctacacccatgtgctcaaaggcatcaccatgaacgtgcgccaaggcgagttcctcgccatcatgggaccatccggttccggcaaatccacgctgatgaacacgctgggcctgctcgaccgcccatcatccggcacctaccgcctgtgcggcatggacgtgcagaatctgagtgatgacgaacgctccgaactgcgcgggtggctcatcggcttcgtgttccaatccttcaatctgctgccgcgcaccagcgtgctgcgcaacgtgatgctgcccctggcctattccgactgcccggtgcgtgaacgggaagggcgtgccatcaaagcactccaatcagtggcgttgagtccggaactgttcgaccgcaaaaccaatgaactctccggtggtcagatgcagcgcgtggccatcgccagagcgttggtacaggacccgccgctgattctcggcgacgagccgaccggcaacctggactccaaaaccggcgatgcggtgatgcacacgttcgaacagctcaagcagcaaggcaaaaccatcgtgctcatcacccacagccccgaagtggccgaacgcgccgaccgatgcctgcacatgcgtgacggcgtactgcgtgaagggatgtaccgatgagaacacgggatctgctggcggaaaccggctccgcactgagggcgaacaaaggcaaaagcgcactgaccattctcggcatcgtcatcggcattgccgcggtgattaccatgacctcactgatcggtggcattcgagactctctggtcggcgaactgggtatgaacgcggcgcgcacgatttcgatttacacggacgtcggcacccttgacgacgaacagatcactgcgatgcgcgaggaactgaccgactacgagtacttctcgccgacgaactatggtgccgcctcgtcaatcgccgcgcccggtaccaccgacaaggtgtcggcgagcatcaccggtgtcgacgagcatttcttcgatgtatccggagtgacgattggtcgtggacgggccttcacatcgagtgaagcaacgagtggtgcaatggtggtgattctcgacgggcagggcgtgcagaagctgttcggcagcgcggacattgacgccatcggcagaaccgtcacgcttgacggcaatgaagcaaccgttgtgggtgtggtcgagtcgtctggattgatgggcggcatgggcggcgacagcgtgaatatctatatgcctgccaccactgtggcgctgcggtttgcgtcctcgaacatgggatacatgcagatctacggactggccaaggacggggttgatatcgaccagctcacggaacagacgaagaccgttgtcgctcgcatcatgcgtatcccaaccgaacagatcgaccagaatctgtcggtcgtaagcgcccaatcctccatcgaccagctttccagcttcatgagcgcattccaggtgctggcgggttcggtggccggggtctcgttgctggtgggcggcatcggcattatgaacatgatgctcaccaacgttaccgaacgcatccgcgaaattggcctgcgccgggcattgggtgccactcggcgtgacgtgaccgcgcagttcctcgccgaatccattgcaatcacagtgcttggaggtcttatcggcacgttgatcggctacttgctgtcgttgggcgccgctggattggtgtccggcatcgccggtggcatgagtatcgcgccagcagtttccgtgcagtccatcggactggcagtgggcatctgcatcgctgtcggcgtgattttcggctactatccagctaggcgcgcggcaaagctcgacccggtcgaggcgctacggcatcaataatcgcgtagcaccccgaaatgcagtagggcattgcgcacaccgtcgtggtccacgtcgtcggtgatgtaatcggcggcggcctttggctcggcggtcgcattgcccatcgcgaccccgatgccggcgtaggcgagcatatccgtgtcattgccgccatcgccgaaggccatggtctgcccgcgcgtgatgccgtaatgcgccatgaaccgctggatgccgcgcggcttgccgccatcggccggaatcagatccgtgaaatccggatgccaacgcaccccgcgcacattgctgcacagtcccaccagttcggcctccaactcgggtccgacaaagggactgatctggaaagtctcatgatccagcgcgcgggtgcgcgggtcctcaaaataccgggtcggtgcggttttgcccagtttgctccacgtggcgcgaagcagatcattggactggttgaagtacacgtaatccttctcgccgaaattgcacaccacatcggggtgacggtccagccagtcgagaatcacctcaatatcagcagtatccaaggcctgcgaggcaaagaagccggtgtcatcaaagcaatactgcccattgaacgccaccacgccatcgaacgtcaccggcatggtatccagcaccacgtgcatctgtgaaggcgcgcggcccgtgcaaatcagcaccttgacgcctgcggcctgcagccggtgaatcgcctcgattgtggaatccggcaccgtatgggtcgtgaaactggtgagcgtgccatcgatatcgaagaatacggctcggatatcggcattggcagtatcggtagtcatagcttccattgtcaaagcccctctcgacgtgctttccggcgtgttcggcacgcctatagcgggttatcaaacgcacgaatcccggccattgcatgcgcgccataaaagacacctatacggcaatcggccattttccgtcactttcgcggttcaagcgcgttatggtgttacccgacatcaattttggagagaggaaatccaatgacagcagcaacccagtcggcaactccggccgctcctaacaataacgagccggtgcgtgtgaaccacaccgtccgcaacgtcatcatcaccatcgtggtcgtggcgattatcgccgtggccgcgttcttcggctaccgcgcgtttgccggtgccaacgagtcgtccgccaagggcagcaagggcaacccggtcaagatcggcgtggtcggcgctaccaaccccgaatgggtcaagttcaagcaggacgccgagaaggccggcatctacgtcgacatcgtcgacttccaggactacacctccgaaaacccggcccttgactccggcgagctggacctcaacgaattccagcacctgctctacttggccaactacaacgtgagcaacaagaaggacctgcagcccatcggcggcaccgccatctacccgctcggcgtgtactccaccaaggtcaaggacatcaaggacctgaagcagggcgacaccgtcaccattccgaacgacgaaaccaaccaggcccgcgctatcggcgtgctcaaggccgccggtctcgtgacgctcaagggcgactggaccgccttctccactccggccgacatcgacgaagccaagagcaaggtcaaggtcaccccgctcaaggccgaacaggtggccaccaccctgaaggacccgaccatcgccgctggtgtgatcaacaacgactacgtggccgacgccggtctcaacccgaaggacgccatctaccaggatgacgccgaatccgaagaagctcgcccctacatcaacgtgtgggtggcccgcaaggcggacgtgaacaacgagacctacaagaagctcgtttccatctaccagcagaaggatgtgctcgacgccctgcaggagaactccggcggtaccgcggtgttcgccgacaagttcagcgccagcgagctgcaaggcttcctgtccgacattgagaaggacgccaaagcccagcagtgagccgtggctgatacgagtgcacgactaacctgtccatagccattaccaccaagcggagcgagtacccgagccaacaatcgggattcgctccgcttccgtgaccggacatcaacaaccagcatcagggagcactatgagcgaccccatcatcaccttcgaccatgtcgtgaaggaattcaaaacacgcggacgcggcgcgaacatcgcacgagccgtggatgacgtcagcctgaccatcgatcgcggcgacatcttcggcatcatcggctattccggtgcaggcaaatccacactggtccggcttatcaacgcgctcgaacgacccacctccggcaccgtgaccgtgctcggcaccgatatcacctctttgagtgagaccaagctgcggcccatccgccagaaaatcggcatgattttccagcagttcaacctgttctccaccaaaaccgtggcgcagaacatcgcctacccgctgcaactcgatcactggcgcaaggactatcaggatcgtcgcgtcaacgaacttctcgaattcgtgggccttagtgagcacgcaaacaaatacccctcgcagctgtccggcggccagaagcagcgcgtcggcatcgcccgcgcactggccactaatccggagattctgctcgccgacgaagccaccagcgcgctcgacccggaaaccaccaccgaagtgctggccttgctcaagcgtgtgaacgaggaattcggcatcaccattgtgcttatcacccatcagatgaacgtggtccagcagattgccggccgcgtggccgtaatgagcgccggacgcgtggtcgaatccggcgacgtatacgacgtgttcgccgcgccccagcagccggtgaccaagcgattcatcgccaccgccctgtccggcctgcccgaggaagaccgggtcgagcgattgcaccacgaatggtcgggccgcatcgtcaccgtgctcatccgccaaaaggacgtttccggcagccatggtcacgaactcaaggcatccggacagaacatctccgaactcatcgccaaatacggcgtcgaatccagcctgctctacggcggcatcgacacggtcaaggggaccgccatcggtgccatcacctacgaattcaacgggcccggctggcacgtggacgaattcctgcgcgagctcgccgccaatagcgacgtcattgacttcggcaccgccgcaaagcccgtggcttacgccgacgcagttgccggacatgcctcctacgccgaagaccgcgcccatgacccactggcggccgatactgccaccgcgcccgctgtatccgccgccgcacatgaaggagacaacgcatgatcatcctcgccaactcgcgtagcgactggaacgtgctgcgcccactattgttcgaatccatcggccagaccctgaccatggtgctcgtcacccttgtcatcggcggattcctcggcctgatcctcggcgtggtgctctatggcacccgccccggcaacctgttcgagaacgcggtcgtctaccgcatccttgacatcatcgtcaacatcgtgcgcccgattccgttcatcattttcctggcagccatgcagccgctcaccatcgtcgtggtcggcacgtccatcggcaccgtggccgccatcttcccgatggtggtcatgtgcaccttcgccacttctcgtctggtcgaacagaatctcgtgccggtcgacccgggagtaatcgaggccgcgcgttcgatgggtgccggcaagctcaccatcatccgcaccgtactcatccccgaagccctggcaccgctgatcctggcctacgccttcctgttcatcggcgtgcttgacatgtctgccatggccggctacatcggcggtggcggtctcggtaacttcgccatcgcctacggctaccagaagttcgaccagaccgtcacctggacggccgtgatcatcatgatcgtactggtccaggtggtgcagggcatcgccaacgccatcgccaaacgactgctcaaacgccagcaataacaaggcatactgaccccatagatcgcggccctcgccaatatgaagcgagggccgcaatatattcttcgcgctactagaatcgggaaccatgagtgaacatatcgacatcgaccacgaactcatcaccatccgccactacctgcacgcccatccggagcgtagtttccgtgaattcgacaccagcatctatctgaccgaccagctcaaggcgcacggcatcgagatcctgcacaacccgctggagactggtgttgtggggctcattcagggcgaggccggtcccgggccgcgtatcgggctgcgcgccgacatcgacggcctgcccatcgtggaagactccggactggagttcagctccgtcaatgaaggcgtgatgcacggctgcggccacgacctgcacatgaccggtctgctcggtgccgccttctggctcgccgagcaccgtgacaagttcgccggctcaatcaagattctgttccagccgagtgaggagaccggccaaggcgctcgcgccatgatcgacgccggactcgtggatgacgtcgaagccattatcggcacgcacaacaaccccaactatgcgtccggccagctggccatcggcgtcgagccgatgatggccggctgcgtgaaattccgcgtgaccctccacgcccaaggcacccacgccggctacccgtacaagggcaccgggcccatcgaagcgctcgccagtattattctgagcctgcagaccatcgtgagccgcaacgtcacgcccttccacccgctggtgctgtccgttaccgaagtgcacggcggccatgtgtggaacgtggtgcccgccgaagccggattccaagggactgtgcgctatttccacaagtcggatggcaatctggtcggccgccgattcaaggaagtggtggaacacaccgccgaggcatacggtatcagcgccgatgtggtctgggatgatttccaagacccgctggtctccgatccaggtcttgccaaggccgtggcggcggatgtcaacgactacgcgcagctcgaaccgatacgtcagtcgatggcgggggaggacttctgcgaattcgccaaggtgacgttgccggtgttcgcgttcgtcgggtcaaacggccaggaaggttgcgccgactggcatagcccgcatttcgtgggtctcgacgaatccattcccaccttcgtcaacttctacgtcaacgccgccctgcgcgtgctcaacgagctgaggtaaatccttttttggctcccctctggaggctgaggcgttagacagacagcccaatgggctgtctgcagccgaaggtgaggcgacagccgaaccagatatgcgcgggcctcgcccgtccataagtgcaggacgagctatcagcgaagctgactgaggggagtggcattcgttcattaggtcgattcatcgtccattaggtcggtgaacggcgatactggttgttggaatcgcgccattgcaacgactgatatcgcattgcagtgacctaatgaacgcaaaaacgacctaatgaatgacgccaagccggaagaacaggcaatccgacgtcatacgcggctacactaagaagctatgacacagcttcgcttcgcactcgcccagatcgacacctgcgtcggcgcgctcgatgccaacgccgccaaagtgctcgactactcccgtaaagccgccgcagggaatgcccaagtggttgttttcccggaaatgaccctcaccggataccccatcgaagatctggccctgcgccgcaccttccgccaagccgcatgggacaaggccaacgaactcgccgcccagctcaacgacgacggcctcggcaatctgttcgtggtggttggcaccgtgggcactgatcgtaagacctccaagccgcgcaaccgactggtggtattgcatcagggcgtggtctgggccggctacgacaagcacttcctgcccaactacggcgtgttcgacgaattccgtatcttctccgccggcgaccgttccgtgaccctcgacgtggatggtgccaccatcggcgtggccatctgcgaggacatctggcaggatggtggcccggtggccgacctggccaccaagaacatcgacctgctgctcaccatcaacggctcgccgtatgaggaaggcaagaccaacacccgtttcgagctcgcccagcgtcgtgccgccgaagtcaacgccccggtcatctacctgaatcaggtcggcggtcaggacgacctggtcttcgacggtggcagcttcgtggtcgatgccgacggcacgcttatcgaacgcggcccgatgttcatggaaaacctgacgttctgggacttcgattccaccgccgaacatcaggtcaaggccgagatcgttccggaactcgacccggacgaagaggtatacactgcctgcgtgctcggcctcaaggactacatggccaagaaccacttcaccggcgtgacgctgggcctctcaggaggcatcgactccgcactggtagccgccatggcggccgacgcatgcggcggcgagaacgtctggggcatctccatgccctccatgtactcctccgatggttccaaagacgacgccgctgacctggcctccaacatcggtgcccattacgaggtccagcctattgagccattgttcaacgcctaccaacagcaacttgaccttgatggcgtctccgccgagaacctgcaggcccgcatccgcggtgtgatcgtgatggccagttccaattctcgcggcctgctcgccgtggccaccggcaacaagtcagagctcgcctgcggctactcaaccatctacggcgatgcggtcggcggctacgcacccatcaaggacctgctcaagacccgtgtctgggagatcagccgttggcgtaacaaggccgcggccgcaggcgtcggtatcggcgggctcaagatcgtgggcaacgaggacggcaacgccggcatcccgttgaaggacggcgtgatgattccggtctcatccatcgagaaggctccctcggccgagttgcgccccgggcagaaggactccgactccctgcccgaatacgcgctgctcgacaaggtgctcgctgcatacatcgagcacgcgcacggccgcgccgacctgttggccgacggcttcgaccaggccaccgtggacactgtgatgcgattggtggaccgcgccgaatggaagcgccgccaatacccgttgggaccaaaggtcacggccctcgcgttcggccgcgaccgccgactgcccgtcaccaacgcgttcagggaataaacatatattgctcccgccagcgggagcaagtaataccgttgaggaggtaccaatgacagacgataacaagaagcagtggtatttcaacaccgtcaagaagcaggccgagctgggcatggtctcaccgattgaacagcgcatgggtccgtacaagaccaaggaagatgccgaacacgcctgggacatcgtggtggaccgcaacgccagatgggaggaggagaactggcgctggaagaactacggtgtgaaatccgcgcaagcgaacgatgaagactgacggccaaaacagacggatacggttctgctgtcaatctcaagaccgaaccgctcaccaagccgctcatacgaacatcacagtatgagcggtttcccatatctggagacgtgcaatagccccatcaatacctagaaaccattggaatggtagcgttcacaaaaaacaatgtgagatagctcactcccaatttcggcttttcccaagcaagtgccaactacactgttgaaccaagggttccgtgaagatgcgaaacctacaaccccatttaaggagtgacatgaccgcagtagaaaatgcagctgtctcccaagaggagctcgacgccaaggcgtgggccggcttcaccgagggcaactggcagaaggatattgacgtccgcgacttcatccagaagaactacaccccgtacgagggcgacgagacattcctggctcctgccaccgagaagaccaagcacctgtggaagtacctcgacgacaactacctggccgtggagcgcaagcagcgcgtctacgacgtggacacccacaccccggctggcatcgatgccttcccggccggctacatcgactccccggaagtcgacaacgtgatcgtcggcttgcagaccgacgtgccctgcaagcgcgccatgatgccgaacggcggctggcgtatggtcgagcaggccatcaaggaagccggcaaggagccggatccggagatcaagaagatcttcaccaagtaccgcaagacccacaatgacggcgtgttcggcgtctacaccaagaacatcaaggtcgcccgccacaacaagatcctcaccggtctgccggatgcctacggccgtggccgcatcatcggcgactaccgtcgtgttgccctgtacggtgtcaacaagctgatcgccttcaagaagcgcgacaaggactccatcccgtaccgcaacgacttcaccgagccggagatcgagcactggatccgcttccgcgaggagcacgacgagcagatcaaggctctgaagcagctcatcaacctcggcaatgagtacggcctggacctgtcccgccctgctcagaccgcccaggaagccgtgcagtggacctacatgggctacctggcctccatcaagtcccaggacggcgccgccatgtccttcggccgtaactccgccttcctcgactgcttcatcgagcgcgacctcgaggccggcaagatcaccgagaccgacgcccaggagctcatcgacaacatcgtcatgaagctgcgtatcgtccgcttcctgcgcaccaaggactacgacaacatcttctccggcgacccgtactgggcgacctggtccgacgccggcttcggcgacgatggccgtccgatggtcaccaagacctccttccgtctgctcaacaccctgacccttgagcacctcggacctggccctgagccgaacatcaccatcttctgggatccgaagctgccggaaggctacaagcgcttctgcgccaagatctccatcgacacctcggccatccagtacgagtccgacaaggaaatccgttcccactggggcgacgacgccgccatcgcatgctgcgtctccccgatgcgcgtgggcaagcagatgcagttcttcgccgctcgcgtgaactctgccaaggccctgctgtacgccatcaacggcggccgcgatgagatgaccggcatgcaggtcatcgacaagggcgtcatcgacccgatcgccccggaggccgacggcaccttggactacgagaaggtcaagaacaactacgagaaggcgctcgagtggctgtccgaaacctacgtcgaagcgctgaacatcatccactacatgcacgataagtacgcctacgagtccatcgagatggccctacacgacaaggaggtgtaccgcaccctcggttgcggcatgtccggtctgtccatcgccgccgactccctgtccgccatcaagtacgccaaggtgtacccgatcaccaacaaggaagccaagaacctcgaaggccacgagtacgagtacgtcgaaggcgccgacgacgatctggtcgtcggctaccgcaccgagggcgagttcccggtctacggcaacgatgacgatcgcgccgacgacatcgccaagtgggttgtctccaccgtgatgggccaggtcaagcgtctgcccgtctaccgtggcgccgtcccgacccagtccatcctgaccatcacctccaacgtggagtacggcaagaacaccggttccttcccgtcccgccacaagaagggcaccccgtacgccccgggcgccaacccggagaacggcatggactcccacggcatgctgccgtccatgttctccgtcggcaagatcgactacaacgacgctcttgacggcatctcgctgaccaacaccatcacccctgatggtctgggccgtgacgaggacgagcgcatcggcaacctggtcggcatcctggacgccggcaacggccacggcctctaccacgcgaacatcaacgttctgcgccgcgagaccatggaggacgccgtcgagcaccccgaaaagtacccgcacctgaccgtgcgtgtctccggctacgcggtgaacttcgtcaagctcaccaaggagcagcagctcgacgtcatctcccgtaccttccaccaaggtgccgtcgtcgactgatgaccaaccccgcgaaccgcggcaatgactaactgaaggggtggggcacggctccaccccttccttatttcccacagaccttcgcatcatttggaacaggaggacaacgatgcccgcaacacccacgttccgcaccacgaccaggcatatgctcaaggaatcgaagacctatgcctcgcagactttgatgggcggcctttccggctttgaatccccaatcggactcgaccgacgtgaccgcctttccgccctgaaatccggcgatatcggcttcgtccactcttgggacatcaacacctccgtggacggaccgggcacccgcatgaccgtgttcatgtccggctgcccgctacgctgccagtactgccagaacccggacacttggaagatgcgcgacggcaagcccgtctaccttgacgccatgatcaagaaggtcgatcgttacaaggacctgttcaaggccacgcatggcggtatcaccttctccggcggcgaatccatgatgcagcccgccttcgtctcgcgtgtgttccatgccgccaaggagatgggcgtgcacacctgcctcgacacgtccggcttcctcaacacgagctacaccgacgagatgctcgaggacatcgacctgtgtctgctcgacgtcaaatccggcgacgaggagacctatcacaaggtcaccggcggcaccttgcagcccaccatcgattttggccagcgactggccaaggccggcaagaagatctgggtacgatttgtgctcgtgccgggcctgaccgactccgaagagaacgtcgaaaacgtggcgaagatctgtgagtccttcggcgatgccgtcgaacacatcgacgtgctgggattccaccagcttggccgcccgaagtggcacgaactgcgcatcccatacccgctggagaaccagaagggacccaacgccgccacccgcgaacgggtagccaaccagttcaaggaccacggcttcaccgtgtattaaattgcagggtcgaaccgcgcgtaaataccacgattcggcccgttcgcccataccctagagatatggccgacatctacgcatttcctatgggagcgtccaacgacggacgccccgtacgccctcagggtgtgccggatgaagtatgggcagctgtcgaatccgtcagcaccatgaagcgcatccatgacgtgcgctatcgggagattcccgtgccttccaccttggccgattatggtatcggcgtggaattcgaagcgggagagcgtgccctcggcgatgccttttccgccggtcttggcaacgatgccgaatcacgaatcgccacaggctggatcatgatgctttatgctcatgagctgcgcattgaccgggattccaactggcgttgcgtggcgttcgcgcgacttccgctggaaaccgccgaaaacgattccctgacccccggcatgtactgggatgacatgtgcgactatttcgacggcatcgagccggattcggtatccggcacagtcaccgtgacccaaaacacggcttttggttcgatggccggctccaccagcgccgggtgtgagattcgcgtctcatggaccccgcttgacgggaccggaccggacggtactatggacgccggcgcacaaatccgctcgtgggccgcattcatcagatccaccatccgttttgaggaggatgacgccagttgagtgacgtccgtgacaccgaaccccgactgctgaaagagcctcgcgggggagtgcccgatgtcacttcgtcgctggatggctatcatcgtgcctgcgatgcgctggccgaggcgacgggctcgctggccgccgacgccgaacgggcgtccggattccgctatggacatgaggattggctgattcagttcaaacgtgaaggtgcgggcatcgccttgcttgatcccgtcgccctgacacgggccggagctgactggaatgaattcaatgacgccgtgggcgatgctacatggattctgcatgattctctgatggacttgcccggattcgccgaaatcggactcaaacccaaggccttgttcgacacggaaatagcggcgcgattgctcggcctgcaccgcttcggtctggccgccgtcaccgaacactacctcggcatcacgctggccaaagagcattccgccgccgattggtcctaccgtccgctaccgcgcgactggcgcaactatgcggcgctcgacgtggaggtgcttatcgaactcgaaaccttgatgcgtcgtgacctgaaagccgcaggcaaggacgagtgggccgctgaagagttttctcacgctttggttgcgggccttgccccgcgcaaacctcatccgattccttggctgcgtatctcgcgcatcacccagctgagtcgtgatccgaggggcttggccatcgccaaatccctatgggaggagcgcgaccggctcgcccggcgatacgacatcgctcccagcctgttattgaccgattcgtcaatcatcgaggccgcgaccaacaagccgcacaatgccgcccaattccgcgcactccgatccctgaacgagcgtgtgcgcattcataccggcaccgagcaggacaaaatgttcgagcggtacgcgccgattcagcgtacggtcaagccgaaggtctggaagcaggccatcgaccgcgccatggccctggagcccacccaatggcctaccatgcccgcccccgaacaggacgaaaacggtgtggtgaacgcgccccgatccatgcgactgtggcaacagcgccatccggagcgttatgaccgtctgcagcgggtacggcgtgtgatcaaccgcatcgccgaagacacccgcacgccggccgagatgatcatcaagccacagatcctacgcaacctgtgctgggtggaagacccggtggaagtggacgtcgagacgttcctgatcgagcagggcgcaagaaactggcaggtgaaactcattgcaccgtccgtaagtggcgttatcatgtagaggttgccttacggcagaactgtaagaaataacgacttttgaggagtcattagcgtgaagatcagcgttcgtaacctcgagcccaccaaggtgaagctcaccgtcactgttgaaccggaagagctcaacccgtatctggatgcggcccgtaaggaaatcgccaagcaggtgaacgttcccggcttccgtaagggccacgttcccggcaagatcatcgaccagcgcatcggtttcgccgccgtcgccggtgaggccgtgaacgacgcggtcccggagctgtactccaaggccctggatgagaagaagattcgtccgatggctcagccggagttcgacgtgcaggatgttccgcagtccgccaacgacgagaccaagctgaagttcaccgccaccgtcgagcgtcgtcctgacatcgaactgccggaaatcgacggtcttgagatcgccatctccaagccggaagtcaaggatgaggacgtcgacaagcgcctcgagaccctgcgtcagcgcttcggcaccttggtcggcgtggaccgcccggccgccaagggcgacttcgccaacatcgacctgactgctgagattgacggcgagaccgtcgactcccaggaaggcgtgagctacgagctcggctccaacaccatgctcgacggtctggacgaggctcttgacggcctgtccgccggcgaggagaccaccttcgaaggcacgctggaagccggcgagcacgagggccagaaggccaccgtgaaggtcaaggtcaactccgtcaaggctgaggaactgccggagctgaacgatgagttcgcttccgaagcttccgagttcgacactctggacgagctcaaggctgacatccgcaaggctgccgctcaggacgccgaaggtcgtcaggccaccgaggctcgcgatgccttcatcgccaagctgcaggaaggcctcgagatcccggtgccgaagggtgtcaaggccaacatggtcgaagagcagctcaagggcatgaccccggacccggagaaggccaccaaggagcagaaggctcaggccgaggagaccgtggagaaggatctgcgcgatcagatggtgctcgacgccctggccgagaagctggacgttcaggtgtcccagtccgacgtgttcaacttcctcgcttccatcgcccagcagtacggcatggacccgaacaacttcatccaggccatcatcaagaatggccagcttggctccgctgtgcaggaagtcggccgttccaagggtctgctcgccggcatgcgcgccgtcaagttcaccgctgatggcgaggttgtggacctctccggcttcctgggcgaggccgctgaggacgaagagtccgagtccgtcgaggccgcttccgctgctgccgccgtggccgacgaactgtccgccaaggatgacgccaaggacgctgagtgagcatagcctcatcgctttagcgtgattgtttgagcccggaatcgtgtttcacggttccgggctcttcctattctggtaaaaggactatttctttggctcccctttggggggagctgtcgggcgtagcgagactgaggggagttcccaaggcatactcgttgcatagcgtgcggaggttgacatgcagccaacggttactatcaaacgccttggttggctcgctgcggcgaccattgtgctcggcgtgctcatcggtgtgggagcaggtctgctgaccctgttgctctacggcgttgaacatgtgctgctcggctacatcgaaggcccagaattgtctggtccattcggcgtgcccgctgcacgccgtgtgatatcggtgaccgtgggactcggcatcgcgggcattatctggtatctgctacgacacaaaacgactgtggtgccctcagtcaagaaggccgtggcgggaaagcgaatgcctttctggcaaaccattgtgcatgtggtgttgcagattttcatcgtcggctccggtgcctcgatcggccgagaagtcgccccacgcgaactcggcgccatgatcgcgcaacgtttttgcgacctgttccatatcgagggcgttgatggtatcgaccggcgcatggtggtggcagtggctgccggtgccggtctaggaggcgtctatgacgcgccgctggccggcatgttcttcaccgtcgaaatcctgttggtggatgtgacgatcgaaaaggttgcgtttggactgggcgtgtctgccattgccgcattcgtggcggttgcgatcaaagggcattgcctgttctacgacatcaccgccatgcaaccggaatccacgccaacgttaatgctgttcgctctgatctgcggtgcggcatgtggagtgggcggcgcattgttccgaaaaggttcgcaatgggcggaagcgcacaagccgaccggcaaggccattctgtggcagatgccgctggctggtctcatcaccggtttggtggcgattgttgtgccgcaggtgatgggcaacggccgtgccgcagcgcaacttggattcagcacgttcattcctgaaaccgccggcactgctggtgccatgcagtcggcatcttcagcggccgcctctccatggaacttgctgacgggcggcggtaatgtatccgattcggcctctggcgggggagcgggctctggaatggcctcgttttgggccatgcttcagggtgggagcggctcttctggatccgtgatgaacgccggtttcccgctgtcccagtccaatatctggatgttgctgggtgtgttggcactcacctttgtcgccaaggcgctggtgacgctgatgaccattcgctccggtgcatcgggcggtgtgctgcagcccggcatcgcattaggttccacgctgggtgcgatgctcggcctcgtatggatactgatgtttccgactgattcggtaaccgcgtgtgccttgatcggtgcggcttcgttgctttcggcctcacagcaggcaccgcttatggccatgtgcttggtgatggagctgaccgaagcgccgattaccttcttcgtgccagtcggcatggccgtggccacgtcgtcgttgatatcaaagtggttgctgagtcgtaagtaagtagatgcatatattctggctcccctctctgaggggagctgtcgaacacagtgagactgaggggagccgaggtaaagaaagctatgtcagaaaacaccgaagtccgtgcggcacttgaatcgcttgccgctgagccgctcactgagcagattgactactatcgaaagccattcatggtgttgtgggccgccattcaggaggccgccagcgatgtggccgaagactacgacttgcctgcggatatggcccaattatgggtggccgaacagatgcgccaagtcgccgattcactggtcgatcggctcgcggaaaaagccgtggcccatggtgccagcaagtccaacgtggcgcgagccgccggtgccagccccgccaatgccgcccgtcgcttcccgcgtctgggcgacgatgccgcctcccagacccgtctcctcattgacgacgtcctcgacaccttggaataacccgaaatccctacgctacccgccaaaaagcacgcgaaaagccgccttcagtcgcttcaaggcggtagtctgaacaatgttcgagtaattagaaggagaatcaaggtgagcaatacctttgcgaccttgccggtcatggcgggcgatgacgtcccggccggccccgtcgacccgattttcaaccgtctgctcaaagaccgcatcatctggatgggtgaagaggtcaaggacgatatggccaaccgcatctgcgctcagctgctgatgctggccgccgaggacccgaagaaggacatctggctgtacatcaactcgccgggcggttccatcaccgcaggcatggccatctacgacaccatgcagctcatcgagcctgacgtggcgaccgtgggcctgggcatgtgcgcttccatgggccagttcctgctgagctccggcaccaagggcaagcgttacctgacctcgcacgcccgtgtgctcatgcaccagccttccggcggcatcggcggcaccgccactgacgtgcgcatcaacgccgagctcatcatggacatgaagaaaaccatgagcgagctgaccgctgagcagaccggccacaccctcgaggagatctaccgcgacaacgaatacgaccactggttcaccgcccaggaagccctcgactatggcttcgtggacaagctcgtgaccacgccggacaccatcggcaacaaccagcagggggagtgagactcatggcaagtgaagaagcaaagttcgccgcccgtgccgaccgcttggccggccgtcatggcgtagccggtttcatgccggccgccgcccgcgcagcccagcccgcgccgaccaaccgttacatcatgccgcagttcgtggagaagaccccgtatggcatgaagacccaggacgcctactcccgcctgttcgaggatcgcatcatcttcctcggcgtgcaggtggacgacgcctccgccgacgacgtgatggcccagctgctggtccttgaatcccaggatccgaaccgtgacgtgatgatgtacatcaactcacccggcggttcgatgacggccatgaccgccatctacgacaccatgcagtacatcaagcccgacgtgcagaccgtgtgtctcggccaggccgcctccgccgccgccattctgctggcctccggcaccaagggcaagcgcctgatgctgccgaacgcccgtgtgctcatccaccagccggccatcgaccaaggattcggcaaggccacggagatcgagattcaggccaaggaaatgctgcgtatgcgcgaatggctggaggagaccctcgccaagcacaccggccaggatgtcgagaagattcgccgcgacatcgaagtggacactttcctgaccgctcctgaagccaaggaatacggcatcgtggacgaggtgctggaacaccgccagtaaaacttccgaacattgcaataccctcggtcggcaacgaccgggggtattgtatttcaaggatgacaatgataatgcgcagcgtggcggttcgacggtgcggcgcggtcggcaaaggagaatcatgggacgtgtggtgagctacaacgaggacgtaccccgttgcacgttctgcggcaaaaccgaacgtcaggtcagaaaactggtggccggtcccaacgcctccatctgcgatgaatgcatcgccctgtgcgtggacatcatctccgaggagcgtgtcaaagatgccgaggtcaattcgctgagcctgcccaagcccgctcagatcttcgattatctcaaccgctacgtcatcggtcaggagaacgccaagcgcgcattgtccgtggctgtatacaatcattacaaacgcgtcaatatggagcttcaggagtccgctgagcagcttgacgggaataacgggcacggtggccagaccggcaaacaagccaagcaatccgctcccgcccagacgcgtgctacccgccgcaacagtgaccctttggctgacgttgaggtcgccaaatcaaacattctgttgctcggccccaccggtgtgggcaaaacctatcttgcacaggcgttggcccgcgtaatgaacgtgccattcgtcatcaccgacgccaccaccctgaccgaggccggctatgtaggcgacgatgtggaaaccgtgctccaacgtcttctccaagccgcggatggcgacgtaagccgagcccagcacggcatcatctacattgacgaaatcgataagatcgcgcgcaaatcaggtgagaacacctccatcacccgtgacgtgtccggtgagggcgttcagcaggcgttgctgaagattttggaaggcaccatcgcctccgtgccgttggagggcacgcgcaagcataaggagcaggacgctgcgcagatggacacacgcggcatcctattcatctgcggcggtgcgttcgtgggactgacggatattgttcgcaagcgattgggccgtcgagagaccggcttcggcgcgaattggcacgacgccgacatgaaagacgaggaattgctcgaacaggtcaatgccgatgatctggccgagttcgggctgttgcctgagttcatcggacgtttgccggtcaccagtgtgctgaaggaacttaccgtagacgatctgacggcgattctcacccagccagccaacgcgctgatcaagcagtaccgtaagctgttcgccgtcgacggcgtcgacctgcagttcaccgaacaggccattcgggcgattgctgatatcgccatcaagcaggggaccggcgcacgcgggttgcgttcgattatcgaacgtacgttgcaggacacgatgttccagttgccgagtttggatgatgtgaagcaggtgattgtggacaaggcgtccgtagagggttccagtacgcccaaactcttgcgcgaagccgtggatgtgccgcagggacgcctcaaagttgcgtagtcggttttgcttgaccgagtccgtacacatgcggcgtgaggccagtaaatacgccgttgcggtggcgattaggatggtgcgactcgccgcaacacgccgagttgcattcatctgaacggcgtgtattatatatcgagttgtctgaaaagacaacatgcgccagtagcccagcggattagagcagctgactacggatcagcaggtcgcaggttcgaatcctgtctggcgcacagtaagcctcgaaagcggaatgcttccgaggcttttccaattgtattggcccgtttgagtcggccacacaggggtggggtaaggttgcccttcgcgactcagcctggagcggaacgtcctgagatattccgtactattacatacggttcatccaagagagtacagcaaggagacgcgatggccacgaccgccggcgcgaagaagggactttggtccaccatcaggcgaatcgccgcctcagaccgtatttccggactcatcatgctcggcttcgcgctcaccggcctggtgctcgcgaacctgcccgccaccgcgcatgcgttcgagaccgtagcggaaacgcatctgttcatcccctacaccaatctcgacctgccgattggccattgggcccaggatggtctgcttaccatcttcttcctgaccgtgggcctcgaactgaagcaggaactcaccaccggctcgctcgccaatccgaaagcggccgccgtgccgatgctgtgcgcggtgggcggcatgatcgccccgcccatcctgtttctggccgtcacggcattgttctctcagatcgggcctggtgaacccggcacgctgattctgaccaccaccggcagcagcattccgttctcggagatgtcgcacggctgggcagtgcccaccgccacggatatcgcgttctcactggccgtgctcgccctgtttgccaaggccctgcccggttcgatccgcgcgttcctgatgacgcttgccaccgtcgatgacttgctggccattattctgatcgccgtattcttctcctcgatcaacgcctggtattggttcatcggcatcgtcgtgtgcgccgtcatctgggcatacctcgtacgactgaaaaaagtgccgtggattgcggtcggcatcgtcggcgtcctcgcttggatcatgatgttcgaggcaggcgtgcatcccacactggccggcgtgctggttggcctgctgactccctcccgtgaaatgcacggcgaactttcaccgcgtgccgaacgctatgccaacaagcttcagccattctccgcactgctggccctgcccatcttcgccctgttcgccaccggcgtgcacttcgagtcggtgagcccgctgttgctggcttcgccgttggttatcgcactgattgtggctttggtggtcggcaaacctttgggcatcatcaccaccgcatggctggccacgcatgtgggcgggctcaagatggccaaggggctgcgcgtgcgcgacatgattcccgctgccgtcgcctgcggcattggcttcactgtgtccttcctcatcgcctcgctggcgtacaagaatgcggaactttccgctgaggcgcgcttcggcgtgctggtggcctccctgatcgccgccgcgatttccggtgtgctgctgagccgtcagtccaagagattcgagaaggccgcagccgcagcagcggccgatgcggaggatgacgaatcgattgatggcgatggcgctggtcagaccggtcgcaccacaaagtccaccacgcccacggaacaccccggcaccctcgccgacggcaccgccagtgtggagattgacttccgccactgatggcttagacgatccctactccattgttggccttgtttcgtgaaaaccgtacgctgaggcgcgctcaccgtacgttcttcacgagatgaggctttatttcgtgaaaaccgtacgctgagtgtcactcaccgtacgttcttcacgaagtcaaggatgatttcgcggaaaacgtatgcagagcttcaggcgctagaatgcgaagagtcgatagcaccgtacaggaggatattggatggcaaagaagcagaagaaatccaagaagaacgacggcaaaaaggccgctgaagcaaagaatccagccgaggccgcatccaagtccacagtcgtggacgatatggaaccattggaagccacagccgcgaatgatgcggcaacgttggaggccgagacggcaaccgaggctgccgcaacgccggtgaacccggtcgacttggaggacgtctcgccgctgggcgacacctaccatcgcggcccggtgattctacgcggccagatgattccctcggacaataccaccgccaatctgctgaaacccgaccaggacaccgactggctgcacatggacccatggcgtgtgctgcgcatccaatcggaattcgtggacggtttcggggcgctcgccgagctcggacctgcggtctctattttcggctccgcacgcacccagcgcaccgaatcgatctacaaggcggcccggcgcatgggtagccagatagccaagcgcaacatcgccgtcatcaccggcggtggtcccggcatcatggaagccgcgaataggggagcggcactggctggcggcaaatccgtgggactcggcatcgaattgccgcacgagcaggggttgaaccagtgggtgaacctcggcatgagcttccggtacttctttgtgcggaaaaccatgttcgtcaagtattcctccggcgtgatcgtgtgcccgggcggcttcggcacactggatgagatgttcgagctgctgaccttggtccagacccacaaggtggcgaatattccggtggtgctctacggcaaggaatactggcaggggctctttgactggctcaacggtccggtggccgagcacggcatgatttcggcaatcgacccgaaactggtcaccgtgaccgatgacgccgacgaagccgtggaggtggccgtcagcgcaattgtgaggtaagcgagatagagtggctcccctctccgaggggagccaagggcagagttactttttgtaggcgatgagcaggcctgtgccgtcaggggtaagcgtggactcgaaaccttcgtcatcttcgacggtggtgagcagctcacgcatggcgatggccttgtcgctgcggtcggccggattaatcatgccgccctgaccgtcctccaacgccagcacatcggtgaacacgatcacgccgtgcgcgcgcagcagacgggaggcctgggcgaacgtggcggcatagttctcggcgtcgcccgccaccacgatcagatcgtaatcattggcgttgaggcgcggcagaaacacgctggccggggcgttcaccgcacgcaacgtggtgtcggtctcatcctgcagttcggcgaacgccttgcgaatcagcgcgatgccctgagcggtggaatcgaccgcagtcagcaggcccttgttatccagcgcatgggcgagctgcaaggtctccaccagtgagccggtgcctacggcgatgaccgaagcggcgccggtgatgcgcaccagcatgcccagcagacgggcctgcgcggccgaaccctgcaactggccggacttgtcggcggccgtacgggcgtcggtcaacgcattggattcacgttcgcgcgcgtgttcctcggtgaattcccatgccttggcgaggttggtgtactgcgttctgtccataattcgttcctttatgtcttctctcgtgcgggcacccggtggatgtatcgactacgtgttgcagcgattgccgtagctggtcgtggcgcggcttagcgctcgcggaccttggccacgatctgccacatctcctcgcccacatcgatgccgcgcgggcagtggcgggagcaggcgcgcacggactggcaggcggccacgccgtcggcggtgtcgatggcgtccatacgctccatggccttggtgtcgcgcgaatcgttgacgaaacgggaggcccaaatcagcgaggccgggccgatgaaagcgtcgccgccggcgtacaccgggcaggcgccttcgcacacgccgcaggcgatgcagttgctcagtagctcgtatttggcgagttgttcggggttctgcaggtattcgaacacgtccaccttgccttcggcggtggtggcgagcacgccgtccgcctgaagatatggggtgagcttccttatttggttgagcatcgggtcgatgtcggcgatgaggtcgcgctgcggcgggaagccgggcagggatgccagttcgatgactcccagcgagccgtttgcggccgagtcctggtcggctgccgcgtttgcgtcgttttccgcggaatcgtcggattcttcggactcggtgccggtgtgccggaacccttcgtcatcgacttcggggatggcgccgggctgcttggcccaatcgcggatggtggccgtgcacagcagggtgggggtgccgttgatggccacggcgtccgaaccgcacatgccgtgaccgcacgaatagcggaaggccagcgtcgggtcgacggtgcgtttgatggtcagcaggcagtcgagcacggtgtccgaggggcgcgcgggaatcgtgtattcctgcacccactgcttgccgcgcggacgacggcgtgccgccgaatccgagccgccgccgaatggggagcttttcttggcgaacgggctgccgccgcgtgcacgttcggcgcgctcgggtcgcggcgtgaaacgatgcacttgcagggtaaccgtcgtgttgctcgcctcagccatgttctgcctccatgaaacagtgggatgtcaagtccaatatcagccaacctattgtgccacaagccctaggcggcttggtattaccaccagcggatcagtactcgcgcttcttgggtggatagtcggtgatgtgcaccggcttgaaacttgccggaccatcatcggcgaccatcgagtgagcaaggaaatgctcatcgtcgcgttcggggaaatcaagtcgttgcatggatccgcgggattcctgacgggattcggaagcgtgcagcatggcctcggccagttcgattagatgacggacttcccagatggcggtgacctcctgattgaaagcggcggtcttgtcatgggcccgcaaggtatcggcaaccggtgtgatgtcgttgttgatctgagtcaacgccgtatcgatggtctgagcggtgcaacgtacggccagagcctgctccatcactgatccgagttgggccatgagctgataaggattggcggtgggcccgccatcgtctgaatcgtccatcggcccggcgagcagttcgtcaagctctgccttgcgggaatcggcagcctgatcggcggcatcggtcagcatgtcatcggtcgaatcattggccatgggggagtcaaccgggttctcgacgatgcgtgcggccatcgtctgaccagcacgtgtaccgaacaggcaggcgtcgagcagagaattgccgcccagacgattcgcaccatgtacggagacacaagagcattcgccagcggagaacagtccatcgactacctgcacggcaccgtcggcccaacggtacacctcgccattggtggtgatggggatgccgcccatcgtgtaatgcgcagtgggcttgataggcaccaggtccttggccggatcgaggttcgcgtactgctcgatggtttcgaccacctgcggtagcacttccttcatacgttcggggtcgatgccggtcatgtccagccagacgcagtccttcggaccatccgggtccttcgggtcggcgacgccgcggccggcgtcgatctccgccatgatggagcgggagaccacgtctcgcgcggccagatccctatgctccggggcgtagcgttccataaacggctcaccgtcggcgttcctcaggatgccgccctcggcgcgggccgcctcggacagcaggatgccggtgtgcgcgagcccggtggggtggaactgcacaaattcgatgtcctccagctgcaggccggcggccaaggccaatgccatgccgtcgccggtcaggtcccaggaattcgatgtggtatggaacagtcggcccgcgccaccggtggcaagaagcacgttgcgcgcgtggatggcctgaatcttgcccgaatgcgtgtcaaatgccacgatgccggccgtctgcttgccgtcgtcggcgagcaccaggtcggtcacataccattcctcggcgaactcgacgccggcggccacgcactgctgccacaaggtgtgcagaatctggtggccgatgcggtcggccgcataggcggcgcgcttgaccggggcaccgccgaactcgcgcgtgtggccgccgaaccggcgctgggcgatatgcccgtcatcggtacgggagaaggccacgccctgacgctccaggttgatcacggtctgcggcgcgtattcggcgagcagtttggccgcgtcctggtcgacgagccagtcgccgcccttgatggtgtcgtagtaatgccagtgccagtcatcggactccacattgcccaggctcgcggcgatgccgccctcggccgaaccggtgtgcgaacgcagcggctgcagtttggagaccacgaggatcttcgggtccacgccttgttccttgagctcggtgattttgggggagcgcagcagtcccaacgccgccgacaggccggccgctccggcgccgacgatcaccgcatcatacatatcttccaaacgtttcggactcatgggttcgattctcgcacacccgccgaacagtcttcgagccgtgtcatgaaagccgattagccgacacggctgctcagcttgagtatgccggcatcccgctcgatcactcccttcagctccaatgcgccgagtagctcaagtatggtgccgatattgggaatctcgtcgggtaccgtctctcgcgccacacgcaatagtgcgtccggggtgacgatgagatgtcgtttacggcattcacgaatcaatgccactaatgtgcgttccatttccggcagcttggcgataatgatacgttgttgggcttccttctcgggatcgagcttcggcttgacacgaagatccggcatctgatgcgacgagggcggctcttcacccttgctcttgttggcaccggcctcggcagttgcgctcgccggcccatccttggattgaacgagtgtaggctgagtatgcttggtcctaagacgtttcgaatgacctgaatcttgtgacgactcctgtgacgccgatgattccgaggatgctggcgataacggagtcgttgccggcacttccatggcctcctcgttttcggacgagtcctgacctgtggatttcggtatgcctgggcatgccgccataacgggcttatgccgttcatggcatatatcctcagtggatgtggcggcacacagaatcatcgcccggtggtcgccgatcatcttattgcacccggcgttgcaaggctgattgatgtcaccgggaaccgcatacacttcgcgcagcaattcgcatgcccatcccgcggtgttgagcgctccggaacgcaaccgggcttgcgtcacaatcaatgtggaagacatggccgcgataatgcggttgcggagtagaaaacgacgggcttcgggaatcgtccctgggcacagttcactgatcagtgcaccaccctgcgcctcgatacgttcgaacagcgtgcggttacgcatcggtccgatatggttgagcccgccggcgaatacggcaacggttctgcccacattggcgggcattctgccgtgcagcgcattcaacgctccccaatgtgccgccgcatccgtgcccattgcgcctccggacacgaccagatgcccggcaacgactgcctgttcggctacggtgtgtgccacataccggccgtattcggtcacgtcccgtgaaccgacgatgccgaccggtttggcgcaactggtcaatgcgcgtggatcgcctttgatccacaaacacagcggtggcgcccaatcggagcgaatggacaggtcggccaactgcgagggccaacatggatggccggggccgataatccattgcgtgccatccatagtgaaccagtcggccagttggatgatgtcttgcgagggcaggtccatcatgcggttatgccagccggccagtgcattgcggaaggagcgcatcgcgttcgccgacgccttgcggccccatcgggtgaggccatccacgaacatgcggtcaatacgtgacagcgccgggccgcagattccagatggctggcttggatgggattgcgccaacgcgtgccagagggattcggcgctttccgcgcctttgagcgtggcgtacatcatcacatccgccccatcaagacagaacgtgagcgcggcgcggtataacgtatccgtgggaggcatgggaatggtgcgcgaaacagcgaggcccgtatcggtgtgatccacactgcctgcggtgccgccagattgtcggatatcagtagcgttactcatgtcatcctcgttctcatttcgatgccctgatggacgtcctgctcggtgggggatacgcggccggccagatcggcgagcgtccaagacagacgcatggcgcgatcggccccgcgcaatgtgagttgatgattggacagggcccgattgaccaattccatcgctttcagcgacgtattggcgtgcagccatttgcccgaagcttgcgcgttgcacacccatccatactgtctgaaccggtccttggccacttgacgggcgcgaatcacacgagcttgtatcccggcactggactcgccgatcgtctcgctctgcgcggcaatgcgcgagaccggtggcaccgccatctgaatatccacacgatccaatatcggtccggacaatcgcgagaaataacgaatacggtctttttcccggcaagcgcaacgttcgccggtaccgtaatagtatccgcacgggcaggggttggccgccatgatgagttggaatgaggccgggtaataggtgctgccttttgaacgggaaagcgccacatacccggattccaatggttcgcgcaacgtctgcagggcgcgtgcgctgaattccggtgcctcgtccagaaacagaatgcctcgatgcgcgcgcgtgatcgcgccgggaacggcgatgccgctgccaccacccaccaaggccgccgtgctggcggtgtggtgcggtgcctcgaacggcggcatgtcggtgatgccgtactgaggcagtatgccgcacagcgaccgtatcgacgccacctccagttgttccgcctcgttcaacgggcacatgatgccgggcatacgtgaggccagcatggttttgccgctgcctggcggtccggtcatgatgagattatgtccgcctgccgccgccacttgcagcgcccatttggcatgttcctgacccagaacctcgttcatatcgccacaatcgttgggatggcttgtgggcgattgatccgtggtggtctcgtcggcaaccggtgtatcagtaatcgtataggtggcatcgccgcccatcagttcgatgagctcacccacatgcctcacgcccactacatccagtccatccaccattgaagcctcgtcaagattgcgatggggaacaatcattttgcgcacgccacgttcctcggcatgcagcatgatcgggagcagcccatgaatcggcagcaccgagccgtcaagattcacttcgccgagcacaatggtatcttccaagcaatcatgccctatggcacccgccgcgcataggacgctggccgcgatggccagatcatgcgacgaaccacgtttgggcatggccgcagggctcatgttcacggtcacgcgggtttgcggccaaccgaatccagtggcttgacacgccgatttcacgcgctcgcgggcttcggacaacgatgcatccggcaatccgatgatgctgaagtatggcaagccagggctgatgaaagcctgcacttggacgatgaaggccttaaggccgatcagtccgactgagagagtgctgccgatagccatgtctactcctttcgcaatgtgtttcgcaacgtggctgtttttttgggggacgaattcagaaggcgttttcgatgtgatgcacgagcggtctgcccacccgaagcacgatggtgacgacatcgaaacggactgccgtatgcggcacacgattacgccggtcaagcagccaatcgcaggcggctttcctgagattgtgctgtttcgccggcgtgatggcctcttgcggatatccgtaatgcatggaccggcgtgatttcacttcgacgaacaccaccgtgtactcgggattgagcatcacgatgtccaattcgccgtaacgggtatgccaattgcggctcaaggtcgtccaaccgtgttcctccagccacgcggcggcatactgctcgccgagcgcaccgaactgtttgggcgtcagattgcggtcgcccatcgtggccgcaatccgttccgaaggcagcgttgcctgcggatcaggtgaagccagcatgggctggtgaaaggcaagaccggcgtcgatgccggacttcgtcgtcggctgggtaggtggtaaagcgttcatgattccactgtgcgggttacttatgtaagagcacaagcgcaaccggcaaatgtggatactatgacgcggtttggcgtgttgtggataacgtgtggatgaaaacccggttatccaccattagttcagaaggtttaccaaggctccccagccgacttacctgtgacgacagacaacccgccgagttgttcgctgaatacgtcagacccagtgagcggagaggggagccaaggtgcggtcacttcaccaaatcggtgagttcgccaaggttcagttcgaagctgacgccacgatcctcgaaatgcggctggtcacgggtgctgaccatggcgtgtcgcacgaactcgccggcgatttcggccgactcggccaggccgcggccggccatcaccgcgccgcacagggcagatgcgaaggcgtcacccgtgccgtgaatcatgtatggcagcttttcatgagccagctcgatcttgccggcaacaccggtggaagcgctggccacatagttgacgattttgccatcgccatggtcgatgcccttcagcaccacgttcttcgtgccaagctccagcagcgcgcccaacagctcgtcaaccgtggcttcatcgatatcctgaccggggtagtcacgcttggtcagaatgctcgcttcggtgaggttcggcatcagcacatcggcgccgtcggccagcgcacccatcgcctcgcacagttccggcgtatacgtgggatacatttcaccggcgtcgcccatcaccgggtcgaccagacgtagcgcattcggatattcgcggtagagacgctgaatgatcgccacctgatcgggggagccgaggaagcctgaatacacgccatccagttccacgtcttccttctgccaggcatccaagtaaccggagagaatatccgtggtgtcgtggaacgtgaacactgcatagcgcgtgtgcgccgagaacagggcggtcggcaccgggcacacatcgcagcctgcggccgagagaatcggaatcgcggcggtcagcgagcacttgccgtagccgcacatgtcgtgcacggcggccacgcgcggaatatagttcggatcacggtcatacagtgttacatcggtcatgtctgttcgaaccccttcaccatgttggcggaataattcattggcgatgtttgactgtagtcgttcgtcatgtaaaccatgtaaccgggcggcggaaaaaaggaacagacgtcatcaccgagcgggcaaaccgtcttggtgacgggtggaacaagcaatcatcacggacacttgagccatgcgcgaaaggcatggtagcgatatcaccgtgaccgcagtcgaccgtgaaagcgcatgcgtgcggcccggcgtgtcgcgataatttcaacgactttttcgtgacttctgacagtctctcacgtcaatgatcccaaggctttataagcccttataggcaagcccgataacgttcggcttgcgccgcgcggcccaaacgtcgtaacttcataaccaacacctcgccaaccgcccgaacacggcaggcgggcggcaaggaaaaatcctcgcgacctagcacaaccaaggagaaagacccatggccgagaacaacaagaagtaccgttttgagaccctgcagctgcatgtgggccaggagcaggccgacccggccaccgactcccgtgcagtcccgatctacgccaccaccagctacgtcttccacaacttcgaccacgccgaggctcgcttcggtctcgctgacccgggcaacatctacggccgtttgaccaacaccacccagggtgtcttcgaggaccgcatcgccgcccttgaaggtggtaccgctggtctggccgtcgcttccggtgccgctgccgtcgaatacgctgtgcgtaatatcacccagtccggtgaccacatcgtcgccgccaagaacatctacggtggaaccttcaacctgctgcgccacaccctgccgcgtgacggcatcaccaccaccttcgtttccgccgagaacccgcaggagttcgaggacgccatccaggagaacaccaagctcgtctacttcgagaccttcggcaacccgaacgccgacctgccggacttcgaggccatctccgaaatcgcccacaagcatcacctgccggtgatcgtggacaacaccttcgccactccgtacctgttccgcccgctggagcacggcgccgacgtggtggtcgagtccgccaccaagttcatcggcggccacggcaccaccctcggcggtgtgatcgtcgaaggcggcaagttcaactgggccgaggtgccgggcaagttcccgaccctgaccgagccggacccctcctaccacggcctgaacttctacgaggctctcggcggcaccgccttcgtgacccgtatccgcgccatcctgctgcgcgacaccggcgccaccctgtccccgttcgccgccttcctgctgctgcagggcaccgaaaccctgtccctgcgcgtcgagcgccacgtccagaacgctctgaaggtcgtcgagtacctgcagaccgtgccggaagtcgagtccgtctcccacccgtccatcccgggccgtccggatcacgacctgtacgagaagtacttcccgaacggagcaggctccatcttcaccttcgatatcaagggcggaaaggatgcggctcgcgtcttcatcgacaatctgcacctgttctctctgcttgccaatgtggccgacgcaaagtccctcgtcatccacccggcttccactacgcactcccaggagaccttggaagagctcgaggaccagggcattcaccagggcaccatccgcctgtccatcggcaccgagaacatcgaggacattctcgatgacctgaagggcggcttcgaagcccttcgcgcttccggcttggccaagtgaggtcgacaggagggttgacggcccgatgagaaggggcgcgatgctaatggggtgcatcgcgaatcatcgagccgcatggggtgccttccgcctgatcgcttgacccaaggagtagaaagctcgcactgacgtcatgcagtgcgggctttcttgcgtctgtatgcctcacactgtttgcgcagaggcatgaatagtgtgagacctgagacgacataatcctcaaggatgagggccggcgcgtggcccctagcccaattcagtctggcgcacgatggggcgcgccgttatttcttcataagttggaatcgtcatccgggcataaggtccggccaaatatggagaggcattatgaacgtgcagaacccgtccgcatcgcgcggcatcgctattcaggccgtcgacttggtcaagaactacggcaccggcagcaatatggttcacgccctgcgtgacgtgaacgtgagtttcgaacgcggcaaattcaccgccatcatgggcccgtccggctccggcaaatccacgcttatgcacacgctcgccggcctcgactccgccacatccgggcatattcttttcggcggggcagacctgacccgcatggacgacaagcagctcaccttgctacgtcgccacaagatcggcttcatcttccaaagcttcaacctgttgcccatgttcaccgccgaacagaacatcctcatgccactgactctcgccggagacaagcctgaccacgcctggttcgacctgctcgtagaaaccttgggactcaagcaacggctcaaccatcgtccgaacgagctgtccggtggccagcagcagcgcgtggccatcgcccgcgcgctgattaccaagccgaagctggtgttcgctgacgagccgaccggcaacctcgactccgtttccagcgccgaagtgctcggcttcctgaagcgttcggtcaacgagcttggccaaaccatcgtcatggtcacgcacgatgcggtggccgcctcctacgccgaccgtgccatcgtattcgccgacggacagatcgtggccgatgaatcgaatcctactgccgaaacgatgaacgagctgcttatggccgaacgcgaacgcgccacgcgcactgccgtcaccagcacacgcgccgacacgctcgcccgtcttgccggcgtagaggatgtgcccaacctgcccatcaccgacgctccattgcccccagccgggagaaccggcaccatacgccatgcccgcgccgccgcacagcacactcgctgagccggaaagcgagagacaggatacccccatgttttccatcactctgaaacttatgaagaaaagcgccaggatgctgattccggcaggcatcgccatcctgatcggtactgcgttcatcgccgctaccttcctgttcggcaacgcgatgaacgatgcgcttgccgcccagaataccgcccagctcggcggtgcgaactacgtgatcagcccggatagcggcaaggacctgaccgataaggaccaggactacatctacacgcgcacggttaacgacttccagcttgaccgcatccgcgccaccaaaggcgtcaaggacgcacgtgccggctacgcgggttccgtgaccgtaatccgtggcaacaagcatgccagcagctacgtcatcaccaccgccacaaagcgcacgctgctgccggtcaccatcacgcaaggagaccagccggcggacagcaacgagatcgccctgaccaagtccgtagccgaccagctcggcgtcaaggtaggggaccgtgtgaccgtcaactcgcaggcggcgcagtatgcgggcaagaccggcgattcggccggtaataccggtgacgctggtgatgagtcggcccagaacgccgatggcacgagctcgcacgacggtgattccgatgccgcgtccggcgcgtccgccccatccgacggcaccgacacggccgccgactccggcatgaccgtgcgcgtggtcggcctcaccgacgacccgaacggtgcctacgcctactacggtggcgcttccgtgctttccgacaacgtcatcaccgcaatggccggcagcaacgatttcggcaacctgcctgtctacctcgtctatctcgacatcgacgatgccagcgacacggccgcggcatccaccgtaaaacaggtcagcacactgctccctaagcatttcagcgtgcaatcccgtgccgcgttcgtcgaggaatccgtcaaaagcatgagctcgggcgaaaccagcatcaccaccatcttcctgctgagcttcggcatgctcgccatgctggtcgcggcactcgtcatcgccaacaccttccaagtgctcgtggcacagcgccgccgcacactcgccctgctgcgcaccatcggcgcgaacaaaagccagctgtatgtctccgtgctgtttgaagccggtgtgctgggactgatcgcctccgcactgggagtgggcctgggcatcggactcatggccgcactatgccagtcgggcctgatgaaagccaccggcatgaccatgcgactggtactatccggtccggtgttcacggtgcctatggcattcggcatcattatgacggtgattgcctcgctaggctccgcgcgttccgctaccgccgtcaccccgctggaagcgttgcgacccatcgaactgaccgacacgcgacgggccggtgtggtccgcgccgtgatttccatgctgctgattgtgggcggcgtggcactgtgcgcattctctgtatggcagatgtccgagaaaatcgccggacgtgattcaatggccgacaagcagtattcgctggtgctgctcgccgccatcatcggatgtgcattgatcttccttggactggtgctttccgccacgttctggctaccggtgctcatgcgcggcgtgggcgcgctggttgcactggccggtccgtccgccaaagtggcacatgcgaacattcagaagaacccgcgccgcgtggccgccaccggtgccgcactgcttatcggcgtgaccctggtctccaccatcgccaccggtgccgccagcgccaagcaaaccatgaacgaggcgctgaccacgcgctacagcgtcgacatgattgccgctggcgccgatatgactggcaaacaggccggcgaggcagccaaagtcaagggcgttcagagcagtatctacgcgccgacccgcatgatgaccatgaaggatgccgacggcaagagcctgagtgtgctggttgtgggcgtggatggcgtcgacgcgctgcgcaaggtggtgcgctccgatttgtccggtgtgaccattgatggcgattccgtactgatgcccaagtattccgccgctacaggcaaggatattccgctggacaagagcgttacgttcacggctggagcggccgaagcacaagccgatgccgccaatggtccgtccggtaatgatgcgaacggcagcgccgaaaacggcaatggacaatccggcggcacacagacgctgacgctcaaaccgcggaaggtggactatcgccgcattgcctccaactacgccgcggtcgccttcgtggacgccagccacttcaccaacggtggaatcaaggccgacgggcatatcatgcttatgcgtattgacgccgagggcgcgggtgttgcgctgaacgacgtattcaccaacgtgcagaatgtgttctccgccagtgctggtgttaccgtgaccggtccggtggccgaacgtacgcaatgggagaccatgatcaacggcatgatggcattgttggtcggtttgattgcggtggctgtgctcatcgccttggtcggtgtggcgaacacgctgagtctgtcggtgatcgaacgcacacgcgaatccgccaccttgcgtgccatcggcatgacgcgcggccaactgcggcgctcgctggcggtggaggcgttgctgctttcgctcgtctccggcgtggtgggagtggtattgggtaccctgttcggctggctcggatcctacatggtgtttagtttgtacggcgacaccgtgttcccgttcgaatgggccaccaacggtgtggtgctcggcgtcgccgcgctcgccgctctgctggccagcgtggcacccgcccgccgggccgtcaaaacgccaccagttgaagccttggccgaagcgtagagcaataagctccctcatcagagggagcttttttgttacaccagcccgttatcgtacgcgaagactacagcctgtacgcggtcacgggcgttgattttggcgaggatatgcgccacgtgggttttgacggtgggaagggagataaagagcttgtccgcgatctcctgattgctcagaccatgggcgatctccaccagcacctcgcgttcacggtcggtaagcagatccagttcgggatcggtgtatgctgggcgtgacgtattggaaccgtcggaagcggccccggcaggggaggggatgccggtcatcgagccggcaccgttgccggccgcaccgccagagacgccgacggcggaaccgtacacggcaccggagcgcgcgacatcgccggtcagcgaaccatgctgcgcgtaaccgtcctgcatcatcttttcgatgagtcgcttggtggcggaaggcgcgataatcgcattgccttggaatacagtacgaatcgaattgagcaacgtttccggttcggtgtccttgagcaggaagcccgaggcgccggcattgatggccgccatcacatactcgtccaaatcgaacgtcgtcagaatgattacgcgcgtcggccggtcgtcagccgattcggccgagacggtcgcgtcggcggccgggctggccgaatcggccgcgttgtccggcgcggcggagagtgaggtaatacggctcgtggcctcaatgccatccatgccgggcatgcgcacatccatcagcaccacgtcgggatgcagggattccgccaacgccacggcttgggcgccgtcggacgcctgcccgaccacctccatatccggttgcgaaccaatgaccatggcaaaaccggcacgtaccagctcctggtcgtccgcaataatcacgcgaatgcttctgctctcgttcatgctctccactgtatccgtttcctatcggagcgccgctccataaacaccctgattgttccctgagttcttattgggcaagtctctcaccggggtaacgttcccgcgtgttgcatctgactatccaacgaagccgccggtcgcaactgcatatccggctgcacaccctcatgggcctcgtcgctgaacccggtttcacgcaacactctcaacagctgacgcatatgagccaatgcggcgcgcccccgagcaccaatcgcggcaaaagccgcttcaatctgcatactatcaggcgcaggttcggcgttgagcatcaccagtccctcgtcagcctgcgcaatcaccgattccagcgtggtcagtacttcggtttgcatcgccgcactaatacggttgcgctctaagttggccgccagcaccttttgccgctcctgctcggctcgcagcgcctcctcgcgtcgcaacagcaccagagcgtttgcgccacgcgaacggctccatcgagccatcgcaatgcaggcaaaaccgaccaacatgattcccgcgcccggcagcaagccggacaaaaccagcctccattttgagagcatggaactaccatcgggcaaaaacagatggaacagctgactgtatccattccacccagccatcaccttgatgcccgcaagccacgaatcggctgccagcgccacgctcacccagcgccaagcggactctcgtccatacaataccgccgaatacacggataccatcgcaaacatattgatggtcaaaatcgatggcaagaacaacagttgcacagcagacagcaccgccatcgccagcgcgctgccctctgggaagcggcgacggaacgccaaaggcgagagcataataatcgtcagcattatagtcggcacgcggttcggcgaatacggggcattgccgatcatctgcaaatcgccatacgtggcggaatcaaatagcgcaatcagcacgatagtggcgataacgtccatcagaagatagtgccgctcggtccactgcgcaaatcgacccacccagttcgactcacgcgtatctccttggtcgagtactttggggcgcgcccgatccatcaatcctcgtatacgcgagataacggttagcaccggatcctccgtatcggtgccagactgtggggcggcaggggagagcggaatcgtagccgccacaataaagccaccattcggccctgggcctgcctgcacgctgccacccaacgactcaatgcgttcgtgcataccaaccaatccgtatccgggcttatggccgtctgctgcagacgtcgcgccacggccgttatcggatacggtaatcgacagcacatcgtttgaccagatttcatcgatggtggctttagcaccctcgcccgcatgtttgcgcgtattggtcagcgcttcctgcacaagacggaacacggcggtttccgcgtcggcggacagccggtcaggttgcgctttgccggtcatatgccgggacaccaccagatgaccgtcaaacagcgaatcgatgtcggcatatccggtactgccactcgcaccgaacacattgaacagacgctgcatatcatgctgcgcgcgttccgcttcatggcgaatcgtacccatcgtgtgcttggcgatggccagatcatgcgcacccgcataccggccgccatccgactgcacaataatcgtggagagcgtatgtgccaccacatcatgcatatcacgggcgatgcgtgcgcgttcggccagcgccgcgatgcgcgtctcctcggcctctttcgccacaatggaagcgttgcgctcgcgcatggccgccagcgtggcgttgcgcgctcgctgccacaaggccatgatgatgacgctcagcacgctcgattcgatgaacgccgcctccatgccgaagtcagcgagcatcttggctccgcagttgacggcgccgcttgcccccacgacgccggtgaccgccgggcatgtgggcatcgtgatggcatcggacagccagccgtcgcggatgacgcgcgaaccggaggaaggtccgtcgaacagcggacccacgttgaaagacaccgaccagaccatcgccgcgaccagtcccatgacgaacgccgtgacgatgaaccgccaggaatgtcggggattgccgtacagaatcaccgaatacaccatgatcagggcgtagaaatcgaaatacatgatcgccgggccgaacacaagatgcgtgatggtcagcgccacgaacagccaggccgccggctccgggcaatacctgcgcagcatcagcggcacgaagaccggcagcgaccacagcgtcatcgacgcctgagttgcgggaaacaatatgccgcccgtcgaatcagggctggtgacgccgatgaacggcacgcagccggcgatcagcgctgcggcgagcaacgtgtcccatagcagtgtgcgggtcgactcccgtgcgcaccatgccctcacgcgcgccataatctccataacgcgcaaggctagcgtgtccggcgacgaaccggtatcactcttcaggaggatttatggactagagtcttgaaccatgacgatgctgagcaaatactacgtgcccggactggccatagaggaccattccatcgatgttccgctcgactggaccggccatgagccaggccaagcgttcgacggcgaaaccatcaaactgttctatcgcgtggtcaccgcgcccgaacacgtgcatgacgacctgcccctgctgattttcctgcaaggcggtcccggcggtgccggcccgcgcctcaacagcccgacctccgacggatggatcgaggaggccatcaggcacttccgggtgatcctgcccgaccagcgcggcaccggccgctcctcgcgcgtggacacgcacgccatggcccgcatcgccgccgcgcacgacgatgatgccgcggccggcgcacgagcccaagccgactacctgaagaagttccttgccgattccatcgtgcgtgacttcgaacatctgcgcctgaccgaattcggtggccgcaagtgggtgacgatgggccaaagctacggcggcttcctgaccctgaccacactgtccctgttcccggccggcgtaatcgccagcttcaccaccggcggcatcccgcacgtgccggccgacgccgctgaagtgtacgagcataccttcccgcgcatggtgcgcaagacgactcagttctacgagcgctacccacaggacaaggagcgcgtggccgccatcgccgacaagctgccgactactgcggaagtcgccgaattcgttggcaaactcaccgattccgtactgaatccgatggctggtaccgatgtggagcatcgacttggcgtgatcgccggcatggccgcccacggcttcccgctgatgccgaacggcgacccgctcaccgtcgaacgcttccagtgcttgggatccgactttggcatgaagccgagcttcgagcgtgtccattggattcttgacgacgccttccttgatggcgatggttccgcttctgccgactcgccgttgtctgacgaatttttgaccaaggtgatgaacgccacttcgtcgcgcccgctgtactggccgctgcaggagttcatctacgccaacggtgagatggaacagccgattcgctgggccgcccagcgcgtgcgcgatggcaagcccgaattcggtgctgatgaacgcccgctcaacttcaccggcgaggccatgttcccgtggatgttcgaacaggaggccgcattgcgcccgttcaagccggccatggacctgctcatggaagacacgcacttcggcgtgatctatgacgaaggtcagctggcccgcaatgaggtgccgctgcgggccgccgtctacttcgacgacatgtacgtcgattccggtatgcagctcgacactttgagccgcgtgggtaacagccactactggaccaccaacgaattcgagcatgatggtctgcacggcccgctcgtcttcaagcatctctatgacgaagcccttaaccggggcgacctcgaagaactgttctgactcaaggaagcaagctccctctgatgagggagctctgtatacatgcacgaaaggaaaacgtatgactcagaacctcaccatcggattcatcggatacggcaacatggcccaggccatcgcccaaggcctcgtcgatgcgggcgtggtcgccggcggccagatggttgcctgcgccgcccactacgacaagcttgagaagaccaccgccgaacttggcgtgcgtccgttgcacaatgcgctggaagtggtgacggccgctgacgtggtcatcatcgccatcaagccctaccggattgctgccgttgtcaagccgctggccgacgaacttgccaagccgggcaagatcgtcgtctccatcgccgccggctggaatctcaagaagtaccaggacctgttcaccaccgaagacggcgaatccgtcgactcttcggacatccatatccagtgcaccattccgaacactccgatggccgtgggcaagggcgtgcttgtcaccgaatccgtcaacaccctgaccgacgacgaaaccgaaaccttcgagcagctattcggccccatcagcctcatcgagcgcgtggacaccgcgcatatgaacatcgccatggtggtggctggctgtgcgcccgccttcactgacatgtacatcgaggccttgggcgacgccggcgtgcagtacggtctgcagcgagccaccgcctaccggctcgccgccaagatggtcgaaggtgtcggcgcgctctacatggccactgaaacccatcccggtgccatgaaggacgccgtctgctcgcccggtggtaccaccatcaagggcgtcgcccagcttgaaaaggacgggttccgcggctcggtcatcgacgccgtagacgccatcgtcggctgactgccaatcagagttcgcgtatattcgcatatcacagtcaaggccttcgagccgtatgctcggaggcctttgcatatggccggttcaccacatgcacgttcaatgtgtccagcttctccctagactggaatcatgtctcttactatcggaatcgtcggactgcccaacgtcggcaagtccaccatgttcaacgcactgacccgcaacaacgtgctggccgaaaactacccgttcgccaccatcgagccgaacaccggcatcgtaccattgccggacaagcgtttgcccgtgctggccaagctggtccacaccgaaaaggtcgtgcccgccacggtgaccttcgtggacatcgccggcatcgtcaagggcgcctccgaaggcgaaggcctgggcaacaagttcctggccaacatccgcgaggcggacgcgatctgcgaggtcgtgcgcgccttcgaggacgacgacatcgtccacgtcaacggcaaggtggatccggccgacgacatcgacaccatcaacaccgagctgatcctcgccgacctgcagaccatcgaaaacgcgctgcccaagctggagaaggatctgaggggcaagaagatcgagccggcctacatggacgcagtcaagcaggcaaagaccatccttgaagccggcgagacgctcgacaaggccgcacgcgaaggccgcttcgacaaggattccgtctacgacctgcatctgatgaccgccaagccgttcatctacgtgttcaacgtggacgac

SEQ ID NO: 3786 - DNA, 3316 bp, Unknown
  R35_2m  MAG No. k141_2564
atcggcgaggtcaaggccgtggacgacgtgacgctggacgtgcgcgaaggcgagaccgtggcgctcgtgggcgagtccggctcgggcaagtccaccacgctcatggagatcatggagttcaagcagccgcaggacggcgagatcgagatgttcggcaccaagctcgaacacaagattccgcgcgagaagcgccgcgagctgcgttcggccgtgcagtatgtcttccaggacccgatgagttcgctcgacccgcgcctgccgatctacgacatcctggccgagccgatgaaggtccagcactactccaacgagcagatccgcgaacgcatcggtgaactcatgcgtctggtggagctgaaccccgaccaggtggaccgcttccccacgcagttctccggcggtcagcgccagcgcatcgccatcgcgcgtgcgctgtcggtcaacccgaagctcgtgctgctcgacgagccggtctccgcactggacgtgtccatccaggccggcgtgatcaacctgcttgaggacctgcagaacaagctgggcgtggcctacctgttcgtggcccataacctgtcggtggtgcgccatatctccagccgcgtggcggtgatgtacctgggccgcatcgtggaatccggcgacaccgaagacgtgttcgagcacccgttgcacccgtacacccaggcgctcatcagcgccgtgccggtgccggacccgaaggcggaacgcacccgccagcgcatcgtgctgcagggcgaggtgcccagccccaccgagacgttcgaaggctgcccgttcatgggccgctgcccgctcatgcccaagctgagcgccgaacaacaggcccgctgccgcggcgaacgcccggcgctgcggccgtatgacacttcccgaccgagcggccatcaggttgcatgccatttcgcatgacggtcggaaccatatagaggaggaaataacaatgaacaagacacgtaagctgaccgcgctcgccgcggccactgcggcgcttgccatgctgcttgccggctgcggcgcgggcaatggcaacggttccagcaatgcctcgagcgccaccgaaccgccggccggcatcgattcgtcgtacaccggcgacctgcccatgccgaaggtcaccgagcgttacgacaaccaccagagccgtgacaacgtcaaggacggcggcacgctgaccctgtccatcgtcgaaatcggcccgaactggaactacctgtcttccgacggcaacaccggctacatgtccgagctgtggagctggtaccagcccagcctgctcatgaccgaccaggtcaatggctccccgattaaggtgaacccggacttcctgaccgacatgaagctcgtgagcaaggacccgatggtcgtgcagtacgacatcaacccgaaggccaagtggaacgacggctccgacatcgactggaccgccttcaaggccacgtgggaagccaacaacggctccaacccggactacaacccgccgagcactgacggcttcgaccgtatcgctagcgttgagcagggcgacagcccgaagcaggtcaaggtgacctacaagaccccgtactacccgtggcaggaagtcttcggcgctctggtgaacccgaaggccgccgacccgaagaccttcacccagggctgggtgaagaacccgcacaacgagtgggccgccggtccgtacaaggtcgactccttctccgactcccaggtcaccttcgtgccgaacgagaagtggtggggcaacaagccgaagctggacaagatcgtctacaagcagatggccgacaccgcctccctcaacgccttccagaacggcgagatcgacgccgtggaggcctccaccaaggacgacatcaaggccatccgctccgtcaaggacgcccagctgcgcatcggctacagcaccaagacccgcgtgctggaatacaacggcaagtccaagccgctcgacgacctgcaggtgcgcaaggccatcacccaggccttcgacgtgaacacctacaacaacgtgcagttccagggcctgaactggaaggccgagcagccgggctccgagctgctgctgccgttccagaagggctacgagaacaacctgcccgccgaagccaagtacaacgtggacaacgccaagaagacccttgaggccgacggctacaagatgggcaaggacggctactacgccaagggcggcaagacccttgagatctccttcaccttcttcggtgacgacgccacccagcaggccctcgccaacgcctaccaggcgatgatgaagaaggccggcatcaaggtcaaggtcgtgaacgtggccgagtccaagttctctgacaccgtgtcttccggcaactaccaggtgctgccgatggcttggcaggctccgagcgccaacaccttcgtggtgtccgccccgcagctgtacacctccgacggcccgtccaacttctcctacgtgggcagcaagaagatcgacgagctcgtcaagaaggctggcagcctctccgactatgacgagcagaccaaggctgtgaacgccgccgagaaggaagccctcaagctgtacggcactatcccggtctccaacccggcttcgtacctcggtgcgaagaagggcctggccaactacggcccgtccggcttcgccggcaacctgccgcaggacatcggctggcagaagtgatgacgtctgatcggatgtctcttgacatctgactgatgtctgactgacatggccaccgcgccgggaacggtcggccgcacgcatcgactgcatggctttcgatgtcggacgcggcctgcggcaggttcccggcggggtgtgaccgcggcagcatatgccttacactccttatttctgcatatgatgctgcggttgggaagcctcccgtttgcgcgcttatgcgccgcgcgcgaacgggaggtttttgcatacttgccgcgattccatcccggcaacgatttgtccaccttgctgcccgcgcggctgaaaccgtatccaccttcctcttcccggatttgtgacgctgacggttgccgagcgtcacaaatccgggagatagtcgcccttacttgttgtcagaacttggtgagcccggatttgcggatatggtcctcccagccatccggcttaggcagtgtgaccagttccctcattgtcacggcagggatcgcggccgccacgatgcacaagcccaaagccacggacgtgactgagtaaccccagtgttgcatggcgatgccggacagaaatgtgatcaccggggcagcaatcgtctcaatcatgcccatgccgaggcatatc

SEQ ID NO: 3787 - DNA, 3520 bp, Unknown
  R35_2m  MAG No. k141_2647
acggcctgcgacctttccattcgtagtagccggaagcggggatgatggctcgcatggattttgtggattcggcgaacgccggcttgacatgcgcagactccacacgcgcattatatgtggggtagctcagcactttgctggcgctccatcgcggcaccagcgaccaataggcaccggtcagatgacggcggccatccttgccctgtgccaccacgccaatgttctgcatgggtgcgatgttgtaggaaggctgtggcagagtgtcaacgcgcacgtcatcctcgtctaccgcgaactgtgaggccacggcatcccaatccaaatcaagcgcgaatctcctgcacatgcgcccagtctatgccatcaatggaatcaatcccaggccgtatgaccgatattcatggtgattttcctttttgttggccgctctggttccgtagcgatacgaaccaacgaggaatagcccagaatgtaggacgggttcggcaatcgggacggggcgtgacctagagtggcgcatgaccgaacaccaacaaagggaggaccatgtcggttttggacgaactggtggcgggagcgctggaggatcagcgcgcccgtgagctcaccgtatcgcttgaggacgtgaagaaggccgcgctggcggccccggctccgattgacgcgatacgatggcttaagcgcgccgacggcatccccgtgatcgccgaaatcaagcgcgcgtctccgtccaagggccacctctccgacatcccggacccggccgcgctggcccgcgagtacgagaagggcggcgcaagcgccatctccgtgctcaccgaaggccgcagattcctcggcggccttgacgatttcgacaaggtccgcgccgccgtgcacattccagtgctgcgcaaggacttcatcgtcaccgactatcagatcttcgaggcccgcgcccacggcgccgacctggtgctgctcatcgtcgccgcattggacgacgcccagctcaagcatctgctcgacctggcgcacgagctcggcatgaccgtgctggtggagacgcacacccgcgaggagatcaaacgcgcccgcaaggccggtgccaaggtgatcggcatcaatgcgcgcaacctgaagaacctcaaggtggacgtgaacaaatacaacgaactcgcggccgatctgcccgataacgtcatcaaggtggcggaatccggcgtattcggcgcggtcgaggtcgaagactacgcccgtgcgggagcggacgcggtactggtcggcgagggcgtggccaccgccgatgatcatgaacttgcagtggaacgactagtaaaggcaggagcacaagtgaaagcatccgaaacgaccccgctcagcgaacatcagggaccgtattgggggcagttcggtggccgctatgtgcccgaggccctgatcaccgccctcgacgagcttgagcgcgtctacaatgaggccaaggccgaccccgaattccacaaggaattcatggcgctccagcagcgttacgtgggccgtccgagtccgctgaccgaagccccgcgcttcgccgcactggtcaaggagaagaccggtctcgacgcccgtatcttcctcaagcgcgaggatttgaaccacaccggtgcgcacaagatcaacaacgcgctcggccaggccctgctcgtcaagcggatgggcaagacccgcgtgatcgcggagaccggcgccggccagcacggcgtggccaccgccaccgtgtgcgccatgctcggcctcaagtgccgcatctacatgggccagatcgacgcccgccgccaggccctcaacgtggcccgcatgcgtatgctcggcgccgaagtggtcgaggtgaccctcggcgacaagatcctgaaggatgccatcaacgaagccctgcgcgactgggtcaccaacgtcaaggacacacactacctgctcggcaccgtcgcgggcccgcacccgttcccggccatggtgcgcgacttccagaagatcatcggcgaggaagccaagcagcagctccaggactggtacggcatcgaccatccggacgcgatctgcgcctgcgtgggcggcggatccaacgccatcggcgtgatgaacgccttcctggacgacgagcgcgtgaacctctacggctacgaagccggcggcaacggccccgaatccggcaagcacgccatccgcttcgcccccggcaccggccagctcggcatgttccagggcgccaagagctacctgctggaaaccgacgaaggccagacgctcgacacctactcgatctccgcaggcctcgactatgcgtccgtgggccccgagcacgcatggctcaaggatatcggccgcgtgaactacagctgggccaccgacgaggaggccatgaacgccttccgcgacctgagccagaccgagggcatcatccccgccatcgaaagctcgcacgccgtggccggcgcgtacaaggccgccgccgatctgaaagccaagggctatgacaaggccgtgatgatcgtgaacatctccggccgaggcgacaaggacatggccaccgccggcaagtggttcggctacctgaccgacgatcaggccgccgcgcttgatgtgaccggcgcccacggcaatactgtcgcctgaacaagaagaggagattgttgattatgaccaacgaagcaaccacgccgtccggccagccgctgggcatcagccacaagcccagcaagtcggtcgctatgttcaccaagttcaaggccgagaacaagcctgccttcatcggctacctgccctacggcttccccaacccggacgtctcgcttgacgccttcaagacgatggtcgagcacggcgtcgacgccgtggaaatcggcctgccgtactccgacccggtcatggacggcccggtcatccaggctgccgcctccatcgccctgaacaacggcgagaccatcaagcgcgtgttcgaggccgtcgaaaccgtggccaacgccggcggcgtgccgctcatcatgagctactggaacctcgtgtaccactacggcgtcgagcgcttcgcccgcgacttcgagaacgccggcggcgccggtctcatcaccccggaccttatcccggacgaggcgggggagtggatcgaagcctccgaccgccacggactcgaccgcatcttcctggtctccccggactcgtccaccgaacgcctcgaaaacgtggcccgcaacgcgcgcggcttcgtgtacgcggccgcccgcatgggcgtcaccggcgaacgcgccaccatcgacgcctcgcccgaactcctcgtggaacgtacccgtcaggccggtgccgagaacgtgtgcgtgggcatcggcgtgtccaccgccgaacagggcgccaaggtcggctcctacgcggacggcgtcatcgtcggctccgcgctcgtgcacaccctgctcgcggacgacaacaagaccgcacgcgacccgaaggaaggcttgaagctgctcgccgccaagagcgaggaactggccgaaggcatccacaacgc

SEQ ID NO: 3788 - DNA, 18483 bp, Unknown
  R35_2m  MAG No. k141_2650
cgggtactcgttgatgaggttctcgtagtagtcgagcatgtaggcggagtcgcgctcttcaccgtcgaagcggtacttgccggtctccttgttgtagaactcggaggaggcgacatccaggcagatgccgatctgcttgccaggctcgtagccggcggcggagatggcgtccatgatgtacttgagggagtcctcgttggacttcatcttcggggcgaagccaccctcgtcgccgaggccggtgttcaggccttccttcttcagaacgttcttcagggtgtggtaaacctcaacgccagcgcgcagagcctcggagtaggtgtcgaagccgtacggggagatcatgtactcctgaatgtcggtggcgaagtcagcgtgagcgccaccgttcatgatgttcatgttcgggaccggcaggatgtggccgttggtgccgccgatgtagcggtacagcggcaggccggcggactcggcggaagcgtacagagcagccagggagacacccaggatggcgttggcgcccagcttgcccttgttcggggtgccgtcgagctcgatcatcaggtcgtccagagcgcgctggtcagcagcgtccatgccgatgaccttcggagcgatgacctcgttcacggccttgaccgcgttaagaacgcccttgccgccgtagacggacttgtcgccatcgcgacgctcccaagcctcagcttcaccggtggaggcgccggacggaaccagacccttgccctgagcgccgtcttcggtctccaggtagacctcaacggtcgggttgccacgggaatccagaatctgacgcgcgtacacgctttcaattactgccacaactactccttaaaacggttgtgtatcttgaatgacattcttaagagtagtgcgatttgtggacgttgtgaacaacacgcccaaaatttagtgttagcgctcacaatgccgatgcgccgcctgattgcaaggcagtacggacgaaatcgctcagtcgacgtccttgccattgaggtagtcgatttcactgtcggacaatttcagttcgctggctttgaacgagtcctgaatctcctgcgggtttctggccgagggaatcgtgaacagatattggtattgcgcaagttcccacgcgagcgtgacgcgctggtaggagcagtcgtgggacttcgcgacttcgcggaaccggtcgaacagatgctcgttgaacgggtcaaggaatccaccgagcggcgaccagcagacgaaagccaaaccgagtttttcgcaggtctccaacgtgtgttcggggtcgcggtgaaccggggagaactggttctggacggccacgagacgatcgcccaaaatgttgtgggcggcttcgatgtccgcgttgtcgattctggagataccgaccgctttggccacaccttcgtccacgagctgcttgagtgcgcccatctggtcttcgtacggcacctgcggatcattgcagtgcgagtagagcagatcgagcgtatcgacaccgaggcggcgggctgattccttggcattggcgatcatggtttcgggtcgggcgtcggcctgccagccgtagttgccgttgccgtcaagcgtgcgcagccagccggttttggtggctacgagcacctgatctttggggccatgccacgagtgcagagcatcgcggaccagatattcgccatagcccatatcctccggttcgccggtgccgggtgcgctgggcagataataggaccaagccgtgtccaaataacggactccggcatcgagcgcggcatggatggtctcgatcgcctgatcacggttggaggggcgcccctcgatggcgagcgccattgtgcccatgccgaggcggggaatctcatagccggcaagtgttgccgcgtgttggtttttcatcgttgtggcctccatgccaagtcatcgaggagttggttagtccagaggactacctggtcggagctcatggggccttggcccagggaaccggtgaacggggtgggtacgatgagctggtgggtgaccgggcggtattgggcgcctttgtaaatacggcccatacgcatctggatggattcgggcgggtcgatacggccgatgcgcacgcggttggattgcgcgagaatctccgaaatgccgagcttgcgggccttgaacttcagacgggccacgtcgaacagggtctcgaattcgaccggcggcttgccgtaacggtcggtaagctcctcttccagatccttcaaatcggcctcgttgcgagcggaggcgagcttgcggtacgcttccagacgcagcttgtccgaatcgatgtactcgatcggaatcgacgcttcgatgggcaggtcgatggacacggccaccggctcgacgttctcttcgggctccttgtacttctccacggcttcggacaccatgcgtacgtacaggtcgaagcccacgccctcgatatggccggactgctcgtcgcccagaaggttaccggtgccgcgcaattccaagtccttcatggccacatcgaaaccggagccgagcgccgtgttctgcgcgatggtggcgagccggtcatgggactgctcggtcatcggcttggacgggtcgtacaggaagtaagcgtacgcgcgctcgcggccgcgaccgacgcggccacgcagctgatggagctggctcaagccgaaacggtcggcatggtcgacgatcagcgtgttcgcgttggatatgtcaagacccgtctcgatgatcgtggtgcacacgagcacgtcgatgtcacgatgccagaagtcgcggatgatctggtcaagctgcttctcacccatcttgccgtgggcgatgccgacgtgcgcttcgggcaccagcgtatggatcttgtcggcgatggacgcgatgtcctgcacgcgattgtgcacgtagaacacctggccgccgcgcaacagttcgcggcgcaccgccgcggtgacctgcgcgtcctcgtaggcgcccacataggtcagcaccggcaaccggtcttcgggcggggtggccagcgtggacatctcgcgaatgccggtcacggccatctccagcgtacgcgggataggcgtggcagacagggacagcacgtccacgttggtgcgcagggctttcagcgtctccttgtgttccacgccgaaacgctgctcctcatcgatgatgacgagtcccagatccttgaacttgattttcgggttcagcagcttgtgcgtgccgatgaccacgtccaccgtgccggtttccagaccctcgatggtctcgttgatctctttggtggtctggaatcggctcatggccgccacattgaccgggaaaccctcgaatcgttcgctgaacgtctcgtaatgctgctggacaagcagcgtggtgggcacgagcacggccacctgcttgccgtcctgcacggccttgaaggcggcacgcagtgcgatttcggttttgccgaagcccacgtcgccgcagatgaggcggtccatcggcacgggcttctccatgtcggatttgacctcgtcgatggtggtgagctggtcggcggtttcctgataggggaaggcatcttccagttccttctgccatggggtgtccgggctgaacgcgaagcccctggcgcgctggcgggcggagtacagcttgatcaggtcgtcggcgatctcgtggacgtgtttgcgggccttggccttggtggccgcccagtcggagccgccgagcttgttgagcttgggggcttcggcaccgatgtatttgctgacctggtcgagctggtcggtggggatgaacagtttgtccgccggggcgccgcgcttggaaggcgcatattcgatgaccaggtattcgcgagtggttttgttggcgccggtgccgatggtgcgctggcgcatttcgatgaaccggccaatgccgtgctgctcgtgcaccacgtaatcgccttttttgagttccaccaagtcgatggccttgcgccggcgtttcggcgttttggccacggccacggccgtagtgcggccggtcaggtcgcgttcggtgagcagggcgattttggcggctttgtccacgaagccgtcgatggcctgagagcggatgacgtcgaaattggcgatgccggtagtgttgatcgcgcgcctgagcctggccaaggtgccggccgcagcggcggtgatggtgacgtggaagccggcgtcgagcaggccttcgatgccttgggaggccttggcctcatcccctcggaattcggccgggttctgggcgtcgagctgcacatggccggtcagcgtggtgtccacgccgaaactggtgaggcgaatcaccggatgttcggagtattcgagggagctgatggtttccgcatagtcgaggaagctggctttgtcgaagctgatgggcgcgccggcgccgtggccggaagcggccacatgccagctggcggccaggaactcgttcgcggtttttgccaagtcttcggcggaacggcgcagtttctccgggtcgctcaggaggatcacggcgtgcttgggcagcatggagcccaccggttccagatggtccacgagcgcgggcatcagggattccatgccttcgaccggaatggcgttggcgatggattcgagcatgtcctcagcattgggaatcgaaccgaccaaggctttggcgcgggcgcgcacggcgtcggtcagctgcagttcacggcatgcggtggcccagatggtcttgaggccgtcgccgtaggtacgctggtcggaggcgtggaattccttgatggtgtcaatttcgtcgccgaagaattcgatacgcaccgggtgcggtgcggtgggcgggaacacgtcgaggatgcctccgcgcaccgcgaactcgccacggtccatgaccaggtccacgcgcgtgtaggcgttttcgatcagacgtttggcggcttcgtcgaggggcaggtcctcccccacggtgaacacgagcggctcgacgtcgcccagtccttggacgaccggctggatgagcgagcggatcggcatgacgagaatgcgaatcgggccgaacatcggatcggtatcgctcggatgcttgagtctgcggaacacggccatgcggctggccacggtgtccgcgcgcgggctcagacgctcgtgcggcagggtttcccaggcttcgagctgggcgatgtcgtccgggtcgccgtcataccaggagcgcagcgagcccacggtctcttcggcttcgcggccggaggccacgaccagcacgaccggcttgccgggtttgccggtcacaccctgcccgatggcggcggccaaagccgggcgcaagccttcggaaacaccggccagaacggaattgtcgatgtcgtccgaaacctcgatgtcaccagtggcgagtctaaggaaggtcttgtcctgttccagctcagacaggatgcctaccagtgagccgttgatcaggtccgggtgcgtcgcctcaccggccattgaacttctcctgggtcttggcaagaccgcggaagatgatgtcctcggcggcgtcggcgccgtcagccaggaattcgggcagctgcttgcgctggtccggaccgaatccgcccagcacccagttcaccgtgttgtcatgcgcgttcgcaccgcgcttggagtgaccgacgcccatgcgcacacgcgcgtatttcggcgtgccgagggaacggtcaatcgacttgatgccgttgtggccccctgcggagccgcctgccttgaccttgatacgaccgaattccaagtccatgtcatcgtgaatcaccacgatatggtcgggctcgatctggtaataggcgctaatggaagccaccgcattgccggaatcattcatataagtcagcggcttggccagaaagaacttgacggtgcggccgtccaggttcatcacgcttttaccgagcatggccagacctttgtggtcggcgaagttcaccgtccaacgttcggcgagcacgtcggcggtcatgaagcccatgttgtgccgcgtgtcctcatattttttgccggggttgcccagtcccgcaatcagccagaaatccgatgccacaatccactcctcgtccgtcttcctatattcccgtatgcacgttctgtacgttccgtacgtcatgcgcgcgttcgcctcgcgcactggcccatgcccggccggattcaaccgtcaagattgtactcaacgccgccgtcaagccttggaatcggcaagcagcagggcacggcattgctcggcatccatcgatcggaccgatgaatggtgaaacgcttcgacgtcacgagtcacgatgacgtcggcgtcattgtcctcggcaacggcacggatgagcccgtcctcgaagtcgggctcatcggaccggtacgacatacacgcatggcgttccataagtggacggatgtcgaacaattccatcagtccaccgatatcgtctcgcgccgcccgctcctcgccataatgcttgcgcaacacgcaatacacgtcattcaatgacgataccggcgccatgatctcaatgtttggctgcgcaacggcttccatgagcaaatcaacacattgtttatggaaaggcgctcgtttgtcattgcacaaatcgagcagaatattcgtgtcaaacagcagtttcatcccgttccccaaatcgttccatacgtgcctgcgcgagaatctcctcatccgaaagatcgccttccgcctccggcaaattccggtcggcgaaacgttgaatcaactcctgctttttcctacgctcccgctcctgaatcagggagagcgtcagacgctcgaattccggcagttcccccgtatccgcaaggtagtcggtcagatcacgaatcaggtccgaataggtgcgcccattacgcttaagcactttctccgcgtcgcgcttccgttcggcattgacgcgcgccgtcaccatggccatagtcatatcgcacctccttgtaataccagtattacaagagatggggacgggtgaatcgcgtctattaggcggtccgccagcgaccttttcgcgctgtttgccgttgaggtaccagtaggccagcgccacgaacagggccgccgaggatattgccgagcgtggctgcggacaggttatagaggatgcccgacacgtcgagcgccgcgacgcccgccgcgtcggcgccgaaaccaaacgttttggcgaccaggcccatcggcaggaagaacatgttggccacgcagtgttcgaagcccatcgccacgaatccggcgatcggcagcaggatgcccagcaccttgtcggatacggagcgcgcggcgaatccgatgcgcacggccaggcagacgagcacgttgcacaggatgccgcacacgaacagcgtgtcccagcttggcgtcactttaacatcaactccggttggaaaaaatctcagtatgtagcattcggttctcaaataggagaaacatgcagcggcaatcaacaacttgtcgtttacgacgccaagcaagggaaacagctcagacagatgacgcttccctgcaatcggatgacatattgcgggacggcagcggattttgggcgttcttggcgtggcatcccgcaagcgttatcgcacgttatctgcaccgaatcataagaatggcagaattccaatgatttcgcaggaagagttgcgggacgcgagctatgtgcatcgtttgacgtgtgtggcatcccacgtgattgcgggataccacgtctaaacggacgaaaatcgcgtgccgtcccgtagtttgccgttatctgggataagcgcgtccgatatatggcgttcgaggaaaagagctgatccgatacaactttttagtgttataggacaccggaatccatggagagcaagggtaaaccgcctcgggcctacaggtccaaataccagtaggacatgtcccgcatggtgccggtggagtcggtggcagcggcgggcatgaggccgaattgggtgaagccgaagcggcgcatgagggcaatggagccgacgttatcggcgaaaatgatgccacaggccttgcgcatgtggcgggcccgtgcctcggtgagcagcctgtcaagcatgaacgtgcccactcccctgccttgccatgccggatcgatgtaataggccaaatcggtgacgccgtcatacccggcacgatcgtagaacacggagagcgcaccgaagccgatgattgaaccgtcttccgattccacaacaaaaacgccgtagggcggcgtatgggattcgacccaggcgcggcgttggtcgagggtgcgcggggtgaggtcggcggtggccccacccgccaccaccgcagcattgtagatgtcggtgatggcttggatgtcggattcgacggccggatggaaggtgtatggcatgaagttcctttgaatacgcaaatagcccgtccttatgataaggacgggctatgtcagttgaggtaaccgactcccttcagtcgccttcggcgatagctcccctcaccctgagggaagccaagttacttgtcgagctcgatggccttgttgagggcgtcttcaagctcctgctgcgccttgccgtaggcggtccagtcgccgttcttcatggcggactggctgtccttcatggcttgggcggcatcgttcaacgcctgctggagttcggggctgcggtcggaagacgagccggaatccgactttccgtccgtggtgccggactgaccaccattggtatcggaaccagattggtcaccggacacgttctcggcatcgcccgcggccgcaccggaattgccaccgaacacctgatccaaggcctcatccaacgtatccgcgaatccaacctgatcaccgaatgcgaccagcgtcttcttgagcaacgggaatgaggtcacgcccgaagacttgacgtacacgggctgcacgtacaccagtccgccaccgagcggcagggtgagcaggttgccgcgcaccacttgcgtgtcgccggattgcagcaggttcagttccttggatacatcggcgttggcgttgaagttgttctgcgcctggccggggcccggtacgttcgaatccttgggcagctcctgcaatcggatggtgccgtagttcgagcctatcttgcccttctcattgccggcatccgagtcgaccgacaggaagccggtcaggatctcacgggtggactggccagccggaatgtaggtggaggtcagcgagaacaccggttcctcggtgccaccggtctgcaaggtcaggtagtacggcggctgcaggatgtcctggtcctgctgggactgggattcggtcggatcgaccggcgtctgccagaagtcttcgcctgagtagtactggctggcagaggtcacgtggtacttggagagcagctcgcgctgtaccttgaacaggctttccgggtagcgcatgtggctcatcaggtcgccggagatatcggagagctggtggtactggccagggaagatcttctcccatgccttgatcaccggatcggattgatcccacacgtacaggtccacggaaccgtcgtaggcgtccacggtggccttgaccgagttgcggatgtagttggccttctgagagcccagggacgagaccgttgcggaagagacggtggtggaatccttggtggcggagccgaggtcggttatttgcgagtacgggtaggcgtcggaggtggtgtagccgtcgacgatccacttgacgcggccatcgaccacggccggatacacgcggccgtcaagcgtcaggtacggtgccaccttggccacgcgctccttgggggaacgatcgtagagaatctgcgattcgctggtcacacggtcggagaagagaatctgatcggagccgaagcggatcgcgtagagaatcctggagaacaggttgccgaccgaagggccgccgtcgcccttgaacgtggtcagagcaccttccgaaccggtcgggtagtcgaactcccaggcctgcgtgccttcaggggcaccgacaatcgagtattcggtggtgttcggcgagaagtagatgcgaggctcgtacttttcggattcggtgagcttgccctgggtggggatgccggattcgaagaattcgggctggccgtcggcggtcaccttgttgccgtaggcggccaccacgccgtaaccgtgggtgtacacagtgtggtcattgacccagttgcggttgtcattgccggccagatcgagctcgcgggcggcaatcacggtgtcctgggagacgccgtcaatctcgtacttgtcgaccgccagggtgtcggcgaaggtgtagtactgcttggactgctgcaactgtttgaacgtggggctgacgacctgcgggtcgagcagacggatctgcgcggtggtgtcggcctccttggccagagcgccctgctcacccttgtcggtcaccttgtattgctcggtcttgagcttgtcaagaccgtaggcggcgcgggtggcgtcgatgttgcgctggatgtaggtggattccatctcctgtgcgttcgggttgacgcggaagcgttgcaacagcaccggccatgccacggtgagcacaagacccaccacgaccacgacggcaatggaggtcaccggcacacgccaggccttgagcgcggcggaagcgcgcacgccgatggacgcctggccttcgagcgtgtgggagcgcatgagccagatgcccagcaccacgccgaggatggcggtcagcacggccatgatgaaggtgacggggatgttggcatgtacggcggtgtaggaggcaccggtgatgcgtgaaccctgcacggtgagctggtcgaagacgccaatcatctggcgcactgcccaagcgaacatgttgagcatcagccagatgccaagctggcgacggcaacgcttggtaatggagaacaggccgcgtccgttaaccggcatggtaatgcggataccgcccatcatcacatgcgtgaccacggaaaacacaaggcccacgcccagcagcatggccacggcggcgagcacgagcttcaggcccggcagcacgaacacgtagaagccgttgtccagaccgaactgcggatcggtggtgccgaacgactgcgcgttgaacatgagcagaatctcgctccagttcgcgttaaactgggaaccgaagatgacgccgacgatcagcgaaatcaccacggccacgcggcgagcggttttcgagctgacggatttgccgacctcgaccacatcgccgttaatgcgaatggtggaaccgtcggccgaatcagggcgtgctcgaatggccagccaggcggaaacgaagccggtcagggccatgagcagcgcgtaggccacccacagaccgattttcaccccgagctgggtccagaccacggactggaagccgagctggccgtaccacatcagatcggtgatgaatcgggacaggccgaagaacagaccgacgatgatggccaaggccagcaccacgccgatcagaatcttgctgccacggctggctcctgagccaccggacgctggcttacgggtgatacgcggattggccggaccacgtggagggcgggatgacccggaggggccagcgttggtgttgtgggccggaccgtccccatcggcctcgacatcgaggatgatcggatcgtcattgttcgcattgttgcgtcgtgaatcgccgccattgccgaacagtactgagaaaggatcgttaaaagacataactcaagcctatcgaaagggcgggaggtcggttatgccctgagcacagaatgaggcaacatcctgttctacgctctgttctacgcttgccggtatggacagacaacggccacaacatatgcgtccctcagcacacgccacacgccaacttcggcacaggagcattccaatcgtggcggcaatatgtgctttggcggtggtgttggccgatgtggcagtctacggatggcatgtcggatggttcgccaaatccacatcaaacggcaacaccaccactccccagacctcccagacgagtgcgttaccgcgcaccgacgttccttccccgaagaagaacgacgatccggcggcacaagcccaacgtgcggtatccgccatgacgcttgaggaacgtgtgggacagttagtgatggtgccgttgttcgccggttccgaaccctcctcgttggcttcaacaatcgccgacgagcacattggctcggccattctcattggcaattggaataccggcgtcgatacggtcaagaccgcgaccgcgcaactccaaggatatgcgccggccggcaatcgtctcatcatcgccaccgatcaggagggtggtcaggtacagcatctgactggtaccggtttcgacacaatgcccagtgccgttgagcagggcacaatgtccgctgacgcattgcgtcaatcggcaggcacgtggggttcgcaattagccactgctggcataaatgtcgatttggcaccggtgcttggcacagtggttggcaatcgtgcctcaaatgctccgattggcgcgctggatcgtgatttcggattggatgcggccggcaacgccgaacatggcatcgccgttattgaaggtttgcgagacgctcaagtcggtgcggcggtcaaacattatcctgggttgggcgcggtaagcggcaataccgacttcaccaccgaaggcattctggatacgaccaccacgttggacggggccgaggcaggtgcctttgaccaggcgattaccaaggccgatcctgcaatggtgatgatgtcgttagccacgtatcaatccatcgacccgaataatccggcggtgttttcttctacgattatcgacggtcatattcgcaacgtcctgaagtacacgggcgtggtgatttcggattcgatgtctgccgaagcgttgagcagctacgatgtaagccaattgggagtaaatcttgtcgaggcgggcggcgacatgccctgcatcggtcagacggattatgtaaagccaattgtggacggcctcaacgaacgggcgaagtccgatccggctttcgcttcgaaggtgacggcggcggcgactcgcgtaatgacattgaaaatcaagatgggactggcctgaccgttcatccttgcactggcgaggattgatgcgcgctgattcgcgctaatcctcaccagccctcgtacaaatgcacactagtcctcgtacgaatcgtcagtcctcgtacgaatacagaccatgcttgccgatgtattgcaccacgccgtcgggcaccagataccagaccggctcgtcgtgttcggcgcggcggcgtacatcggtcgaggagatggccaaggccgggatctcaagcgtatcgaccttgccttcgggcaaggtcacgccgtccgggctggagtagccggggcgcgtgacggccacgaagtgagcgaggtcccacatgaggtcggcgtccttccactgcatgatttcggccacggcgtctgcgccggtgatgaagaacagctcggcgtcgggatgttgggcgcggatatcgcgcagagtgtcgatggtgtaggtgacgcccggacggtcgatgtcgacacgcgagacggtgaatttggggttggatgcggtggcgatcacagtcatcagataccgatcctcggcgttggtgacgtgcttgtccagcttgaacacaggtcggccggtgggcacgaaaatcacctcatcgaggtcatacacccaggcgacttcagaggcggcgaccaagtggccgttgtggatcgggtcgaacgtgccgcccatgatgccgacgcgcaggcgtgtatgccagttgccgcgtgcggaaagcctgcctttgccgtggctgctggccccggccggtacggacaggtcggacatgcgccgttcggtttcgccttgggtgacggcaatgatttcggcgggctcggcggattccactgttttttcggactgaactgacgcagccgttttgtggctgccggtaacaccactcatgcctggccgccctcgccggcggcgtcatcggctgattcggtttcctcttcgatttcgccggcggagggattgtcttccttgggatcgatcttgcccatgtcttcatcccattcgtcttggaccacgcgacgaatctcggcgaaggtgggcagcgggaagtccggctggtagaggcggcggacctcggccacgcgctcggtgatgcggatgagcgtgtcggtcatgccgtcgaggtcgccgtcgtgctccatctggctgtatttgccgatgtagccttccatgagttccatgtgttcgcgcacgatcttgagctgggcatcgttgaggtccacgacttcgggtgaatcggtctcgggccagccgatgagcacggcgtccgcgtattcgagcgacgcacgctgggcagcggaggcgatgccgtcctcaatctgcacgaggaacacatagcggacgatgctgagccgttcggccgcgatcttcaggccgagcttgggatcgttgaggtcgatgtcgggccgcagttcgcttgccttgtttgccgtgtcagccgtagtgttcatgttgccgtcctcgttcatgcgcgcacctggcctgttccgtaaccgatccacttggtggtggtcatctcccgcaatcccatgggaccgcgtgcgtgcatcttctgcgtagaaatgccaagctcagcaccaaagccaaacacgccgccatcggtgaagcgagtggaggcgttgaccatgaccacggccgagtcgatgcgcttggcgaattcctcgatggccgcataatcctcggcgatgatggattcggtgtggcccgtggaatgcgtgttgatgtggtcgatggccgcgcccagatccggcaccaccttgatgcccatcttgagggccagatattcagtgtcccaatcctcctcggtggcgcggttgaggtcaaggccctcgatcgccgcgccggagatgatgtcatacgacgtggtgtcggcctgcagtacaacgttcgcctcggccagagcggcggcgatctgcggcaggaattcggcggcgacatccttatggaccaatagcttctcggcggcattgcacacacccacgcgctgggttttggcgttgatgatgatcaggatggccttggcgagatcaccggacttgtcgatgtagatatgcacgttgccggcaccggtttcgatgaccggcactttggagttgcgcacgacggcttggatcagacccgctcctcctcgcggcacgagcacgtcgatatggcctcgcgcctccatcatggcggtggctccggcgcgtccatactggtcgacggattgcaccagtgcggattcgaaaccgtgtgcttcaagcaccggggcgatgacgcccagcgtggcagcattggtgcgttcggcggcgtgaccgcctcgcagcaacgcggcattgccagatttaaggcacaggctggccacgtccacagtgacgttcggccgggcctcataaatcatgccgatgacgcccatcggtacgcgcgtctgggtaaggcgcagaccgttgggcagattgtatccgcgcacgatttcgccgaccggatcaggcaaggtggccacatgacgcacgccttgggcggcggcggccacgcgcggcacgtcgaacagcaggcggtcaagcttgcccgcatccatgccgttttccttggattcgagcatgtccagcgcgttggcggcttcgatgtccgcggcgtgcccgtccaacgcatccgcaatggcgagcagcagttcgtttttggcttcggtatttgcctgtgcaagacgctcctgcgcgcgtgcggcctgatcggcctggcggcacaccgcgtcgaacacctcaggactcaattcatcgctcataacagtcaagcgtaactcacaacgcggctgattgcttactccgacccgcttgttatgggatgtctgacattttgaatcgcaaacagaaccggctcccctccgtctcaggcgggaagccggtgacgtgatgcgctccggtcagcgaatcatcactaaccggtacaccacggtggattagtgaatcagcaaatcagtggatctggtccaggtcggggtagagcgggaagtcttcggcgagcttgtcgacgcgagccttcagcgcggtcacgtcggcggacggtccggcggcgagcgcggtgccgatgatgtcagccacctcctcgtattccttcggcccgaagccgcgggtggccagggcggacgtgccgattctcaggcccgaggccaccgaggccgggcgcgggtcgaagggcacggtgttgcggttgatggtgatgccgcaggcggcgagcagatcctcgccctgctggccgtccatctcgctgttgcgcaggtcgaccatcaccaggtgcacgtcagtgccgccggtcagcacgctgatgccgttggccttgacgtcatcggccagtagacgttcagcgagaatcttggcgccgtcgagcgtgcgctgcatacggtccttgaattcgggggtgccggccaccttgaagctcacggccttgcccgcgatcacatgcatgagcggaccgccctgctggccggggaacacggaggagttgagcttcttggcgtattcctgcttggcgagaatgaaaccggagcgcgggccgccgaaggtcttgtgcgcggtggaagagactacgtcggcgtacggcacaggactcgggtgcaggcccgcggctacgagtccggcgaagtgggccatgtcgacccagaatttggcgccgacctcgtcggcgatctccttcatggccttgaagtcctcgatgcgcgggtaggcggaccaaccgccgatgatcatggccgggtgggtttcgagcgcacgctggcggatgatttccgggtcgatgcggaaggtctcggggttcacgccataagcctcggcatggtagaagcggccggagaagttgattttcatgccgtgggtcaggtggccgccgtggtcgagggccaggccgagcacggtgtcgccgggcttgacgagcgcctggtagacggcggcgttggcttgggcaccggagtgcggctggacgttggcgtattcggcgccgaacagggccttggcgcgttcgcgggcgatggtttcgatctggtccacgtattcgcagccgccatagtagcggcggccggggtagccttcggcgtatttgttggtcagcacggagccctggcattgcagtaccgctcgcggcacgaagttctcagaggcgatcatctcaaggccattgcgctggcggcccagttcggagtccagcagttcggcgatctcaggatcggtttcgcagatcggcgcgttgaaagcatcggtcgctttctgcgcaaggggtgaagcggtcatgggtgctcctttttggtatgggcgacaattgattcgccgttgccgccttactgtatggccggtttgtagccggcctgtttcaggatatggccggtccccgttcgatggcaatggtgattttcgccggtttgaccggtcggctatgcgagacggacggcccttctgcccacggcccacgctaaactggtgtggattcatcatccctttcaggcagaaggattcatcgtgacaaccaccttccattccacccgtagcaccaccgattcgctaaccgccaagcaggcgattcgcaagggcatcgccgatgacggcggcctgttcgtttcggacgcgttgggcaagaccaaggtggacgtggcctccctgccgggcaagtcgtaccagcagatcgccgccgaggtgctgggcgcgctgctgccggacttcacggccgaggagctgggccagtgcatcgccgacgcctacggcgaacaatggtccgatgagcgcatcaccccactcaagcccctgggtgacgattacgtgctcgaactgttcaacggtccgacttccgcgttcaaggacgtggcgctgcagatcctgccgcgcttcatggcgcacaccacgccggccgatggcgacgcggacgagaagatcatgatcctcaccgccacctccggcgacaccggcaaggccgcgctggccggcttcgcggacgccccgggcaccgcgatcaccgtcttctacccggaaggcaaggtctcccaggtccaggaactgcagatgaccacgcaggccggctccaacgtgcaggtggccgccgtggaaggcaacttcgacgacgcccagtccgcggtcaagcgcatcttcggcgaccgtgccctggccgagcgtctcgccggcaattcgcacgtggtgctttcctccgccaactccatcaacgtgggccgtctggtgccgcaggtcgtctactacttctccgcttacgcccagctgctcgccgaccaggtgatcaacgtcggcgatgaggtcgagttcgtggtcccgaccggcaacttcggcgatatcctcgccggctactatgccaagctgctcggtctgccggtcaagcacctcgtggtggcttccgacaagaacaacgtgctgttcgacttcctgaccaccggtacctacaaccgccagcgcccgttcttccag

SEQ ID NO: 3789 - DNA, 30763 bp, Unknown
  R35_2m  MAG No. k141_2851
cgtcttcgattacgagtcccagtgggctacggaacacaccgccacgcctactcaggaggtacgccattggaccgagccgctcgcgtggttccgcgcgctggcggacaacggtctgaccgcagacgtggtgccggttcgcggcccttgggacgagtacgaagccgtcgtgctgccgagcctgaccatcctgtccgaagagaccacgcgccgcgtgcgcgagtatgtggcgaacggcggcaagctgttcgtgacctactacaccggtctggtggacgacaaggatcacgtctggctgggtggctaccccggttccatccgtgacgtggtgggtgtgcgcgttgaggaattcgccccgatgggcaacgacttccccggtgccatggaccaccttgacttggacaacggaaccgtggcgcacgatttcgccgacgtgatcacctccgtggccgataccgctcacgtggtcgcctccttcaaggcggataagtggaccggtttcgacggcgctcccgccatcaccgtcaacgacttcggcgacggcaaggccgcatacgtcggtgcccgtctcggccgtgagggtttggccaagagcctgcccgtgctgctggaggaactcggcatcgagacttcggctgaggacgatcgcggtgaagtgctgcgcgtcgagcgtgcggacgaaactggcgagaaccacttcgtgttcctgttcaaccgcacccacgatgttgcggtcgtggacgtggaaggcgaaccgctggtcgcctcgctggcccaggtcaacgagtccgagcacacggccgccatccagcccaacggcgtactcgtcgtcaagctgtaaaaccgcgcatagcgcctaattacccaacggctcccttgctgctcatcgtagcaggggagtcgttttcgtatctccagcaaagtcgggtagggtggtcaccgtgcgaggcaaaaacagagtgacgatggcggacgtggcccatgaggccggtgtttcggtagcctcggtgtctaattttctgaacaaacagccatatatgagcgaggcgatggccgcgcgtattgcggaagccatcgacaggctcggatacaaagtcaactcgtcggccagaaacctgcgttccgggcgtacccggttgctcaagctggttattcccgatctgcggcaggtgtacttctccgaactcgccgaggatattctggccgaggcccggcaacatggctacggcgtcatcgtggaatccaccactaacaatcgtgcccgcgagctggaaagcatcgcatcgatgggcacgcacagcgcggacgggctcatcttaagccctctgatgatgacggttgacgatatcgcggctttggatggcgattacccgctcgtactgttgggtgaacgtttgttcggcgtcaacgcgccgcacgtagtgattcgcaatcgcgaaggggccgccgccgcgacttatcacctgcttgatgccggttgccgccgcatcgccgtagtcggtgccgtgccccaccccgagcacgatttctcgtcgggctccatccgcacccacggatatcgtgaggcgctggccgcgcgcggcatcccctgtgatgacagtctgcttatcgaaacccaaggctgggggagcgccgacggtttggtcgcggtggacaccatgctggagagtggcctgcaattcgatgccgtgttcgctttgaatgacttgctggcgtggggcgtgctgcgtgaactgcgcgaacgcggcgttgccgtgccggatgatgttcgcgttatcggcttcgatgacgtggaggaatcggcctacatggtgccgtctctttccaccgttaaccccggcagggaagccatcgcccgactggccgtcgaatccatcatccaacaggtcgaatccggcagccgtgcccccgcccaaaccatcgaggccccctatagcctctccctgcgcgagtcctcaccggcgttggcgcgcgcctgatgaatccgtggttcgaaatatccgaagtgaatgacaaggcccgtcaatcgtatggtgattgacgggccctggtcgtattggacttgactgtacttggtacgggcgtgactctccgtcttttagccgtggaattccacgctgatccaggagatggcgggaagcgttgccgtgcaggtgccggtggcgttcattgcaatgtcgagcggttgcggcgtgacggcttcgggcgcttcggcggtgttggtgcggtacggatcgtcctcatgcaacagttgcgccttgctgagcgcgagcgtgccgagaccgggcaggccgggcagcccggaaaggtcgatggtgagcgtgtgcggggtgttggcgtcgcggttgacggcaagcagcagaccggtgcgggcctgttcatcccacgtgactaccgcgtcgatggccggcacgtcgccatatgcctcggtatggatggtgggggagctgatggccggagcgtaggcctggccgcgcgcgtgaagggcggcttcggcgaacgggtagaacgtggtctgccgccatgccgggccgtgttcctcggccatgatgggggcgatgacgttgaccagctgggcgcgcgaggcggaacgcacgcgatcgcagtgcttgagcagggtgatcatcagggaaccttcgaccaccgcgtcggccgcggtgtagatgtcttccagcaaatgcggagacttaggccatggctcgtggtgcaaaccctgcgcggcctccgccttccactggtcttcctgctcgttccacttgtccgaataccatacgccccattcgtcgaaggacagggcgatgtctttggtgccgttgttggcttctcgcgcctgatcggccgcgtccgagacggtggcgatgaacttggtcatgtcttcggaagaggccaggaagtcctgcatggaggcggcggtccgggttttatggccgcggtcgaagtagtaggcatggcaggagacgaagtcgagattctcgtaagccttggtgagcacggtcttctcccacgtgccgaaggtcggcatataggcacccgaggaaccgcaggccacgagttcgagaccggactcggcgagcttcatggcgtgggccaccttatccaccgcgccggcatattcttccgggctcatgtggcccacctgccacgggccgtccatttcgttgccgatgcaccacatcttgatatccatcggctcctcgatgccgttggccacgcgctgatccgcccaagcggtgccgggcgcgccgttgacatactcgagctcgtcgagcgcggctttcagcccccgggtgcccatgttgacggcaagcatgatttcggtgccggctttctggctccagcggtagaagtcgtcgatgcccatctcgttggtttcggtgcaatgccaggccaggtcgcggcgcacggggcgattctcgcgtggaccgatgccgtcttcccagttgtagttggatacgaaattgccgccggggtagcgcacgcaggtgacgcccagctccttgaccaggtcaagcacgtcttggcggaagccgttttcgtcggcggtgggatggctgggctcgtagatgccgccgtagacgcagcggcccagatgttctacgaatgagccgaacagacgcgggggaacgtcggctaccggagtggcgtcggcgttgagggcgatgctggcgtccggcgtggcgttgccagttgtggagacgttactggccgtggtgccggcggcggtcggcgccgggctgctttcctgcttgtcgggatgggtggtttcggcggaatactggctgttgtgagtgatcatgagcgggatgcatctccttcggtttgcggttagtcaccatggtgcgacatgtcgtgtttgcgtaaacataaaacatgtggtaccgtttcttaaaacgatacaagacttggaacaaaacgccaagtcccgtcgtttcccataacaaggaaggaaagaacgatgaagttcggcaagaagacaattgccctgattggtgctgtggccatgctctcctctgtagctgcctgcggttccacctctgccggggatagcggaagcaccggctcctctgataagaagatcgagctgaccgtgtggtcctgggattccacactgcctcgtacggtcaagggattcgaggccaagaacccgaacattaaggtgaaggtgaccaatgccggcaccaacaaggacgagtacaacgcactgtccaacgccatcgaggccggctccggtgctccggacatcgcccagatcgaatactacgcactgcccgaatacgtgattcgcggccacctcgagaacctctccgatctcggcgcctccgatttcaaggacttctacaccccgggcacgtggtcctcggtgagcatcaatgacggcgtctacgccctgccgatggattccggcccgatggcctggttctacaacaaggacgtcttcgacaaggccggcgtcgatccgacccaggtgcgcacgtgggacgacttctacgaggctgccaagaagattcgcgccgtggactcctacatcacctccgattccggtgacgccggtttcttcgactccatgacctggctggccggcgcgaccccgttcgagacctccaaggacggcgagaccgtgaccatcaacctgaccggtgacaagaacgtcaagaccttcaccgacttctggcagaagatgatcgacgaagacctcatcgacaccaagaccgtcggctggaccgacgattggaacaagggtctggatgacggctccatcgcatccctgctgaccggcgcttggatgccgtacaacctgctttccggcgctccgaacggtgacggcaagtggcgcatcgcccagatgccgaccgcagacggctccgagaccaactccgagaacggtggttcctcgctggccatcgtgaagtccgacgacaaggccaaggtcgccgccgcctacaagttcatggaatacgcctgccacgacgccgagggcattaagacccgtgttgacggcggtgccttcccggccgacaacgacaccctcaagtccaacgacttcctcaacatgacctccctgaccgactccgacggcaaggcccacgagtacttcggcggtcagaagttcaacgaggagctggccaaggccgcagccaatgtgtccaccggctacaagttcctgcccttcgaggtctacgctcgcggcaagttcggcgactacgccggcgatgcctacaccggcaagaccacgctctccgatgccgtggcttcctggcagaaggacctgcaggattacgccaagcagcagggctaccaggtgaagtaacggcaatcgcagcagacttcctcctgtggtttctgtagcgggaggttgcgataacaggatcgggcactcttcggagcgcccgattttcttatgccatgggagcagtggcgcgcggattgcgataccaagatggcgtgttgccgaagaatgtgtataataaaagatgttatcgcaaccatagctacaaagtggcgaaacaaagccgttttgtgactactgaaccatagagtgatggttcacgatagcatgacgacgaggagagttgccatgctgttgtggtgacaatcactgcagaccgccgaaaggcgatccaaggaaggagaacagaacgatgaagttcaccgttgctaagaaggccattgcacttaccggtgcggttgccatgctgggttccgttgccgcctgcggttccgacaccgccagtggcaagccggctcaagataaggacgttaccgaaatcaccgtgtgggcttgggagcccacgctgacccaggttgccaaggacttcaccaagaagaccggcatcaaggtcgatctcaagaacgtcggcaccaacaccaaggaatacacccagcttgataacgccatcgaggctggctccggtgctccggacgtcgctcaggttgagtactacgccatcccgcagtacgccatcaagggcaacctgctggacatcaccgacaagacctccggctactccgacttctacacccctggcccgtgggcttccgtgcagttcgccggcaaggtctacggcctgccgatggattccggcccaatggccttcttctacaacaaggaggtcttcgacaaggccggtgttgacgccgagcagatcaagacctgggatcagtactacgacgccgccaagaagattcacgctctgggcgacaactactacatcacctccgacaccggtgacgccggcttcttcgactccatgacctggctggccggtgcaaagccgttccagacctcttccgatggttccgaagtcaccgtcaacttgaccggtgacaagaacgtcaagaccttcaccgacttctggcagaagctgctggacgagggcctgctcgacaccaagaccgctggctggtctgaggactggttcaagggcatggtcgacggcaccatcgcctccctgttcactggcgcttggatgcctgccaacctggccaactccgctgctgacggcgctggcaagtggcgtgtgacccagatgccgaccgctgacggctccaccaccaactccgagaacggtggttcttcgctggcggtgctcgcctccaccaagaaggctgacgctgcttaccagttcatcgagtacgccaaccacggcgacggcgtggccacccgtgtggccggcggtgcattcccggctgacaaggcctccatggagtccgactcctttaagaacaccaccactgtgaagaacgccgatggcgaggacgttgactacttcggtggtcagaagtacaacgaggttctggctcaggctgctgagaacgtgtcctccgactaccagttcctgccctacgaggtcaaggcccgcaccatcttcggcgactaccttggcaagtcctacaccggcgaccagaagctgactgacggtatcgccgcttggcagaaggcactgcaggattacggcaaggatcagggcttcaccgtgaagtaagccttgaaccctcgctgagactgcctagctaatctcacctgatacacaaagccccgtgacgaatcccgtcacggggcttttaccgttttaagccccgcctagtacactcgtcaccatgcgagtgatcggacagcgaatcaaaagaatggcaaccatagcagtgactgccatcctttccgtatccctggcctcgtgcgggcaggccacggacgacaaccgtacggagatcagcgtatggagctgggaaccgagcatgggggaggtcatccgccgtttcgaaaaagccaatccggacatccgcgtgaaatggaccaatatctccggctacggcaatcttaataccgccattcaagacggttacggcacgccggacgtggctcaaatcgaatactatgcactgttgcagtacgcggtctccggccaattgcttgatctgaccgacaaaatcggctcggattattccaacttctttaccctcggcacatggtcgtccgtgcagctcgccggccgtacctatggactgcccatggattcgggcccgatgggcttcttctacaacgaagacgtgttccgccaagccggcgtggacgccaccaagatcaagacttgggatgactattacgaggccgccgaaaagctcaaggagatcggcgcgtatatcgccgccgactcgggcgacggcagtttctatgacgcgatggtctggctcgccggtggtcagccgttccacacgtcggccgacggcaaaaccgtgaccatcgatttggatgaggatgccggcacccaacggttcaccgaattctggcagaaaatgatcgatgaggggcttgttgacaccacctccgccacatggtcggatcggtggaaaagcagagtgggcaccggcaccatcgcctccgtgttctctggggcttggatgccgtcgttgctgctgtccaatgtgccgggcgcggccggtctgtggcgcgtggctcccatgcccacctatggtgggcagcctgccaacgccgaaaatggcggctcggcgctgaccgtgttgcaactgacccgtaagccggatgcggcctatcgtttcgtggactttgtggcgcatgacgcccaaggcattagcgcgcgtgtagacggcggtgccttcccggccgattacgccaccctgaattccgctgattttctggataaaaccacgattaccaatgaccgtggcattgaaatcccgtatttcggcgggcagaagttcaaccgggtactgtcggaggccgccgaggatgtgtcggtcggataccagtatctgccattcgaagtgtatgcgcgcagtgacttcaaatcgacggtgggccaggcatacgagtggtccggcagtttccacgcctatcagcagcgacaggaagccattgagatgggcatgaaggacgaggaaggcaacccgctcgaaccattggagaggcccggcaagaaagtcagtctctccgacggcctggcccaatggcagaaagacctccgagaatacggcctcaatcagggctttacgattaagtagggttttgagtaggtttttcggggagggacggaatcgactgcgctatgcgcggccgatgcctgcacaccgcgttacttcacattgcgcgagtagatgtatgccatgcctttgaagatcaggtctgaatcgtagacgtcgatcatgtcggtgtcgttcttgaaaatgcggctgagccctcccgtggctaccacttggaacggctcatcgatttccttgcggaactgctgaatcgtgcgctcaatgccaccgaggaacgtgtaatacagtccggcctgcatagcagtgcgcgtattggtggccagaatcgactgcggttgcgtgatctccacttccggcagctgggcggtctgcccccacaacgcctcggccccggtgcggatgcccgtggtgatgaagccggagcgaatcgtgccggaaccgtccacatagttgaacgtggtggcggtgccgaagtcggccaccagcaccgggccgccataggtgtggtaggcgccggcgcagtcggcgatgcagtcagagcccaaggttttggggtcgtcgagacgaatgttcatgccggtcttgacgccagggcccaccaccatcggttccaatccgaggaatttgatcagcgaggcgcggaaggaatacatcaccttcggcaccaccgagcagacgatcacatcgtccacatcgtcggccgtgtaatcgctcaaagccaggaactgcgtgatcatcagaccgtattcgtctgaggtgtgcgtcgccttggtggtgatgcggtaggagccgacgatgcggtcgacctccagaaaaccgatcacgatattcgtattgccgatatcgaccgccatcagcatgggtcaggcctccttgttctcgtcatcgacattgctcgcgccgccggaacgcaacgctgcgagccgcagcaacagtcgttgcgcaagcacggttttgtccatcttgtcccaatgctcgatcttcggggtgccggcatcctccgctccggacgtgagcacggtgacaacgttggtgtcggtgccgaacccggcaccggcgtcgcgcagattgttggccaccagcatgtcgcaatgcttggacgtcagcttcttctccgcattacgaatcagatgctcggtctccatcgcgaatccgcacaggatctgcgagccgtcgtcgcgcttgcgttcgccggcccacgccagaatatccgggttggaaaccagctccacggtgatgctgctgcggccggccttcttgattttctccggcgcaatctcggccacgcggaaatcgcccacggcggcggccataatcgtgatatccgccgccgggaaggcgtcggccaccgcatcgaacatatcctgcgcggtcatgacgcgcaccacatccaccgcatcgggcgcggtcaaggcgactggaccggagaccaacgttacgtcggcaccaaattcggctgcggccgaggcaatcgcataccccatcttgccggtggaatggttcgtcagatagcggaccgggtctagcggctcctgcgttggcccggcagtgaccagcacgcgcagccccttgagcggggaagatgagggagcctggtcatcctgcgcatccgccagcagccgagcggccacttcctcgatgcgcgccggctcttccatacggcctcgtcccacgtcgccgcaagccagattgccttcctccggctccacaatctgccagcccaattcggcgcaggttttcagattgcgctgcgtggccggattgttgtacatatgcacgttcatcgacgggcataggatcttcggcccctcataggccagaatggtggacgtcagcgtatcgttcgccaatccacaggcgatgcgggcgatgacgtcggcgctcgccggggccaccaccagcagattggcccaggccgcatcggccacatgattgatggtcgttggcacggtcggattggccgtcacgtcgccgtgcgcggccggataagcggggaacatcgtggtacgggtgggttgatgggtcagtgaggtgaatgtcaggggagtgacgaagccttcggccgctgtggtttcgataacccgcacctcgtggccggccttggtccaatcggatgccagatgacaggccttgaacgcggcgatgctgccggtgacgcccagaagaatatgtgccatagctgcctcccggccttatgccaaggccgcacgtgtgcccacgccagcgcttcccgcgtcgttgcccgacgatgcgccgcgtgttgtggtcgccgcggaccctccgtcggcaccgcaatccagtatagccattgcctccggcgtgtccggggatatagtagaacgtggtgatcgacccgaatgggcggtcaaccacgcaagataacaacgaaaccatattcgggcgtaagcatgcccgaatgcatcagggagtatccatgtcccagaacaatggtgtgcacggcgagtccggcgcaaccgaagacaggaacatcgacggcgcgaatcaagctgccagcaccgacgcgagcctgaacgcgcgcgcgaaatcatcaaacaggaacaacggcggcccgaaatggtggctgtggacgctgatcgcggtcgtcgtggccgcggcgctcatcgtgggcgtcaccgtcttcggagggaaaggcaagggcaaggacgcgaacgcctccggctcggccagccgatccgataccgtggccgtcggcctcaaactcgccccggtcaatcttgacatccgccaccagtcgggttcggcccttgagcagatcctcatcggcaacgtgtacgagggcctcgtctcgcgcggctcggacaacaaggtccaccccggtctggccaagagctgggagatctccaaggatggcctgacctacacgttccacctcaacgagaagatgaacttctccaacggcgacaagctcgacgccgaggatgtggcgtggtccatcaacgagctcaaggcccagaagtactacgactgcgagcaggtcaagagcctggacaaggccgaggccgtggacgccaacacggtcaggctcaccctctccgcgcccaactcgaacatgctgtggtacctcaccagccgtcccggcctggtctacgacaaggacgccacctgggatcagaagaacggcgcgttgggctcgggtccgtacaccgtggtctccttcgacccgaacgacaagatcgtgctcaaggcgaaccccaagtattggggcaccgagcacaaggcgaggaccgagaacgtgatcgtccggttcctgccggacgagaacgccagcatcaacgccctcaagagcggcgacgtgcaggtgctttcgcccatctccgccacccttgccgatccgttccgcaaggatccgaactatgtggtcaagtccggtgacggttccgacaagttcgtgctcgccttcaacatggccaacgacaagctctccgacaagcgtgtccgccaggccatccgatacgccatcgaccataagcagatcatcgcctcgcgtggcggcgtggacgcccccctcggcggtccgatccccaaggtcgatcccggttacgaggatctgagcggcctgtacccgcatgacgtggccaaggccaagaagctcatggagcaggccggatactccgagtcgaagccgctggacctgaccctcacctacgccaacgtgtacggcaccgagctcggcgaccagctcaagagccagctcaagcccatcggcatcgacctgaagatcaactacgtggagttctccacttggctgcaggacgtgcacgccaacggcaactacgatctttcgctcgtggaccatgccgaaagccacgacttctacggatggaccacgccgagctactacttccactacgacaacaaggacgtgcaggccctgtacgccaaggcgctggaggccacctccgatgacgaggcctcgaagtatctggccaaggccgcgaagatcgtctccgaggacgcgccggccgactggctgttcagctggaaggtcaccatcgcctacgccaagggcgtggacggcttcccgcagaacctgagccagaccgtgctgcccctctggcggatcacctacaccaagtagtcccggaacccatcggtcgggcgcggcgcgggagtgattccgtggcgcgcccgaccgtggacggcccatccggccggtgacgccacgggcggtggcgagggaatcgataagggagacgttatgcggttcttgatgcaacgcttgctgctgttcgcggcggcgctgttcggcatctcggtgctggtgttcgcgatgctgcgcatcctgccgggcgacgtggcggtcgtgatggccggcatgaacgcatcgccggcgcgtgtggcggccctgcgcgccgaattcggccttgaccggccgtatgtcgtgcagtatctcgactgggccggagggctgctgcacggcgacctcggcgtgtcggcgctgaccggtcgggcggtgacctcccaggtcggccaacgtgcgacgatcacgttcccgctgatcgtgatgagtctggtcatcgcgctcaccctcggcttgtccatgggcgccgccgccgtgatctcccggtcgccggccgtgcgcggtttcctgcgcgtgctgtccatcgtgggcggcgccgtgccggccctgtggagcggcctgctgctcatcctcctgttcgcacggggcgtgggccttgtcggtctgctgccctcgcaggggttccccgccgctgggtggggcgctcccgggcgggcggtctcgtccctgatcctgccggcgctggccaccggattcgtgtccggtgcgggcatcatgcgttacacgcgctccattctggaaggcatcgccgatgagggagggccgatcgatatggccatgtcctgcggcatgacccgcacccaggcgttggtgcgcgtgggattgcggttggcggctccgcaactcgtctcggtggtggggctggcgttcgcctcgatgatcaccggcgtgatggtggtggagaacctgttcgccctgcccggtctgggcgccctgctggtgggcgatgtcggcaaccgcgatctggtggccgtgcaaagcgagttgttcctgctcgccgcgttcttcctgctgatcggcctggcggtggatctgctgcacgcgctgcttgacccgcgtctggccgccggaaaggaggaatgatggttgatcgcaatggtcgatggcgtcgttcgggcgtggttctgggcaccatctggtcccggggcaccggccgctactcgctgatcgtgctggggttgtggatggtcgtcgccctggtgtcgttgttctggaccccgcagtcgctgctggccaccgacggctaccacgtgtgggacaagccgtcgtccgcgcattggctgggcaccgacggcaccggcgcggacgtgctgagctggctgatggccggatcgcgtacgaaccttgccatcgccctgctgaccgttgtctgctcggctgccatcggcatcctactggtcgggctgatggtcgcccgttcttcggcgctcgcttcggcgtcggtcgccgtggtcgacgcgctgatctccatccccaccgtgctcatcgccctgctgctcgccgtgccgttcggcgcatccgcggccgtggtgatcggcgcgtgctccatcggctacgggctgcatctggcgcgcgtcgcccgtccggccgccctgctcgccgcccgctcgggatacgtgcagtcggcccgggcgaacggcgccagcgggttcggcgtactggtcagacacatcgtgccgaacatcacgccggtgctgatggtgcaatcgtcgatgtcggcgggcacctcggtgctggccgaggcgggcctgacctatctgggcgtgggcgtcggcgcgggggtgccgagctggggccattcgctggccacctcggtcaaactcatcaacgtgtttccgttgacggtggtgtggcccggtctgatcgtcaccctggtggtggtcgcgctgaacctgttcggcgacgcgttgcgcgacgccaccgacccggtggctaatcccgcgttgcggcagatgactgtgcccggtgcggttgtgccggtggctaggggagccggtgacactgcggcgcagtccgcagtggcagcgccgaaggagacggatgatgagcgttgaaattcacgggctgaatattgctatcggcggcaaaccgattgtcacggatgtcgatctgtccatcgcggacggcgaacgggtcggcctgatcggttcctccggctccggcaaatcgatgatcgccaagtcattgctcggcctgttgccgcgcgaggccgtgctgtccggcaccatcacgatgggagaaaccgccatcctgtccggagaaaccgccgagtcgcggcatgggcaggaagatgactcaggatctgacgaagaacgcggcgcggcagataggcaccatgttgccggtgaacgcagggttgccacctcgggccacgattccgctgcgtacgccgacgagcatacgcttgccgatctgcgcggccggtatgtgggtacggtattccagaatccggcccatgcgctgaacccggtgatgaccgtggcgcagcagattgcgttgccgttgagactgcactacgatctgaccaaggccgaacgtgctgagcgagtgaataccatgctggacaaggtcggactggaccgtgacgtggccggcacatacccgcacgaactgtccggcggccaacagcagcgcgtgggcatcgccacggcgctgatcacctcaccgcgattcatcattgcggacgaacccaccaccgcgctcgactccatcacgcaacgtcagatcgtggacctgctgacctcgttggtggacgacgccggcgcatccatgctgttcatcacccatgatttctccgtactcgcgcgtgccaccacccgctgctacgtgctggacgccggccgcatcgtcgaatccggacccaccgccgacctgcttgctgcaccgaccacgccgcaagcccaacgcttggtcgccgccgcccaaaccttcaccctccacacccccaaggaggattcgcatgagtaacagcagtgtgccactcctctccgcccactccatcaccaaatccttcggaccgcgcaccgcacgccaccaagtcctcttcgacgtctccgccgacgtccacgccggcgaatgtctggccgtgatcggcggctccggatccggcaaatccacgctgacccgcattatgctgggcttggaatccgcggactccggcagcgtggaatacgagagccaatccattgtcggcggccgaaaatcgccgggattcgcgaccctgcgccgcgaatcgggactggtgttccaggacccgttctcatcactcgacccgcgttggcaagtcgccaaatcggtggctgaaccgctgagtctgcagcgacgtgatctgaacaacaccgatatcgacgagcgggtggtcgcggctctgaccatggcgggtcttgaaccggcggacttcctgaaccggtacccaatcgacctgtctggtggccaggcgcagcgcgtggtcatcgcccgcgccatcatcaacgagcccaaggtaatcctcgccgacgaaccaatgagcgccatcgacgtggctgcgcgcatccagatcctcgacgccttcgccgctatccgtgaggcccggccgagcaccgccatcatcatggtctcccacgatcttggcgtggtgcagcacatcgccaaccgcatcctcgtgcttcacgacgggcgcgtcgaagagacgggtcccaccgccgaagtgctcggcaacccccaatccgattacacccgtcagctcatcgaggcagcctcgttatagatctttttggctcccctccctgaggggagccggccgccggcgacacgcgcttgtcgcgggttgtgctatggtgtgaggcatgcagattatctcatgttgttgtcgctaaccgacgcccctgggcgagcggtcagtgacgcataacttgagatggagcattcgaatcgcggcgaatctgccgcatacttttcatgtatccgatggcacaagcgtaatcgtgtaatgcgcgagccgtggttaacatgaaaaaccggttcacttttcggattcaccgtacagtgagcgggaatactcgattttcaaaccaaagccacagtccattcgtctgggaacgtcggttcacgaacgcaacgcagcaaaacccccacaaccccagcaacgaaggacttcacatgaccatccacaacagcctcgcagaactcatcggcaacaccccgctcgtcaagctcaaccacatcccgcaggcggccggcgtcaaagccaccatcgccgtcaaagtcgaatacttcaaccccggcggctcctccaaggaccgcatcgccgagcgcatcatcgacgccgccgaacagtccggccagctgaagcccggcggcgtgatcgtcgagcccacctcgggcaacaccggcgtcggcctggccctggtcgcccagcagcgcggctaccgcacgattttcaccctgccggacaaggtttccgaatccaagcgcgcggtgctgcgcgcctacggtgccgaagtcatcgtcacaccgaccgacgccggcccggacgacccgcgctcctactaccaggtcgccgaacgactggccaacacgattcccggcggcttccgcccgaaccagtacgacaacccgaacggcccgctgagccactactacaccaccggccccgagatctgggaggctacggaccacaaggtcacgcacttcgtggccggcattggcaccggcggcaccatctccggcaccggcaagtacctcaaggaagcctccaacggcgcggtcaaggtcatcggctccgacccggaaggctccatctactccgcttcctcacgcgacgaagtccaccagtacgacatcgagggcgtgggggaggacttctaccccaaggctttcgaccggaacatcaccgacgacatcgtgcgcgtatccgacgccgaagcctttgaaatgacccgccgtctggccggcgaggaggcgttgctggtcggcggctcgtccggcatggccgtggccagcgccatcaagtacgcgcttgccaatgatttggacgagaaccagattgtggtggtgctcgcccctgattccggccgcagttatctggagaagatcttcaatgacgactggatgcgtgccaacggctacggcgacatcgtggaacgcaccggcaagccctccctcgccgagcagtaccttaacggaactccctctgatgagggagctgcggatggactccataactagctatcaaaagaatcaataccaacatccgtactaactaaccgcacctgttttaccttcgaatacggaacaatcccgaaaggaacccaatatcatgtccgctgaatacaacgccaagttcgccaacaccgacatcgccactcgcgccatccacgccggccaggagcccgacccgaccaccggtgcggtcgtcacgccgatcttcgccacctccactttcaagcaggatggcgtgttgggcctcaggggaggccacgactactctcgctccatcagccccactcgcaccagcttcgacgagcagctcgccgccgtggaaggcggcaagtacgcgctgagcttctcctcgggcttggccgccatcgacgtgctgctgcgctccaccatcaagcccggcgacaacatcctgctcggcaacgatgtgtacggtggcacctaccgcctgctctccaaggtgttcgtgccgtggggtgtgggcctcgacgtggtggacatcaccgatctgaaagccgtggaaaccgcattggcctccaagcactaccagtatgtgtgggtcgagaccccgtccaacccgctgctcaacatcaccgacatcgcggccaccgccgaagttgcccacaagtacggcaccaaggtcgcggtcgacaacaccttcgcctcgcccgcccttcagcacccgctggccgatggcgccgatgtggtggtctactccaccaccaagtacatcggcggccactccgacgtggtcggcggtgccgtggtggtcaacgacgaggagacccgtgagaaggtcgccttcctgcagaacgccgccggcgcagtgccctccccgttcgactcctggctggacatccgcggcctgaagaccctggatctgcgcgtcaagcgccacagtgccaacgccctgaaggtggccgaatggctcgaatcccagccctctgatgtgattgagcgcgtctggtacccgggcctcgagtcccacccgggtcatgaaatcgccgcccgccagatgcacggcggcttcggcggcatcgtctccgtgcagctcgcggccggtgccgaggcggccaagcacttcgtggaccacacgcagatcttcacactggccgaatcgctcggcggtgtggaaagcctcatcgaggtgcccgccgccatgacccacgcctccgtggccggcaccaccctgcaggtgcccgccaatctggtgcgtatttcggtcggtatcgagaacgccgacgaccttatcgccgatctcaagcaggcgttggatcgtatctgaccgtactgacggtactggtgtcaccgtattgacggtgccaccacgcttatcggcggactcgctatcgattggtacctacaaaaaatccccggcccacaagggtcggggattttccgttatcgattgaacatggatcgaatcagctggcgttgccgccctgccatccggtggcatccgcaccagccgggcgcaacgcctgaccggaagtcggtgtggtgccatcaacgaccacacgagtgccgatggtggcaaagtcgtacatccacttggcgtcggccacctgcatgttgatgcagccgtgcgagcctgggataccctgctgcacatagatggggtgctcgccccacatgtatgcaggaacaccgtgcagggcctcgccgccgttatagtaggaaatccacggcgtgcctggctggttgtagccttcgccaaccatggtctgcgattcgtacttgagatacacgtagaacgtgccggtatcggacagcatggaaccatcggcggtgggcttgccagaagcgatgttgaacttcttgaccaccgtggtgccctgatatgcagtggcagtctggttcgtcagatcaacatgaacccacttatcgccatttgccgtatcgaagttatgaggcacctcgacctgcttgacatcatatgggctgtctttcacagccacagtggaatcagtggactggttctgctcgatggcggtagccagacgttcgggggcgtccccggcaccagtcacttcaataccatccacaccgagtgtcttatcggcaccaatttccacgccgccttcgtctttcggcgtgatgtagacctcgcgtgtcaccttgggaacagtcagttctttggttacgctgtcactggtgacgtacttggtgatggcatcgcggtcgactaccagactcatggtgccacccgccttattcaccgtgggcttgaggaatgaggcaatggtatcggccgggatggtgacgctcttgttcacgccgttgtccacggtcagtttgaggccaagcttggcattggcgtcaaactgtgtttgctgtgcgctcgcgtcatcaatcggattctttgcagtctgtagcttgaccggcaccgtcgcattttcgcccggggtcgcgacggcctccttgactgcagcattgacaacattgatatccgggcccttgccatcctgacccgcggtgtaatcgaactgcttggtgctcttgttgtagacaacggtggcaatctgcgctcggtcggcctcatcgaccaggccggcggtgacgaattgttcggcagtctctttgtccctggtggcggtcagagcgatatgcggctgatcgaaaatattgagcttggccacgtcgccggtcttcgcgttcaacagcgcatctacggttttatccgtgtcgacggtgacgccaaggtccttcagcgaggctttgacgctgttgccttcggcggtgaacgtcactgtggtgttattcagctgctgcttcacagtattcgcaagttcttcgcgggtctggcccatgacagagacattgcccaaatgaacaccgggcgcagccttgtcttggaagtaccaacgtccgacgaagaaataggctattaatgcggcaagcaacactgcaaatatggttatgatggcaatccgtgcggccttgccatgtgatttagcggtggtagatgccatgacatgttcacccacataggctgtattgtcggcatggttattggtgccattgtcgctttgctgtggcgtggcggtacctgaagccgcggatgcgaacagcccatcggcggccacaggctgcagcaccgccgtctcctgatcgtcaggagaggagaaggaaaatgtatcgttggccataaaatgccccgtcttagttctctcaaagcggcatatcgtgcgatatgccgggaataacgtttcttgacgcataataatacggaagggctacgtacatcgttacgaggtattccgttatacgatgaaatccatccgcggtcggcctacactggtcgtttatgacagcacatcaggcggcgctggaggcgctcacacgatacttcggctatgactcgtttaggcccggacagcaaggaattgtcgaggctttgcttgccggacgcgatgtcttgggcgtgatgcccaccggcgcaggcaagtccgtgtgctaccagattcccgccgcgctcagcccgggtgcgactttggtcatatctcccttgatttccctgatgcgcgaccaggtcgatgcgctgaacgacctcggtctgccggccgcgttcatcaacaccactcaaactcccgacgagcaggcgatggtgttcgcccaagccgccgccgggcagatcaaactgctgtacgtggccccggaacgcttggaaaccgggcgattccgcgactttgccgcccgtacgccgatctcgctgatcgccgtggacgaagcccactgcgtctcccagtggggtcaggacttccgctcgtcgtacttaggtatcggcgatttcatcgccgggctgccgcagcgtccaccggtgggtgcgttcaccgccaccgccaccgaacgggtgcgccgggacatcgtgggactgctgggattgcggaatccggccgtcaccgtcaccggattcgaccggccgaacctgtattttgatgtggtcaaactggagaccaaatacaaggccgcatgggtggcgcggtatgtggccgaccatccggacgaatccggcatcgtctactgcgccacccgcaagaccaccgaagcgctcgccgacacgctgaaccagatggggcatccggccgtcgcctaccatggcggcatgtcgccggacgcgcgtgaggtggcccagcgcgacttcatcaccgacaaggtgccggtggtcgtggccaccaacgccttcggcatgggcatcgataagtccaacgtgcgttacgtcatccaccacaatctacccgaatccattgaagcctactatcaggaggccggccgcgcgggccgtgacggcgagcccagccgatgcacgctgctgtggaatgagtcagacatcgtcacccggcgtcggttgctggataacgattatgagaacgagcgattgactcccgaagagcaggagatcgttcgccagtccaagcgccggctgctggacggtatggtcggctactgccgcaccaccgactgcctgcaccggtatatgacccggtatttcggtcaggaattgtcggcgaatgctggttccgcggcgggtgaagacattgcggcggactcttcgcagtccggcagatgcggtgcctgctcgaactgcgaaagcacgttcgagaccatcgacgtgacccgcgtggcgcaggcgatcagccgttgcgtgcatgacgtggggcagcgcgtcggttccggcaagatcgtcaagatcctgcgcggttcgcgggcacaggatctggcatggctgaacccggagcggatgcccaccttcggcatgctcaaggacgtgaacgaagctcgcgtgcgcgacgtgttgagccagatggccacggacgggtacctgtcaatcgccgaagggcgtatgccaatcgtcatgttcggtgcgcgggcggccgaaaccgccgctcccgacttccactatgagatcaaacgggtggaacgcaagtcggcggcggccggttccggtcggagcgggggagtggctgatactgccgattccgccaatgttcccggcgatgcgctgggttcgtatatcccggacgatgacgaggaatcgctgttccagaagctacgcgaactgcgacgcaccatcgcccaggaaatcggcaagccgccgtacatcgtgttctccgacaagaccttgcgcgacatggcccgcatcaagccggttaccaacgcgcaatttctggcggtcaacggcgtcggtcaacacaagctcgacctctacggccagcgcttcatgcaaaccatcgcctcgttcaatgccgggagtgcgtcataacaatctcctatagcgaaccgcggagtatttgcgggcgttcttgggctggcgcgactacgatgactgttcgatacttcatgaccgaacactcagcaagtagaaaggcaacagcatggcagaagacaaggccgaaaagcccgtcgtcgaatcattccagcttgatcacaccaaggtcaaggcgccgtacgtgcgttacatcgacaccgaaacgggccctcacggcgacgtgatctccaattacgatctgcgcctgacccagccgaacgagcaggccattcccaccggcggcctgcacaccatcgaacacaccatcgccgtgctgctgcgtgaacgcattcccggctacatcgactgctcgccgttcggctgccgcaccggcttccacctgctgacctggggcacccactccaccgaggatgtggccaaggcgttgaaggaatcgttggagttcatcgcatacaaggccacatgggatgacgtgcccgccaccaccgagaagagctgcggcaactatcgcgaccacagcctgttcgccgccaaggaatgggccaagcagatccttgaggaaggcatcagctccgacccgttcgagcgcaaggtcgtctgattcgtctgattcgattcaattctgattcggctcccgctggcgggagccgggggcgaagccgactgagggtggctgtcctcaactcggctggactgtccggctcctgcggacgggagtcattgtttattagtgtccgtcatgcaacgcggacgggatttcttgtgcctacggcatggtaggttggccgtcagttagtcgccggtcaccgtgccggcaacccggcatgtcggagaggtgagaagtgactcagtcgaacgctgcaaacaaggcgacaggccgccgtttccgccacgccaccatgcgcgatctgccgcagatgcagaaaatctacgcacgcgcacgcgcgttgatggccgccaacggcaaccccacccagtggggcaacgaatttccgcgtgaatcggtgattgaggacgacatcgccaaccagcgtacgatgctgctggtcgacacctgcaatggccacgaacgcattctggcccagttcgccctgtgcccgggcaaggatccgacctacgccaaaatcgacggcgcctggctggacaacgacacctatgtgaccatccaccgcatcgccgcatccggtctggtgcgccacgcggcccgcgactgcatcaggtgggccctgaagcactacggcaacgtgcgcgccgacacccaccccaataacaaggccatgcagcacgtgctcgaaagctccggcttcgcccgttgcggcctgatccagctgctcgaccggccggtcgacaccaccagaatcgcctatcagcgccacgagtggtgagtgtggctgtcgccagcgtgttcggttccgcggtggagctggtcaggtaaggtccacgtcgtcgcgcacgtacggtccgtcggccgcccgttcaaactcgtgcatatcgcaaaaaccgtacgctgaaagtaactcagcgtacggttttcacgaaagcagccatcgactatcggtcagccgataggcctcagtcctcagtcgcagcgaccttggtgtcagccccggccttctgctcaaggccgagcttggagcgcttgcggctgtagccgaagtacacgatcaggcccagaccgaaccagatggcgaaacgcacccaggtctcccagttgaggccggcgatgagcacgaagcagaatacgatggccagaatcggggtgaccggcacgcccggcgcgcggaagccgcggggcgcattcggctgggtcttgcgcatccatagaataccggccgacacgatgatgaacgcggacagcgtaccgatgttcaccagctcgaacagcacgttgatgttgatgaagccgccggcgaacgcggtcagcagaccgaagaaccaggtgcccttgaacggggtgcggtacttctcgtgcacgtggccgaagaacttcgggaacaggccgtcacggctcatggcgtagcagatacgggactggccgtacagctgtacgagcatcaccgtggtcatgccgatgagggcgcctaggttcacgatcaccgcgagccagttcatgccggtctccagaatcacgccggccactggggcgtcgatgtacttggcgaactccttgtagggcaccacgccggtcatgatcatggtcatgacgatgtagagcacggtggaaacggccagggacagcaggatgccgcgcggcagtgtcttgttcgggttgatggtctcctcggcggaagaggacacggcgtcgaatccgatgaagctgaagaacacgatggatgcggccggcacaatgccgtacggctgggtggagccgggctggaaagtgtagatgccgtacggggagaacggctgccagttggacggcttgacataccacacggcgcacacgatgaacagcacgatgatggcgagcttgatgagcaccatcacgtcattggtgcgcttggtctggttgatgccgatcgagagcacccacgtgatgatcagcacgatgacgaaaccgggcaggttgaagtaggtggtgacgtccgggttggtgccgtaggcggcggtcagctcgaccggcagatgcagtccgaagccttccaacaacttgttgaagtatcccgaccagccggcggacacggtggccgcctgcagagcatactccagaatcagatcccagccgatcacgaaggcgatgagctcgccgaacgccagataggcataggagtaggccgagccggacaccggtgccatggcggcgaactcggcgtagcacaggccggcgaaaccgcagcagacggcggccagcaggaacgatacggacagggccgggccggcggtgagcgcgcccttgccggtgagcacgaagataccggtgccgatgatcgcgccgataccgagcatcgtcagatcgaaggtgcgcatcgtgcgcttcaggggagtggattcggcgacaagctgatccacgcttttcttacgaaacagatccatgttcttctctcatgaaacttaagatatggggctagaccggacggatttccgggatcccggcacgcctcaacgccgggaatcaaaggcggcttccgagaaaccgcatatcggtcattagtgtacgactgccgggcgaaaacaaacgattgtgaccacacgtcacattcctgcgcaacaataggtgcctatgagcatgaacgcagcacccgaaatcgcattctcgtccgagcagggcaaggccaactatgcggccgcccgccgccaataccccgcacaggccatcgtgaacctcaaaaccatgcgcgacaacatggcccacctggtctccgtggtcggcggcccgaactccggcacggcggtgatgggcgtggtcaaggccgacgcatacggccacggactgctgcccgccgcactggccgcgctcgccggcggcgcgacatggctcggcaccgcgcaatcgcatgaagcactgctgctgcgcaaactcggcatcggccccgaccgttgccgcattctgacttgggtctacaacggcaccgaagtgccattcgatgagctgatcgctgccgatatcgacgtatcggtcggctccctgcccggcatcgatgccgtggccgccgccgcacgcaagctcggcaagcccgcccgcgtacacgtcaaggtcgattccggcttcggtcgcaacggtttcacgccggctggattcgacgccgcgctcgccaaactcgtgccgctcgccaaagagggcgtgttgcatattgtgggtcagtggagccatctcgccgtggccgattcgcccgatgtgcccgaattcgtgtcctccaccgaccgccagatcgaaacattcaaggacttcacgcgccgcatggaacaggccggcattccgccggagatccgtcacctggccaacacggcggccactttggaccgcccggagattcacttcgaacttacccgccccggcatcggcctgtacggctacgagcccgatcccgcgatgggcaccccgcgcgactggcatctgaccccggccatgcgcctgcaggcgcagctcggcacggtcaaggatgtggaggccggccatggcatctcttatggccgcacctacctgaccccggacaacacctcgaccgttattgtgccgctgggctacgccgatggcatccaccgctccgcttccggtttcgatatggaaggtgccaagcacgtggagaagccgggcggcccggtgcgcatcatgaccactgaaggtccgaagctctaccgcgtgtgcggccgcgtgtgcatggaccagttcatcgtggacctgcacggatccgccgccgaactcggcgttcacgagggcgacacggtcgaactgttcggcccgggccgcggcgaggattacattgagcctaccgccgacgattgggcccgcgccgccgacaccatcagctacgagatcttcacctgcctgcgcaaccgcatcccgcgcctttacgagcatgccgccgaagtactgcccgccgccgacctcgccaagctcgaccccgccacgctgctataaggtgcattaccgccatacggtggcaccccgtaatcccttcttcccgaatatgtaccactgacatgtgctgagcgtcacatattcgggaaatcggcaccaatctcccgaatatgtgccgttgagttgacgtcagtggcacatattcgggaagtcgggattactacggccgatatgtgtgcctatgcttggaatatggaaacgactttggatggggaacaggtgctgagcgatgagggctacagcgccttcgacgaggagcggtgggcacccgagccgcccaaatccaagtcgcgcacggctttcgaacgcgatcgcgcgcgactgattcattcgtccgctttgcggcgtttgggcgcgaaaagccagattctgattgccggtaccgacgatttcgcccgcactcgactgacgcatacgctggaagtcgcccagatcggtcgccaaatcggcgcattgctcggctgtgatccggacgtggtcgactgcgcctgtctggcccacgaccttggtcacccgccgttcgggcacaacggggagcgtgcgctcgccgacatcgccagcaatatcggcggcttcgagggcaacgcacagaccatgcgtatcctgacccggctcgaacccaagatctttcacccggacgggcgttcggctggtgtgaacctgacccgtgcggccttggatgcggctgtcaaatacccgtggaccttggccgaagccgaccgacaccccaagggggagcggtcgaagaaattctgcgtctacccggatgacgaaccggtgttccgctggctcaaaatcggcgcgccccaggccgccaaacccatggaatgccagatcatggacctttcggatgatgtcgcctactccgtgcatgatgtcgaggattccatcgccaccggcgcgttcgatccgattgtgctcgccgatccgaagatgctggaccacatcatcgagcagacgcgcgcatggtatggggcgaagtgggatgccgacaagctgctggccgcgttcatgcgattgcgccgagagcatttgttccctgcacatttcaatggttcgcgcgaatcgttggcacagctcaagaacatcacgtccgatttgatcggtcgcttctgctggtcggtggaaaccgccacgcgcgacatgtatgggcccgggccgttgacccggtattccgcgaacatcgtgattcccgaggacacgaattacgagatcgtggcgttgaagggcatcgccgtgtacttcgtcatggcgcctcgcgagcgcgagccattccatcaggaggagctcaagatcgtatcggatttggtcgatgtgcttatggccgattcgccgctcccatccgacgctttggaaagccagttcctggccgattggaatgaatccaccaatgacaacgagcgcctgcgcgtcgccatcgatcaggtcgcaagcctgaccgacaactccgctctggccctgcactccatcttgtgctgagggcgtgttggacgggtgcttccctcagtctcgctgcgcgagccagctcccctcgggtgaggggagctgtcgctgtaggcgactgaagggagtttcgcggaagaaatgataaccgacggtaaaaatttaccgtgtctcaggtgaggcggtactctagagacttatggtcggaatgattaagaaagaagatgtcgagaaggtgcgcgccgccgcggacctgtatgacattgtatctgcgaccgtaacgcttaagccctccggcaccggcaccttcgtgggcctgtgcccgttccacgacgagaaaaccggcagcttcaacgtgcgcccctcactcggcgtgtggcactgcttcggctgcggcttgggtggcgacgtattcaaatacgtcgaacaatccgaaaacatcgacttccgcgaagccgtggaactgctcgccgacaagtaccatatcgagctgcactacgagagcagcggcaacggcccgaaccgcgagaacaccggctccaagcgcacccgactgctggaagcctgcgaggaagcacagcgcttcttcgtctcccagatcctgaccaaggaagcgctgcccgcccgcaagctgcttggcggccgcaacttctcccaagccgactgcgaacgtttcggttgcggctacgcgccccaaggttgggataatcttgtgcgccacttggcctccaaggggtttacgcagaaggaaatcctcgacgcgggcttggcccgccaaggccagcgcggcatctatgactatttccgcggccgcgtgacgtggcctatccgcgattcgaccggccgcacgctcggcttcggcgcgcgcaaactatacgaagacgatcagatcgccgccaaatacatcaacacgccggacacgcagctctaccgcaaaacccaggtgctttacggcatcgatttggcgaaatccgccatcgtcaagaagcgacaggtggtgatcgtcgaaggctatacggacgtgatggccatgcacttggccggcattgacaccgccatcgccacgtgcggtacggcgttcggcgccgagcacgccaagattgtgcgccgcctgatcgccgacgattcgctgggcgcggtccagctggtcgggccgttgaaggtcaaggaccagccgttgagctcgcgcatcgtgttcacgttcgatggtgacgccgccggccagaaagccgcgctgcatgccttcggccttgattcggccttcctctcccaaaccttcgtggccgtggccgacgacaatctcgacccgtgcgacctgcgcatcgagcgaggcaacgaagcagtgcgctcgctgatcgcccgcgccaaaccgttgtatgacttcgtgatcgacgccgccatcagccggttcgacctgacctacacgcccggccaagtgggtgcgatgaaagccgtggccccgctggtggcgcagattcgcgaccgctccctatgggacgcttacgcgcgcaagtccgcgggccgtatcggcgtggatcttgaggtgatgcgccgcgaggtgatgaacgcgcgccggcagatgcacgtgcgcgatgaggacgcctatgcgcccaagcgtcggttcgaacgtgacgagccgcgtgtggaacccggcaccaacccgtacgccaatccagcc

SEQ ID NO: 3790 - DNA, 4508 bp, Unknown
  R35_2m  MAG No. k141_2948
ctgctggcccgattgcctgttgactggcaatggcttttgctgaatattaccgatttcctgacgatctggtggcatacggcgcttgttctcgccgtgttgtgtctgctcgcatattttggctccatgcttatagccatccgcatctaccgagccaaagaactctagccgcgcattcgtccgaccgcgatgatcttcagccacatgtcgatcggcagcggcacggtgcggaacatcgcgccgccgaattgcaccaccagcacctgaagtgcgaacatcagcgcgaacacgccgatcatcaccttattgcgtagcagattggcgaacgggctggcgttgcccagctcgcggatgttgaaggcgttgaacggctggaacaccacgaacagcgtgaacagaatggtcgactgctgttcggcggtgccgcccatgaagttcgtccagcttcgcgagcttctcctgcagcggtgtcataccggtgttggcggcgcgcagttcgcggacgattttgccgaactcgccatcgcgcaccacggtgacggtcgtgtcgtcattgatatcgttcagcgcttcgaatgccttggcgcttcggccttccatcaccacggtgatggtcacggacagggcgatggcgaagaaaatgcccacgcattcgagaatgtcggtgtggccgccggccatggagcgggtgattgacgcccagggtgatggccgcagcgatcataagcatgataagcatcgggtcagcgggcgtctgcccgttggccgtggtcatatgttcctctcgcgtttggttgacacaacgcactgaaacccgcgtaatatcactcgcgtaccgcgcagcatggcgattcccgccttcctggaaaaacaagcaacacgccgttgggcatatgccgaggcacaggccaacggcggcgcctttttttcgctttgcacgcctcaggcggactttatccggtaggactgtttgggggagcgggctggttgcgtgcgttcgatcgtgcctgattccaggagtttgcgcagctgataggtgacggtggagcgcggggctccggtggcctccaccaatttgggcgtggacatggtgccgtgcttgttgatcagttgcaacagttgctcttccagcatggagtagcgggcgctgccttccaatgcggatgccgacgcgctgcgagctgatggcctttcgatggatgagacatcacgaaccagcggcatgtccgcggactgcggaacgtccagtccggctatccgcgcaatggtaggccccaatccgggaatatctttgagatatcgctcgtacatctcttcgtcgctgagctcttccgctttgatattgctcttggggaaaggcacgattttcgggtgcgccggtgtcggaagctgtccgttgatcagcccttgcgccgcgctgtaatcgatatcgggcctatcgctccaacccgcgtaacggggatccctgcggctgtccggcaacttggaggtatccgctgagcggaaggtgaccgagaacgtattcagcgtactgtatatttcaggctcgccattgccgttatccagcagcagtctgttgatgaggctgtatccggtccctcgattctccgcgactgtggcattgcggaacggggtgcattcaagcaatttggcaagtgtctgattgcgggtcgaagtggagccgggctcgctgatggaatccagcgtgacgtcgccgtataatccgcctggactcagcacttcaaggcggtctttgtacatgttgacttgtatttggccgccccgggccatcggcgaatagtcgcggtgcatgatggcattgaccacagcctcgcgtatggcatcctctgggtattcaaaggtgtctttgcggaatgggccgtccaatgcgcctccgatgcgcatgttcttctgcgcggcgttcagagtttccccgagtatctcggggatggggccgtcaagtgaataattgtcgatgaatttcaccccgccggcaaacaccttgtcatagccggggtagcaggtgaacgtgatattcacccgtggcagaaactgttgggggtagttgccggcgacgagcagtccggcaagcgtcggatgtggttttccgtcatcgcctgttccgactatcccaagcgctcgcatcgcctcttcatcggtcagttttccgaagacacgtggacggcgttcgcggcataacgcaagaatgccttgcacaatattcggtagcagatcgtcgatggtggcttcgtagatcagctctcggtcatacgtgggttgcacgcggttttccagaagccggtcgatttcgtaatgactgagtttgcggtcgccgtcccaaacgcggatgaatgagccgctgtaccggcctctgttgcgaatgtaacatggcttatccagtggatcggcctcatcaatgatagcgatgaccacggcggaaccatggtatgaggtgacgtcaatgactggcctgatgggtggggtgattttgtcccggcacatctgcgccaatgcttcggcgatgggttgcgccttgaatccttgggcgggctcgaatccatccttttcggcaatacccagcacaatggtgccgccatggccattggcaaaagcggaaatcgtctcgggcagcgaaaccggcaatccgtctgcggcttccttggcctcaatgtcctgactgtccgattgcgcggaacgcagcgggttcagcaaagcatcgatttcctcttccgaccacatgattgtctccttgccattgtgccgcaacttgggcaccatcatagcagacatattaaatatgttgttatgtttggtgtgccttgcggtgtattcggtaagtgttatagttgatgtagaacaaatagaacggtttgggaggaggcgaccatgattgtggaaatcgatcagcgcagtgacgtgccgatttacgagcagctgcaccggcagttcatcgcagccatcgcgggcgatgagctgtcgccaggcgattcgttaccgtccgtgcgctcgctggccgtggaccttggcatcaacctgcacacggtgaacaaggcatatgcgctgttgcgtgacgagggatacatcgttatgcgtcgtggtgccggtgcaaccgtcgctgagcgtaacggcgggggagaagcgccgaaccgaactgccgaagcacaggatgagcggatggacgaggaactctatcgccttgccttggcctacaaggcgcgcggcggtgattcggccgcattcctcgatgccgccaaacggcaatgcgaacgggcatacggcgtgcgctcctcgcagagcgttactgacggtgcaacaaaagaaaatcaggggagataacgatgaacaatacagtcgtgtcgatgaacatcgcgttgtgtgcgttcttgctgttgccggtgatagtgaccgccggcctggcaggggttccatgggttaccgaccggcatgaggtgttcggtgtcacggtgccggccgccgcccataccaatacgcgcattcgcgaatacaaagtcgcgttttcgggaattgtagtggcaatcggtgtgtgcgccatgctggtctcgttggccgtctggcggctctgtggagtcgacgcggcgttctggaccgtgtccatcgcagcggtggtgattgcgatatgtggttttgtgctgcagcaggtgtttcgccgcaaagtactgtccatcaaaaccaatcagggatgggaggcgtccagtgctcgccgtgcggcattgataggtgagcgggacaatcccgacccgctgagcctgaagtgggaattgctgcaagtcgtttgtctcgctgtcaccattgcggtcgggctgctgggctatgaccggatgccggagcgggtgccgattcatgcggatatcgccggcaatgtgaacggctgggccgagaagagtccgatggtgatttggtacgccgtgctcgcgcaggtggtgctggcagcggtgatggtggccagccatgtcgcgatcatctacgccaagcacccgattgatcccgaccaccccgccaccaccgggtatgcctatggtgtgttctcgcgggtctggagcatctacgtgctggtcatcggactgctgacagccggtggattgggcctaggcgttcagcttgtcgccattggcgtgctggatgtcaatctaatcggcatcatcggcatgttcatcgctgtggcggctctggtcggcgcgctgatgatcggcgtgtattacgggcagaacggggcgcgcgtctatgccggtgttcggcacagtgacggcggtgacgattcggacgatgatgttatgccgtatgacgatgacctgcactggattggcggcatcatctacatcaaccgtgacgatccggccatcatggttcctaaacgtttcggcgtcggctggaccgtcaacctcgcacgccccagcgtgatcatcggcactatcgtgctgttggcaatcgccataggactgccagtcgccgcgatactgatgtaaacgcaattctgatgtaaaaaatggctc

SEQ ID NO: 3791 - DNA, 8144 bp, Unknown
  R35_2m  MAG No. k141_3003
gggtcggcggccatgggcgggacaaatcaaaataaggacagccaccggaaccgatggcgtcagtcaaatgtggggtcaccgcccaagccgtcatccaccattatcaccgattagaaaccggcataaccattatcaacgtcatatgttcagtgccgcagataggcgaagtttattcatgagccgaatagggccggtgaagcgggctctcactgcgttcataatacggcatatcgtgaacggcgttatcatcacagtcaggccgaattaaaggaggctcggtcatggtcgccgcatccacggcattcagcccgtcaagcacgatgacggccagtttggtggaatcgactggcctgcccagtgccgctattcctgtgcacgaggatggtaacaacggcaacggcgacagtagtgccgatggcagcggcgacgacggcggcatggtcagatcgctgagcctgtggaactacttcaccatgggattcggcgcaatcatcggcaccgtatgggtgctgctggtcggtgactggatgatcgtcggcggtggcccggtcgaggcgatgatcgccttcgtgctgggcgccgtgtttctgctgccgatcggctcgacgtccggcgcggttaccatggtcgggtcgtttctgcccggagtgctggtgatgacgccgctcttctacaccggtttcgacacgattccgcagagtgccgaagaggcaagcgaaggccttgactggaagaagttcggtatggtcatctcagcttcgctgctggccgccggcttaatcatcattggcctgcaggtgctgccgttctccccggccgcgctcaaacccacatcatgggcaatcgtggcggtgtggatttgctgggtctggcattgcgttggatcagtgcacgttcacggcgcgaatagcggtgcgccggtaggtcgcgagccgttcagtcacgcgcgacccaaagcgtatcgaggtcgtcggcctcggtcgcctttttgcgcttgcgtacccactgttgcaggaaatacgccccatagcaggccacgatgaacacgagctcggccacgagcgcgaaccgttgctccacgtcgaaaatcaccaatacgaacgatgcggtgcacaggatgaacgccgcccaagacacgtacggatagccgggcgtgcggtatttgagttcgctggtggaatggccggactccagccaacggcgacggaacacgatctggcagtaggcgatggcgatccacaccaccacggcggacaggccggaaagcgccaccagcaccaggtacacagtcgaggcggcgatcacggaagacaggagcgccagcaggccaccggccatcgcggcgcacaaggcgagcatcggcacgccgcgacggttcgttttggcgaaccagcgcggaatcatgccttcgttgcccatcgaccacaccatgcgcgtggaggcgtacaggccggaattcgaggcggaaagcacggccgtcagcaccacgaaattcatgatgtcgcccgcataggggatgccgatgctgttgaagacgagcacgaacgggctttcgcccacgccggcctggcgccacgggatcagcgcgcacatcacggtgatcgagccgatgaagaacagcgccagacgccacagggtggtgtggatggctttcggcacggcggtttgtgggtccctcgtctcaccggcggtcacgccgatgagttcggtgccggagaacgcgaagttgacggtcagaatcgtggcgaacaccggcatgaagccgttggggaagacgccgtccttgatgagattgccgaacatcggggcatgttggtagccggcgaccgggatgacgccgaagatggcgagcgatccgatgacgatgaacgcgcagatggcgaacaccttgatggaggcgaaccagaactccgcctcggcgaagaaacgcaccgacaaggcgttcagggtgaagatgagtgtgatgcacgccgcgctccacgcccatgtgggactgttcgggaaccagcgctgcatgagcagcccggcggcggtgaactcggatccgagcgccaccgtccatgtgagccagtactggatcgcgatcacgaagccggtgccagggccgatgaacttctcggcatacacatggaaggagccggtcaccggcatggccacggacagttcgccgagcgtgagcatgaccaggtagacgatcagcgcgccgatgccatacgccagaatggtgccgatggggcccgcctgctggatggtgtatccggagctcaggaacaggccggtgccgatcacgccgcccaacgagatcatctgcaggtggcgggattccatgccgcgcttcaggttggtatgcagcgcgtgctcgcctttgccgtcatgtggcgactcggactggctgatttgcgctggttggttcacctgttccggctggttttgacggccatccgtctgaatctgcggttcctgctgcgaggacggcgactgtgccgccgtgtcggtgtcgggctgactcatgtttctctctttgccatgcgtgcgttccataggcgtcgtcgtgacggcccggaatagtatacccgcactgaggatatagctgcgctgcatgatgctgagtcaaaatcagcttcaaggggctgatttggcgtttgccggaggtctacttccgtttcaaggggctggtcaactggcggaacgcagatagaaatggcattgttctatcactattccgccgtttttaaccagtggctactttggcatcagccccttgaaacggaagtagatgttccgcaaagtcaaaatcagccccttgaaacggagataggcactcgcagcggctacttcaccttctggatacgcagcacgaacacggcagcgtacacggccatgacgatggagatggcgaacgccggcgtgtaggtgccggtcgtggtcttgaccacggaggtgatggtggggccgactgcttggccgagcgtggtggccaagctgaggatgccgaggtccttgtcggcctcttccttgttcggcaacacgtcgacgttgagtgcctggtcgatggccgagtacacgccatagccgaagccggcgatgcccgcgtacaggtacatgcccgtgacactcggcatgatccacggggtgcggcgtcccatcttggaacgcgtgtggtcggagaggttgccgaacacgaggttggaaaccaggcccacgatggcggtgaccgagttcaacgtgccgactgccgcatccgggttagcgacgccgatgtccttgaacagctggggagcagcacggtggccaccacgtacaggccgctgctccacagaagaccgaaagccagaaacccgacagtaaatcgaatgttgtttgttttgatgtgtccttggacatgtctgtcagcctcctatggtgattgcgtgccgttgtatggcgattgtagaccggctcggattggcggttttccgggctttttgagcgtgtggtagcggccgtatgcgccgttgcaatattgatcttgtgaacggttaatgtactcggggctcaaaatatattccagcgtgcggcgcgtttcttgtttaaggaaagtaattcgaaaaaaagcagtcgatgcatggccgtatcaggtgccgtatggcgagcggcgtatggaaaaagtgtctccgtcgggttgtgatgagcatctatgagattgacgtatgtcgtcaggggcagcaattggcatgtgcgggtggatttgcggctcaaagatggggaaacgatatgagactggcgatggcgcagatggcgatgaccgacaatatcgacgaaaacgccgatagggccttggcctactacgatcaggccggcgaggccggtgccgatctgttgttcttccctgagatacagttctccccgttcttcccccagtatgagaaccgcgatgcgtcgcgatatctcatggacctgaccgaccgtcacgtcgccgcattacagaacaaggccctgcaacacggcatgtacgtttcaccgaacctgtacctcaaagcccaggacggccacaactacgacgcttcgctatggatcaacgaacaaggccatatcagcggcatctcgaccatggtgcacatcctgcaagcagaacgcttctatgaatgcgactattatgcgccctcccgagacggattccacgtgttcgagaccccgttcggcaagatcggcatcgtcatctgcttcgaccgtcacatgccggaaagcatccgtacatgcgcattgcgcggtgccgatctggtcatcatcccgactgcgaacatcagcgccgaaccattggagatgttcctgtgggagattcgcgtccaggtcatgcagaaccaggtggccatcgccatgtgcaaccgggtcggcaaggagggcgatgtggcgttcgccggccaatcagtggtggtggacccgtacggcaacgtcgtcagcgagactgatgaccatgaacagttgattatcaccgacatcgatctcacacaaaccgcagcagcgcgcaaacagcgaccattcctgaaactgcgccggcccgaatggtacgcctgacaagaacgaaccgacgtcagcccggaatcttttcgacgatggtgttcaaggtgtcgaaagtctcatcgatttggtccactacctgcttgccctggttgaccatttcggtgatctgttccgtgcggggttgcggcagcgcataaatcgacgtcttgacgcgcttcaagaccgcaccggcgtcggacaggtcctgcttgatggaagcgattttgggaatggaaagcgtgccgtcggagaagttcatgccggacagcagctcttcgatattgaagtccaccaacgtgccctgcgcggcactgtcgattttgggcagggcgttggtcgcggcgtcggcggccgcatccagcatgccgcgcaccgccttcacgtccgaaccgtaatacggcacgtattcggcggcctgccatggcatgccctgggtttcgtctcgcgccgcgacgatgtgactgccagcgctgtccatctgctcaagcgcctgcttgaagtcgccctgcccgacggattgctgtgcttcagccgcatattcgcccgcctgctgcgcctcgccgatcacccgttgtaccgactgccagaacagccagccggaaacgcccaccgccagcagaatagcgaccagtattgcaataacaacagtgccgatatgtttgcgcttagccataggaccaatgtaccttttgtcccatctagcgccattgtgttctggcctttagtccatcaaagtgtccaacagacttgtcttctctgaagaagcgcatggaaatcagttatagtcgattctctcctgtagctggcgaaaaacagatatagttgaattggactaacgggttttatgtagggatgccgaggaggacaaccatgaatcaggggagggctcgactggaacgaattcggtgatggagggctttgcgaaatccccggtcaatcgatttgctgactggttgggatggggattcgtctccctcggagcgggtataggagcgtttctgggtgtcgtcgcgtacgttcaacactggattagctgacggcttcgaatagttctccgaccgcttctcggatttgccgggtggcatgaggttttcgaccgctcacgtagtggcggcgacctcacgctaatcagtaatacacactttgatctagcagactctacggctaaggctaggaggccgacgatgggaaaccgcgtatggaaaggtgaaccttccgccggtggccgggccggaacgatcatcgctttgggcatcgcggcgttggtagtggcgggagtatggttcggatggactcgatactagggctatagtccggtttcgaatctgtcgcagacgttctcgatctcattttccgaggatgcgcgggcaatcgtcagcaaggacgaggaaagctttcatggggacggataccggtacgtgaaggtcgccgctgacccagaacaagtcgacggcaccattctggacggcagggattactccagtggccaactgccccaggagaacatccgcataatcaaggaagcggatgcgaccctgcgattgaacctgggaacacagctcgatgcgctctacgaccggcctcataaggagataaccaacgagggcggcacgctgatcatcatccatgatgccgattcctcggaatggcatttcttcgaatgcctcgtctgaaagctgagcactcccgaaacatatgcgattgtcctgaagaagagcccagaccaaccaagccccgattatccagataaaaagaaacccccagtgcatcacggctgagtcgaagaccgtccggagaggccctttgggggaattcttgatatatcataatgagccatgagccgacagtcaaattcaacaactgatttcctctcacggactccaaggaaaggaagtccgcgggagaaggcgctgcgcgcgtgcattaccgatgaacggcttgccacctacaattatgaggctcaaagacgttcatgcccagcgctagagctgtacctgtgggatcacgacatggccagcgcctgtatgggcgacatcgccatcctcgaggtcgctctgcgcaaccgcatggaccggcaactctccctcctcgctctggagcagaatggcactgaagactggtatatggcagggctacaattcgatgaccgaacccagtaccagattcgtgaagcgtggaaccatctcaccccgcaccagcgaaaaaatcatacgcatggccatctcatagcgtcattgacattcggattttggcgcaatctcttggaagacggcggaacaatccacacgaagtggccagaccagcgccgtgcagattatgagaacgatttatggcgcaaaggactcgataagacattctccaatgggcgccggtatgcccgtgcagtggaagaacgctggacgagaaagtacgcgctggatatcgtaaaaacagtgcatgccctgcgtaatcgggtcgctcaccatgagccgcttgtcaacggcatacctctgccgggtgagaatcgacggattgcattggagaatgcgacgcaggcgtgcttcgctctggcgatgatcctggaccgagatctacacgcatggttgatggataacagcaagatgaaacttgtgctcgaacacgagctgaagcctaatgaataggtggtgagtatcgttttcgccaatcatctcttcagtgggaatggcaatgagctgcagcgacaccaacagattccttaggatccgacaccggcacgtccggcctggtatgcgggttatggcagtgctcgatcgccactgcgggcgaacccgtgccccacatgacatggaagtccttggatacggccgagatcatcgcgcacatcgcatccagggcgaacggatcattgtccaatacgggcgatacggattgaccgcgccgcagccccggtcatgtcatcatgtcccatgccgctcatcgtggccacggtcgcagccggacaaaacctgctatcatgcgattacttgacatgatgttgcgcttttggccatgcgcaggttgaatgggattgcgccacgaaaggatatgccatgaacgatctgctgattatcgacatgctgcccacgtacgggctgctgttctacctgctgatctcggtattcgtcttcgtgggatgccgtggtctgcgccggaggacctcggatcgtggcctgctgcgttttgccgtaggcgcgttcttggttgtttccgcgctcggcgccgtgttcgctgcgctggtgtatatcatggcagcgcctttggcgcagccagatatggtcgacttctaccgcacgtaccggccaggagctctgatcttcctgctgggattgttcatcatacaatttgtcttcggcgtcgctgccgtgtatcggggaaagtaacctggtatatcctgcgataaacgcattggcagacacttgctgcctatctgtaaacacaccctagtaaggcttgcggccgttggtcgagcacagtagtagtgtggtctgctgtgtcaacaggaggagtgtgaccaatgcggctgattgagacatggctggcggaccaggaacgcgcgtttgacttgttcgcgaaattcccggcggaggagacgggattcgagaacc

SEQ ID NO: 3792 - DNA, 3132 bp, Unknown
  R35_2m  MAG No. k141_3015
acgtcctgctcaccgaacagatcggtctcggtctcctcggtgaaggtggtcttgatggcacctgcacgcagagcgcccagagccttggcgtaagccaggcacagcggccaggtcttgccgtccgggtcctgctcgacggcaacgacgaccgggacgccacggccagcggcgtactcacgacgaacgatgtggcccgggcccttcggggcaaccatgaacaccgggtgatcctcggacggcttgatgtagccgtagtggatgttgaagccgtgggcgaaggccagggcagcgcccggcttcaggttcggctcaacttcttccttgtagaccttggcctggtactggtcaggcagaaggatcatcacaacgtcagcctcagcgacggcctcgccaaccggcttgacctcgaggccctgctccttggcgaactcgacagacttggaggtcggacgcaggccgacgaccacgtcgacaccggagtcacgcaggttcagcgcgtgagcgtgaccctgagagccgtagcccaagatggcgaccttcttgccatcgaacacggacagatcggcgtccttctcgtaccagatagttgctgccatttttggcgctccttttatttatttgtttatgggggtgaaatctttaattgttattgtgctctgctggttctgcagaaactgtttttagttttggctttccttgtgggcttttccgatatgcaggtttagtcctgttgacccggaaaagccctgcagaggttcacttagtggaattgagatttttcacgttgtgaacttggcgatatttagttatggaggatttcacttggtaaagtcagcgtccttcgtctcacggcaggtcaggaccgacaccaggcagcacacggccatcacggcgaggtagaggcccacggagtggacgccccagtgggagctcagccaagtggcgatggtcggcacgaacgccgcaccgacgatggcggccaggttgtagccgatgccggacccggagtagcgcacgttcgcctcgaacagttcaggcaggaacgcgccgatcgggccgaaggcgacgcccatcagggcaaagccaacgcacaggaacaccatgttggcgaagaagttcttctggccgaccagaccaccgtccagcaggaacgggaagagcacggcgaacacgacgagtgcgcaggaggagaaggtcagcacgcgcttgcggccgatcttgtccgcgtacaggcaggacagcacgatgaacagggcgaacacgcagatggagatcatgagcatgagcaggtattcctggttggtgaagccaaggccgccgccgccttcgcccggctccttggtgccccaagcgagggaccaggtggcgagcgtgtagaacagcgtgtaggtcacggccacgaggaaggtggcctgcagcacctgacgccaagacttgcggaagacctcggtcagcggggacttgacgaccttcttctgctcctgagccatacggaagatcggggtctcctccatgtgaacgcgaaccacgaggccgacgatcaccaggatggcggacagcaggaacggcacacgccagccccaagccagcatcgcgtcctgattgttgaaggattcgagcacgaagtaggtgccgttggacaggaagaagccgatcggggcaccgagctccgggaaggagccgtacagtgcgcgcttgtcttcaggcgcgttctcggtggcgaccagtgccgcaccggaccattcgccgcccaggccgatgccctggatgaagcgcagcaggcagaggatggcgactgcgccaacgccgacctgatcgtaggtgggcaggcagccaatcaggaaggtgccgacacccatggtcatcaggctgacgaccagcgtggtcttgcggcccatgcggtcaccgaagtggccgaagatcagcgagcccagcgggcgggcgatgaaggcgatggcgaaggtcagcaagctcatcagcagtgcgacggtggggttgtccttcgcggagaagaagatgtgcgggaagtagtttgccgcggcggtgccgtaggcgtagaagtcatagaattcgatggcggtaccgaccatcgatgcggcgatcacggtcttgaccgaatcgcgtaccaaggtagcggctttacctgccgcctgccctaagccagtctcttcgactgctgcagtcattgttactcctgttttgctctcgttcactctcattggcgggcgattatttcgtctcacagggaggttgttgttctgttgctgtgttgttgccgtgtactgtccgctaccgtttccgtctgcgggattctgccgtaagccttgtgagcgcaacaaaaaaagccccgcatcttgcagggccttaccgattgtgtcagcttgattggccctgccttcgttgacggggcttcaagcatcaatgccgaattagtccgccagcgaagacgggctaataattcgtgcggatacaaacgcagaagcattgaatccagtcatcgcgtggcctcctttcggtatttcctcaggccgttcgacctgaactggaatgtaaacataggtttggctgtcttgccaatccagcaagggttcacattgtggacgccacgtcgccgagacgaacgcccccgccgcggggaggaacgccgccggcggccggggagccggaccggcccgtcattgcgcggactcggcggtgagggtgacgattccggccagcagcaccatgacgatggcggacgggaagagcaggtaatagccgaagctgctcgcaaatgcgctgaccagcacggctccgataatggcggcgagcgccagaccggccgagttggcgagcgcataaatgccgaggtcgtggccggctcggcgcgggtcgggcaaagagtccatcaccagttcaaggcctaacgcatcgtagacgccgaaagcgaatccggagatcagcgcgaagagcagcatgccgttttcgcgtgccgtgccggtggaccagacgccgagcccccatgccaccgccacgccgatggcatacagcaggcaggatgccgccaccactgcagtggtggcgatgttccgttcctcgatcttctcggagatcggcccagcggcccaggacgcgagcgcagcaccgatgagc

SEQ ID NO: 3793 - DNA, 25432 bp, Unknown
  R35_2m  MAG No. k141_3144
aggcacgcacggccccgtagctcagttggttagagcgccgccctgtcacggcggaggtcaccggttcaagtccggccggggtcgccaccaaactcccgatgcatgtcgggagttttttgtttcctgccgttcttcgatgccatccgcaaggacggtgaaagtgattgcatccgattcgacacgccgtccgcaccgatgccggcgttaagggggcgcccgtttgcaacgggtgaaatgcatgaggaagcgcatcggtggaatgttcgcgacgcatgacaaaccacggaaaaaccgcggtgggaggtcatggcggctcgctactattttcgctatctcgcatgttacgaaagtcttcaaggagtaagccatgaccacgctcgccattgatatcggaggaaccaagatcgccgccgccgtctgcgatgaaaatgacagcatcatccagcgctggcgcgtccccacgccgatggacgccgacgccatcaaccagcacatcgccgaggtgtaccgcgaggctgtggccgccgggcacaccgatatcgaggccgtcggcatctccgccgccggcaatgtgagcgcggatcgcaagacgctcaccttctccgccaacattccggcatggatcaactacgatctgtccgagcacgtcggcgcgctgatcgaccatgccgtgccggtcatcgtcgaaaacgacgccaactgcgccggatggggcgaattcgtgcacggcgccggccagggtagctccaacatggtcgcgctgaccgtgggcaccggcctcggcggtgccatcgtgatcaacggccagctctaccgcggctccttcggcatggccgccgagctcggccacctgccgatggtcccggacggcgaccactgcggctgcggcctgcgcggctgcgccgaacgttacacttcgggaacctcgctggagaacttcgccaagtccgccgtgcgccgtcgtcctcaggacgccaagcgtcttctggaactgtgcggcggcgacatcaccaaactggaggggccgatggtgtcccaagcggctcaggaaggtgacgtacttggcctgtatgcgttcggcaagatcggcgaatggctgggccgcaccatggccgccgtttccgccgtgcttgacccggacctgttcgtgatcggcggcggcgtggtggccgtgggcgacatcctgctggagccggcccgctacaactaccagcgtttcctggaaggcagcgcctaccgcggccatgccaagatcgtcgcggccactgcgggccaggatgccggtctgatcggcgcggccaacctggctctgcgctgacgatgtcgctccggcaacgggacgttagtctaatggtgagtcatggccggtgccatggctcactgccgcgctgatagtgcggtcgatgagtttccgctgcctgaccatggaatcgaattccgggttctcagcgatttcctcgtactcgtgttcggtggtcacgccggcgatttcggcgataatctcctcataggacgtttcgacggttcgatgcacgccggtgacgtgcccctgacgtatcacgacaatgcggtcggataccgcgaacacatccggcagatcgtggcagaccatcaccacggaccggccttcggagcgcagtctcttgatatatgcgagcacttccgccgactgcatcaccgacagtgcggcggtcggttcgtccagcagaataagctgcgggtcattgagcagcgtgcgtgctatggccacggtctggcgctggccgacggataaggatgcgataggggagccgacccgaatcgccgagctcagggtcttcagcacggaacgggcacgcgagttcatcgaatcgtcatcgcgtatgccaatctgattgatctccttgccgaggaacaggttcgaggccacgtccaggttgtcgcagaactcctgcccctggaacaccgatgcgatgcccatgcggtccgcctccctgatcgagggaatggtcacctgttcgccgttgagatagatatggccgaatcccggctgcagaaatcccgcgatgaccttgatcagagtggactttcctgcgccgttatcgcccacgatggcgacgacctcctggcgttggatggacagattcaccgatttcaacgcctcgacgaagccgaacttcacacagatgtcctccagccgcagcagaggaggtgtgctcgaattcctcatggtgtgttccttcttctcactcttctcctggtaccggtcactggctgacgtcattgcgaaccgagaactcgatggcgcataatgcgccgcctagcgcgcagttgtcgttcgggtgggatgacacgagtacatcgatgggtgccacggcatcagggaacagcatgcgctgcaacgcttcattgaacggttggatgaatacgtcgccggtcatggccagcttgccgccgagcacaatgacctccggatccacgctgatgcacagatcagccgccacctgaccgatacgcacggccgtgtcggcgatgatgcgacggcaaccggggtcgccttcgttggcaaaggacaccagatcatccagcgtcatattgccgtgtgtgacgctgagcaactgcaccagcctgttttccgccacgacggtgtcaaggcagccgcggttaccgcacgaacagatggcacccagcgggtcgacctggatatggccgatttcaccggccaggccggtcacgccatgcatgatttcgccgttgatgacgatgcctgcgccaaccccgtcgttggctgagatatatacgaaattgcgtttgcctgccgccacgcccatacgggattcgccgtatgccgcgaaattcgcgtcattatcgacgtatacgggaacgttgaacgccgtgcgcaacggggccgtgatatcgacgccgtcccatccgggcagaatgccgggaatcgctatggtgtggtcgctggtggccaccggtgcggtcacggccacgccgatgccgaccagctcgctggcttcggcgtcgatgctgctcagggtctcattgatgagcagcatggcgcgttccagcgttgtgtccgccttgtggcccaacggcagggggagcgtgtgctcagcgatgattgacttcgagaagtcaacgatagaaagcgtaagatgacgtcgcgcgatccaaagcccgacgccgaggccctgatgccgtgcaagggtcaccagagtggctctgcgaccgttgcgaacggtgtttttggtctccagctggtcttcgtcgacaagctgatggacgagcgtggacacggtcgcagtggacagtcctgtcacctctgccagttcgacctgtgtcatggcgccgaacttgtggatgcaggccagcaagttggcgcggtttgcctcgcgaagcgaggtctgcgaaccgaaaagccttgttgccataagagttcagtgtagtcgttaccggcatgaggcacagcgaggcgcagagcgtggatttttcggcgtgtcgccttgtgatgcgcgaaaaatcgccattgcgttcattggttgaacataaacgacaggaaattcgctttcttgagtttgacaacttaactcaatacggtattctatgagatgaacctgaggtcattctcaggttcgggcgaccaaggagggttcgccatcccctcgaagatgaaggagaacaaatgaagttcactaagaagatcgtcgccgtggtggcaggcgttgccatgtgcgcgggcctcgcggcctgcggtggcagccgtagcggccaggcaactggcggtgatgccaagatcgaaaagggcgccactatcggcatttcgatgccgaccaagtccgaagagcgttggaacaaggacggcaacaacctgaaggccaagctggagaaggccggatacaaggtcatcctgtccttcgccgacgataagcctgcccagcagaacgctgacatcgagaacatggtcaacaacgacgccaagatcgtcgtggtcgcttccaaggacggcaccgcagtgggccccgccgttgagaaggcccgcgatgcaggtgccaaggtcatcgcctacgatcgactgatcatgaacaccgacgccgtcgactactacgccaccttccagctggagcaggtcggcgtgctcgaggccacgtggctcattgaccagctcaagcttaaggatggcgccaccggcccgttcaatatcgagctgttcaccggttccccggatgacaacaacgccaagtacttcttcaagggcgcttgggatctgctgcagccgtacttcgagaagggcgtgctcgtctccccgtcccagcacggtcagggtggcgtgaccaaggacttcaccgttgaggattggcagaagatctccgtgatgagctggaagaccgagcaggcgcagaaggacatggaatccatccttgactccacctacgcccacggcgagaagctcgacgcggtcctcactccgtacgacggcatcgcccagggtgtgatcaacgccatcgaatccaagcgtcccgacatgaagccgggcaccgactcctggccgtacatcaccggtcaggacgccatggagatcgcagttgccaacatcgccaaggataagcagggcgagaccgtgttcaaggacgtgaacaagctggctgacgccgtgtacgacatggtcgtcgagatcgccgagggcaaggaagtctccggcctgaacggcaagttcaacaacaacaacatcgacgtcccgtccaagctgcttgacccccagaacatcaccaaggacaacctccaggatctggtcacggccaactacatcacccaggatcgcttcgacgagctgactaagtagtcctcatcaggcaatccgtaaacaaacacaatgacatgcggcgcatagccgatatgcgccgcatgtccatgaacacagaactgtgacgaggagtgatgacatgtcatcaaatgacaccatcttgacgatggaaaacatcacgaagacgttcggtccggtcaaagccctcaccgatgtgaatctttccgtcgatcgcggcgagatccacgccatctgcggcgagaacggtgcaggcaaatcgaccctgatgaacgtgctttcgggtgtgtacccatacggtagctattccggcaaaatcacctttgatggcaaggaatgcagataccatactattaatgattccgaggccgacggcatcgtaatcattcatcaggaactggcgttgagcccgttcttgtccattgcggagaacatcttcatcggcaacgagcaggccaagggtggcgtgatcgactgggacaagacccgcgccgaggcgaagaagctgctcgatcgtgtgggacttcccgaagacccggataccagggttatggacatcggcgtcggcaagcagcagctcgtcgaaatcgccaaggcattgtccaaggacgtgaagctgctcatcctcgatgagccgaccgctgcactgaacgatgaggattccgcccacctgcttgacctggttcgtcagctacgtgacgagcagggcgtgaccagcatcatcatcactcataaactcaacgaggtcgccgccattgccgacaatgtcaccatcattcgagacggttcgaccgtcggtgtgatgtacgtgacgccggagacgccgctcgaccaggaagaactcatccgcaagatggtgggtcgtccgctgcacaacctgtacccgaaccacccctccaataccccgggcgaggaatacctgcgcgtcgaggattggaccgtgcatcatccgctcgacgcggagcgcgtgatcgtagaccatgcgaacatcaacgtgcacgccggcgagatcgtcggtctggcgggtctgatgggtgcgggtcgtaccgaaatggccatgtccatcttcggccactcttacggttccaacatctccggcaaggtgttcgtcaagggcaaggaagtcaagatgcccaacgtgcagtctgcgattgacgcaggtctcgcctacgccaccgaggatcgtaagggcaacggtctgaacctgctgcagaacatccgagagaacgcatccctggcctccctgaccaagatcagcaagggcggggttgtggatgacaaccttgagcgcaaggaagtcgaacagtaccgcaaggacttcaacatcaagtgtcatgacatcgatgtgaatgtctccaccctctccggtggtaaccagcagaaagtgctgctcgccaagtgggttatctcgcagccggacatcctcatcctcgatgagccgacccgaggcatcgacgtcggcgccaagtatgagatctacgaaatcatcgataagcttgccgatgcaggcaaggccgtcatcgtgatttcctccgagctgcctgagctcatcggtatctgcgaccgcatttacacggtgtcctacggtgtcgtcaccgacaatgtcgagaagaatggatttacccaggaatacctgatgaagggtatgaccaaggaaagggaggtggcagcctgatgagcgccgcaactgcaacacctgcaaagaaagaagaaaagaccggcctgctggccacggtcgccaacaatgcccgtcaatacggtattgtcggcgcactgctgatcatcgtcgtggccttcgagatcctgaccggaggtgtgctgctgaagccgaactccttcgtgtccctgatccagcagaacgcctacgtgatcatcctggccattggtatggtgatggtcatcatcgccacccacatcgacctttcggttggttccttggtagccttcatcggtggtgtgtgtgcactgctgatggaacgcgccggagtcaactggatgctcgccatcgtcatcgctctggtcgtcggcctgatcgtcggcgtctggcagggcttctgggtcgccgtcatcggcatcccgggcttcattaccactctggccggcatgttgatcttccgtggtctcgccaccgtgatcgtcggcgaatccgtgccgattacctccctcgaattccgtggcattgcccgtaactacctgcccaacatccttggctggtggggtccgttcgacggtctgaccattgtgctcggcatcctgtgcattgtcggctttgcctggagccagctgcgcaagcgcgcccgtgtggccaaggtcggcctggtgcccgagccgatgagcctgaccgtcctcaagattgtgcttgtcgcggtcgtcatcgccttcgtcacctacctgctggcttcctccggtaacgctgatcagggtggtaccccgatcatgctggtgatcgtcggtgtgctggtcttcatctacaacttcatcctgaccaagaccgtgttcggtcgccacgtgtacgccgttggtggcaaccgcaaggccgccatcctctccggtatcaacacccgccgcgtggacttcctgctgttcgtccacatgggcttcctgtccgcagtggccgctgtctgcatgctttcccgtctggcttccgcaactgctcaggccggtatggagttcgagatggacgccatcgctgcctgcttcatcggtggcacggccgtcaccggtggtattggtaccatcccgggcgctgtgattggtgcattcgtgatgggtgttatcaaccagggtctgtcgattatgggtgttgacaccgccgtggtgaagaccatcaagggcctcgtgctcctgctggccgtcgccgtggacatcatatccaagcgcaagaagagctgaccttcccctttctcctcctcgatgtgggattcgtgccggtgccgctggtgcggatcccacactgttatctgccgtcattcttgtaatcaaaggactttttccgccatgaaactcaccgcgcgctccacctcccgtatgtatgcattgacctgcttggcctgcgttatctggctctggcagtcactggtcgaggccaataacgatggctcgctgttcaattgggccactattgtcttctcgctgtgcttgctagtggtcatcggatggagtggttggaatgccgtcaccgggtggaacgccaaggagactgaggccgccacggcgggtgccaaggatgatgagggcagcactgatcggtaacgtatatacggctgttgttgccgggaacatataggtcccggcaaacctgcagcgatatgtgcattgcaagccagggatcccctggcttttttatgccgaaacggaactcgacacgggcgcgcaggtcgttgggtttgtctagagcctgcatatagttacttatggtaatgactattagtaactaattggaggttgggccagcgatgtgcgattcccgaaccgataccaagaccggcttgcttccggtgaatgaggtgcggagcctcctggatgtctgctggaaggccaagaccatcaccgaactgatgccggcattgccgaaaggtatgaaaccgcgctatgtccacgtgatcgacgccgtctggcatatcaacgaaccgaatgggcaagataccggcaccgcgcgcgtgggcgacgtcagcgcattcctcggcgtcactacgccgagcatcaccaagctcgtcggcgaaatggccgacctcggactcgtcgtcaaacacgccgatgccgccgatcggcgtgcggtgacgctcacgctcaccgaacgcggcttggatatccgccgcatctatatggaggaatatcacgcgcatttgagccaactgctgggcggattgacctcggaccagtgcgaaaccacggtacgcaccttgaccgaggctctgcgactcatgcaggaagacttccaacgtcgtagtcagaatatctgaatgaatggaggagagaacaagatcgtgactcattccgcaacacagctgcctaacggcggcaagcaaccggtctccaacaaactcgtcatcgcggtcgtctcgctcgcgatcctgactttcctcggcatcctatcggaaacgtcactgaacatcgcctactccacgccgatggaggagttctccatcggcgcctcggtggtgcagtggcttgtcaccggttatctgctcttgctgtcggtgtcgattccgagctcgccgttcatggtgcgcaaattcgccaccaaaacactgttcatcatggccatcgtgattttcaccgccggcacattactgggcgcgctcgcggtcaacttcccgatgctgctcgccgcccgactggtcatgtcgctcggcaccggcatctccctgccgcttatcaccaacatccactggcacgaagaagcgtgattccaacatgcaacgccctattatgacttcgcggtcgtttttgcgcacgccgtctgaagcggctgggcccggcgacgaggcaactattcaggacctcgtggatacgttggaggccaaccgttcacggtgcgtgggcatggccgccaacatgatcggcgtgagcaagcgcatcatcgtcttcgtggacgaagatctcggtggccgtatcacggtgatgctcaaccccgtgatcaccgcttcggatggtgcattcgacacccaggaaggctgtttgtcgctgaccggtgaacgccgcacactgcgctgccgccgtatcgaggtcaactacgaggaccgtcggttccgcgcccgccacgccaccttcaccggctggaccgcgcagatcatccaacacgaagtcgatcactgcaacggcatcatcatctgattcattcggtgctcgttgcagcccaccccccccccgaggctggtcatcgcgattacgatgcaattacatcgcaaccgctatgaccagttttttttttatgtgcactggtggggtgggtgttctcagcggtgttggggtgccatgcgctggccggttggcttcgctgaggggtgtgggtggtgtcatgttgccagcggttggctggttggcttcgctggaggttctctcagcgtcggtgatgtgccaaagagtggcgggctggcttcgctaaggagcgttaccgtcggtggagaaccagtgcgtgacctgctgccgacgctaagcgttcattaagcgtcgttagcggccaaaacttggacgtgtaacgatgctgggcggttttagcgtcgttgctgtgccaagttgtggtcctctgccgacgctgccagtgcagtagcgtcggcgttgggacaggtgttgggcctttgccgactctataagcgagggaaaatcattcgccggtgcctaaatgggtctattgccatgctgaatacatctgctgagtgtagctatgcgttcgaaggcgatttcgggacctttctcagtagcaaatatgtctaatgcgcggagttatacacttcaccgtgcacttatacacgccaaacgaagcagaaatcgactgctgacagtggacgacacgccagagacgatgtggataacccagagacggtggataacagctgcgcgatcagtggataacctgcaagaaagtgcggttatccaccgacggtagccactgttatgcacattccataccccttggaatcattgggttttccacttatccaccatctcgccatgtgggcttgcgggccaccgcacgaacgtcatacagtgtgcctcacggcgggcaacgtagcccgccgtccacatcacatgaaggggaaacaccatgagcaccgcaaccactactactgccgaaaatgccggtttgccagcaatgctggacaccaaagacgtagccgagatgttcaaacgctgcaatctcgccgtctatgccgaagcgagacgcatatattatcgcgaagtgaatctgaacccatgcaaaaagtatccgaagcaggtgctgcaaaggatcgaatggtggttctgggattggtttgcctatgactgcgccgtcagcggtattggactgaccggcaatgaatccgaagatttacgtatcgaattgcagtacggtccgggcgcaggtatctcgccattcctagccttggccgaattcatgtatgacaaggacgaacgtatcggcacacgcgagatacgtgattttcgcgaacttgatgacaccaatttcgcttcgatgttctggattcgcgatgccagcgcggtcaaaggtcgtctgacagttgaggacatcattcatggtggtgtctacgaggtggcggacgtacatgccgcctcgcaatacgatggtgcgcacggcggcatgatcgtcaatcgcatcgcacatgtgagaggcgtgtggcgatcctgttccatcccgatctatgaggcacgaaggcctgatgacccgcaaatcggtgattcgctggcccgttcattccgggaaaccggatataaaccggactttgccggtctggtgcggtttttctacgggagggccaaagacaccggtctcgactgggaagatgtggaagccgcgcgccaagccggtactttggacgcgctgatcaagaaggccggcaatcggtgaaggattcgcctaacgctgctgtccaagtcggcggccgcgatcacgaatgaagagtgacgcaaccaaacagaccgcgcacacaatggcgaccgtgcggaacgaagcccgcacgccaatggccgatgccgccgcttccggcactccggtgcgcatggccgctgcggtgtgcgtgttcatgatggtgaccagtagcacagcctcaaacgtcatgatcgcgaagcccagcaaggcgagcggccggccaccgatacggtcgtgcagcttgcctgccaccgggttcaggatgcccatggcgatgccgctcggcatcatcaccagaccggacaccagtgcattaacgccaagatcattctgcaaatatgcccatcgcgtacaggaacggctggcgggtggtgaaggtttcgatgaggaacgcggcgatcgggatcatgatgccgttggtgagcatgaatccggtggtcagccattgcacggtgctgccgggcacatcgaattcatgcatcaacgtgggcggtgcggagatcatcagcgtttggttgagaatggccacaaacgagccgatcatcagggtgatgaccatggcagtggtgttggcaggggtggtgctgttggagttggcggggcggtggagccggcctcagcggtggccggcgaggaattgcgtgacgtcaattatcaagtctcgttttcttggctgagttgtctttcttggcttgtccatactatctgtgccttgactgcattcgaaaaccattgcaatgactagcaacacgctgagacgcggcgtattaattcaatcatttgacaaacttagttcgttcgttttattattggtcctgcaatccgtaatatcgcctactgcaaaggagcgcccaaatgggtctgtgggatgttgacaagatcgagtacgtcggccgcgccaaaggaccgaaggaagacttcgccttccattactacgatgccgacaaggtcgttgccggcaagaagatgaaggattggctgcgcttcggcgttgcttggtggcacaccttcaaccaggaactggttgatccgttcggcaccggcaccgcgcaccgcccgtactacaagtacaccgatccgatggaccaggctctggccaaggtcgactacgccttcgagctgttccagaagctgggcgtcgagtacttctgcttccacgatcgtgacatcgcccccgaaggcgacaccctgcgcgagaccaacgccaacctcgacaaggtcgttgacaagatcgacgagaatatgaagtccaccggtgtcaagctgctgtggaacacctcctccctgttcaccaacccgcgcttcgtgtccggcgccgccacttctccgttcgccgacatctacgcctacgccggtggccagctcaagaagagcttggagatcggcaagcgcctgggcgccgagaactacgtgttctggggtggccgcgaaggctacgagaacctgtggaacaccgagatgaagcgcgagaccgaccacatcgccaagttcttccacatgtgcgcagattacgccaaggaaatcggctttgaggcccagttcctgatcgagccgaagccgaaggagccgacgctgcaccagtacgacttcgatgccgccaccgccatcgagttcctgcgcaaccacgacctgaccgacgtcttcaagctgaacttggaaggcaaccacgccaacctggccggccacacctaccagcacgagatccgcgtggcccgcgagtccggcttcctcggttccctcgacgccaaccagggcgacaagctcatcggctgggatatggacgagttcccgaccgatctgtacgagaccgtcgccgtcatgtgggaagtcctgcaggccggctccatcggacctcacggtggtctgaacttcgacgccaagccgcgccgtacctccttctacgaggaggacctgttccgctcccacatcgccggcatggatgcctacgccgccggcctgctggttgccgacaagatgaaccaggacggcttcatccagaatcttcaggccgagcgctacagctcctacgactccggcatcggcaaggacatcgacgagggcaacgtcaccttggccgacctcgaagcctacagcctcgacaagccgcagtccgagctcatcgccgccaccaagtccgatcacctcgagtccgtcaaggccaccatcaacaactacatcattgatgccctggctgaggtcgagtgaccatcggtcttgaccgattgaattcgctccatcgggcgtgtacacatcaattatgatgtcagtgcgcccgatgggctgattcgatagtttcgccatgtgcggtgttgtgttatgcccgcatgacacctttccattccttctttctcctttctctccttccgctggcatggagttcgagatggacgccatcgcggcctgcttcatcggcggcacggccgtcaccggcggcatcggcaccatccccggtgccatggtcggcgccctgatcatgggcgtgctcaaccagggcctgtccatcatgggcgtggacgccgcctgggtcaagaccatcaagggcctcgtcgtcatcgccgccgtcgcctacgacctgctctccaagaaaaagaaaggctgagctaaacctggcctccgggcccgcccggtggccacggggatggacctgagttccattcctcctccgaaagggacgctgttgcacgcagcgtcccttttccgtttgtcgcgatggatggatcccggtgtacgttcttcgcgaaatcagccctgacttggggtgtagacaatatgattcggcgatgtgcctcagcggatatgtacggccaatgaaaaacgggataccgatgtcgatatcccgctttcagcgaataggtaaggccagagcttacttcttcttgactttcttgacgcgcttgggagcgggagccgctttcttgggctcgaagaacggccacttgtgcaaagcccaggcatgcagcgcgggaatcttggcaacggcgaagccgatgaccagaccgattaccatggcccaggtctccagatcatggcctgcgaccagcaagccgatgaacactatggcaacgatgaagctcaccatctgcgaggcctttgactgcttggcggtcaccaggccggccttcatgggaacgagccccagaaacaggccgcaaggcgcgcatatgacgcccagcaccacgctgatcacggttgacacggttgttacttccataatgttcctttgctgaagtgggatgattcgcttgattcgggcgaacgataacgatggttactggcgattagtggttggtgatgcatcggcatccgtggttgcgacgtcggtttcgacatcgtcatcggtgtcgtcctcggatccctcggcatctgcggtgtcggtatcggtaccgtcaggcgtatccgcggcgtcatcgttctccgcatcctccttgctgggttgacgccaccacaatatcaatgcgttggcggcgcagtagacggcggcaatgccgatgcataccaaaaagatgatgtttgaggtgctgatcatcgtgccatcggccattgcttctttggcggattgccatatccaaatcacgcatgcgacggcggtcagggcgtacagcatcatacgggagcggtcgttcatagaagaatctccagacttgttcaaacgacttgattatagccgtatttgtggattgcgtgggaaacgaaaaatgccgccatgtgtgcttcagcgaggagcgcggtataacagcggctcttcgcgatgcttgccatggcggcattcatcaggaatcgttattcagttgttatctcatggattgtgctggcagcgtatcagccgcgcgccttggcatacgcctcgtacacggcttcggtgggctctccggtctccacgccctcgatggtgagttgccaggtcagcggttcggcctcgccggacagcacccaggcggcctgacgggcggcgccgatggccacatattcgtcggtggccgggcgagtcacatccatgccaagtatcgagggagccagcgtgcggatggccacggacttcgcgccaccgccaatgagcaggatgcggttgatctcggcacccagcgaacgaatcagctcgaggcagtcgcgctgggaacacagcaggccttcgacgaacgcacgagccagattctccttggtggtgttgtgcagggtcaggccagtcagcgaggcggtggcgtccggacggttcggcgtacgctcgccgtcgaagtacggcaccagggtgatgccgccggcacccggctcggccttaaaggccagttcggccagctcgtcgtagtccacgccaagggcggcgcgaccggcgtccagaatgcgcgaaccgttgatggtgcaggcaagcggcagataatgaccggtgcagtcggcaaagccagaaatcgctccggtcaggtcgtacaccgggttttcagcgatggccgcggccacgccggaggtgccgagcgatacggacacatcgcccacggccatgccgaggcccagcgaggccatggcattgtctccgccgccggggccgatgatgcagccgccttcaacgtccttgccggcaatggcggggtcggccttgacggcggctgcctcacgcgggcccagcacggtgggcagcacaatggcgtcggcgtgggccttggcggcttcctcgccctcggcgggggtcagcaccatggcgatgagatcgcggcggtactcgtcatgcgcggcatcgtagtaaatggtgccggaagcgtcggaacggtcggtgaacagggcttcgagatgagcgtcctcgccctcggccaccgggccatagccggcgatacgccagctcagccaatcgtgcggcagacagacggcggcaatcttcttggcgttctcaggctcgttctcggccacccacgccaccttggtcagcgtgtaggaagcgacgggggaggatccgacggccttgacccagcgctgcttgccgcgggcggtcacgtcgtccggttcgtcgccctcggccggagttgcaccgagcttgtcgatcagggcggcggcctgcggggcggaactggtgtcattccagagcatcgcatcgcgaatcacgttgccttgcttgtcgagaatgaccatgccatgctgctggccgccaaccgcgagggccgcgacatcgtcaagcccgccggcctgctcggcggccttggtgaaggcctcccaccagaattccgggttgaccgaggtgccatccgggtgcttggcctgcccgaaccgaacctgttcgccggtggcggcgtccgtaatgcggacctttgttgattgagttgacgtatctacgccggcaaccagtactttcgtcatgcattcctcctcgatgagggtcgcgcttgcaagtttcggcgcgccacaaccaataagttagacgattaaactatactgtattgcagtgtatgattgcaaacggaaacacgcgagggtgcgtatctggttcaatcgtttgacgcacaatatcattgtgcgatagacggatgtgagcgcctgtgcggcgttcgagactaggggtgcaaggaggtaggagcctatggcaagtctacgcaggatcaatcaggaggatctgcgcaaccataatttgtcggtggttctcgacactttgttgcgcgcggagaaacccatgagcagggccgacttggccaaggaaacgggcctgaccaaggccacgctttcgctgttggcctcgatgctgatcgatagtggcgtggtgcaggaaggcgagccggtcgtctccaccacatatgggcggcccagcacgccgctggagattcatggcgggtccatcgccggcatcggcctgcagatcaacaccgatggctacggttgcctggcactcgatctgaacggcgacactctcggtcaggagtgggtgagtgaggatatgaccggcactgacccgtacgagatcttcgccaagctcgatgcgatgaccttcccgttggaaagccgactcaaacgacgtggctgcaaagtggtgggagccgggcttgcgctgccgggcatcgtcaccgacgacatgtggctgttggtggcccgcaatctgggttgggaaaacgtcaacctcacccggttcaacgtggtacgccggctggatgtggtggccggtaacgaagcgaagatggccgccatcgctcagattccggggtatgccaccgaacgtgcgtccttcctgaatgtggtggatcgcacggattcctttatttacctgtctaccgatatcggcatcggcggcgcggtggtgcgtgacggcgaagtggtgatgggctcgcacggattcgccggcgagatcggccatctgtccgtggcgatggatgggccgttgtgcagctgcgggcgccacgggtgccttgaggcgtttgcgggccgtcgcgccttggtcgaggctgccggcattgccgaagatggggatgccaccagcagcgaggccatcgatacattcctccagcgttggcgtgcgggggatccagacgtggccaaagtggtcgatcaggccgctgatgcgctggtttccgccatcgcttccgccgtgaatctggtggatgtcgatacggtgctgttgggcggactgtggacgcacttcggcgacgagctggccaccgtgcttgaaggccggctgcgttcggaaattctgggatacccgaatgtgaagatccgcgtgttcgtgccgccggtggcgctgcatccctcgctatatggcgcggccgaaatgggcttgcgacggttcatcgagaacccgttggggtacatgggggagaagtagcgccgggagatgctgcttgttgtgctggcgggtgcatggcatgggtgcatggcgcgtgtgccggcgttggtgggttcatgctacactttgcaagttggctgttttacgcagcgaacgtggggccgtagctcagtcggttagagcatgcgactcataatcgcccggtccagggttcaagcccctgcggccccactcttttgcgtcgcctcctgcggcggcacagcgcgtcttcacgtccagataggcgcgtacaatcccttaggttccggttcacgtcctgccataggggcatgacgacccgggtcccccgaatccataggagacgtaaaatgcagcagggtatccatcctgattaccaccccgttgaggtgacgtgctcgtgcggcaacaccttcgtgacccgcaccgctggcaaggaagatcacatgttcgttgacgtgtgctctcagtgccacccgttctacaccggcaagcagaagattcttgacaccggtggccgcgttgctcgcttcgagaagcgctacggcaagaagagcaagtagcatacttcacgccagtccgattcgattcggcatgctccggcatacccgatcgaggactggcgtttttgtattctttgacatttttttttgacctgcacaaccgaatagacaccaccgtacgaaagaaagcgtgttatggcagacgaacagttcccggcggcggcaaccgcgcttgaggagtaccagtccatcgaagaacagatggcgagccccgaagtcgtgtccaacccggacaagctgcgcaagctgggccgtcgtcacgccgaactgggtgccatcgtgggcgcctacaaaacctggttgcaggtgaaggacgatctggcagccgctcaggagatggccggcgaagacgccgacttcgccgaggaagccaagcgtcttgaagccgaactgcccggtgtcgaagagaagctgcgcaccgcgctgatcccgcgtgacccggatgatgcacgcgacaccatcatggaaatcaaggctggcaccggcggcgaagaagccgcactgttcgccggcgacctgctgcgcatgtacacccgttacgccgagaagcgtggctggagcgtgaacgtgcagtccgagaacaccaccgagctcggcggcgtcaaggacgtgcagattgccatccgcgccaagggcacgcccgctcccgaagacggcgtgtgggcttcgatgaaatacgagggcggcgtacaccgtgtgcagcgcatccccgtcaccgaatcgcagggccgtatccagacttccgccgccggcgtcatcgtgttccccgaagccgacgaggatgacgacgagatcgagatcgatccgaaagacctgaaaatcgacatcttcatgagctccggccccggcggccagtccgtgaacaccacgtattccgccgtgcgcatgacccacctgcccaccggcatcacagtgaacatgcaggatgagaagtcgcagatccagaaccgcgccgccgcgctgcgtgtgctgaagtctcgcctgctggccatgaaacatgagcaggaggccgccgaagccgccgacatgcgtcactcgcaggtgcgttcgcttgaccgctccgaacgtattcgcacgtacaacttcccggaaaaccgtatcgtcgatcatcgcacgaattacaaggcctacaaccttgacgccgtgctcgatggcgacctgcaggccgtcatcgatttcgacatccaagccgacgaagccgaccgtctggccaaccagcagtgatagccgacctgattcgtcaagccgccgcgcagttgcgcgaagccggcatcgagacgcccgaacatgatgccaaactgttgctggccgaggccgtggacgccgagctacgcgatatcgacaaggccatgctgatgggggagggcctcgattcgctggcccccgccggcgggggctgtcgcgcagcgactgggggtggtcaggccgaccccgtcaccaatatccttgccgccttccacgccatgctttcccgacgcgccaaacgcgagccgctccaatacatcaccggccacacgcctttccgctacctcgacctgcaggtgggccccggcgtctttatcccgcgcccggaaaccgaaaccgtagtccaggccggtcttgactggctgacccggcacagcatgatccacccgcgcatggtcgacctgtgcgccggttccggtgccatcggcctgtcgatagtcagcgaagtgcccggcagccaagtatgggccgtcgaattatccccgcgtaccgccgaatggacccggcgcaatctggcggtaaccgcgaaacgatacccctccatcgcctccaattaccaactggaagtcgccgacgccacgtcactggccacgctggcgcaactcgacggcaccatcgacatcgtcatcaccaacccgccctacgtgccacaaaccgacatccccgaacaaccagaagtacgcgactgggacccggaactggcgctatacggcggttcggcagacggcacgctcatccctgaacgcattattgagcgcgcctggcgcctgctcaagcccggcggcgtattggttatggagcatgatctcacccaaggcgagcgattagtggcctatgccaaggccacaggtttcgccaccgcctccaccggcaaagattggaccggccgagaccgctatctcttcgccgagaagtagccacaggcgcggggccgccgctgctactgcgcgtaatactgcagggcggaggcgtccgcgtccgtgatttcgcgaatcggacgggccggattgcccacggccacggtgtgcggcggaatatcgcgcgtcaccaccgagccggcaccgatcacgcaaccctcgccaatcgtcaccgggcaacaatccagcacagtgaagttgaagttggcgaacacgcgctcgctggcgcgcggcatacgcagttcgacgggaggcatggtggtggattcagcattgattccgctcattgaacactcctgtaatttcgcgaaagagcatggatgaactcattgtatctacggtctgtgcgtatggggcgaatcggaaaacagcagtacggcaaacgagcgatgatgaactatgcaagtcggggcgcaatggtgcaatggtagattgtgaatacacaggcgaacggaggtgtcgtgagcgtggagggcggaacaacgctgaaagtcacggatgaatcgctggcacaagcggcgcgtgtcatccgggatggtggattggtcgtcattccaacggatacggtatatggagtggcgtgcgatccgcgtaataaggccgccatcgaccgtatctaccggctcaagcgtcgcccgcgctataaggcgttgcaggtactgctcgcatccaccgaccagcttgatgaactcggtctcgacctgccgtctccactgaatcgtttgtcggcggcgttcctgcccggcgcgttctcgccgattgccgtagcccggcccgactgcacgttggagactttggccgacaccgccgatggtcgccccggcacgcagggcatccgcatccccaattcggcgctgtgcctcgcgattctcaaggccactggtccgctggccgcgtccagcgccaaccgttccggcgacgaaagcgcacagactgtccaggaggcggttgacgcgttcggcaacgaagtcgacctgtatctggacggcggtcccacccaaggccatgtctccagcaccgtcgtcaaagccgatccgtacgcgcgcgacggcatcgagatcctgcgtgaaggcgtcatcgcccaaaacgtgattcgcaaggccctccacctcaacggcgggggactcggcgcatgagaatctacctactgattgccgccatcgccggtggcgtcacctggctggtgactccgctgattcgccacgtcgccatcgaaatcggtgcggttggcgaggtgcgtgcccgagacgtgcacaccattcccacgccgcgcatgggcggccttggcatgctgattggttttgccgtggctaccgtattcgccagtcggctgccttttctctcgggattgttcaacggcaattaccagatgtgggtgattcttgccggcggcatcatgatcagtctgctgggcatggccgacgacctgtgggatctcgattggatgctgaaactcgccggccagctgctgatttccgtattcgtggcttggggcggattgcagatcatctcactgcctttgggtggttcgctgattaccgcctcgccgagtctgtccatggcgatcaccgcattcctgatcgtcgcctcgatcaacgcggtcaatttcgttgatggcctcgatggtctggcggccggtatcgtggcgattggtggcatagcgttcgccgcctattcgtatatcatcgcccggtcttccccgagttatgcttcgttggccacgctgatcgacgtgatgatggtgggtatctgcgtgggcttcctgctgcataattggcatcccgccaaactgttcatgggtgattccggttcgatgctgcttggctatctcatcacctgcgcttcgattgtgatgaccggacgtcttgacccggcctcgattcatgccagcatctatctgccggtgttcatgccgattctgctgccggttctggtgttgttcctgcctgtgctcgacatgtgtctggcgattgtgcggcgtttggccaaaggccagtcgcccatgcatccggaccgtatgcacctgcaccatcgcatgctgaagatcgggcattcggtgcgtggcgccgtgctgatcctgtggggatgggccgcgttgatcgcattcggttcgctgacgattctgttcttcaaagcgcagcacgtggccgtgggcatggccatcgctgtggtggtgctgaccatagccacgatgtacccctatctgcggcatcgtattcccgagatccaagccgagaacctgacgttcgaatccgcacgtaaaaacgcgcagcatacagtgcctaaatcgcagtctgcagtaggggagagccgggattcgattggctctcaggcagcggattcgatgactgattcgcctgcaaattcgcgggactcgcaggtgggtgaggtgcaggacccggcagcggataagtgagcgctcacaagcgtgtgtcgtgaaggtcagcgcattttcatatagtgtttacatggctacaaaccttgatgaattaaacgcccagtcggcgtatgctccccttcccccgattttcgccaagctcggccttgcctatgacgatgtgttgctgttgccgaacgagacggatgtcattccctccgaagtggacaccagcactcatctgactcgcaagatcgtgatgaaggccccggtcctctccgctgccatggataccgtgaccgagtccgagatggccatcgccatggctcgtaacggtggcatcggtgtgttgcaccgcaatctgtccatcgacgaccaggccgctcaggtcgatgtggtcaagcgttccgagtccggtatgatcaccgacccgctgaccgtcaaccccgaggtcacgctggccgacctcgacaagctgtgcggcaagttccacatctccggtctgccggttgtggacaaggacaacaagctcgtcggcatcatcaccaaccgtgatatgcgcttcatcgcctccgaggattacgacaccctgaaggttaaggatgtcatgaccaaggagaacctggtcactggcccgtccaacatctccaaggacgacgctcaccgtctactcgctcagcacaaggttgagaagctgccgctcgttgacgaggaaggccacctgaccggcctgatcaccgtcaaggacttcgtcaagaccgagcagtacccggacgccaccaaggatgagcagggtcgtctgcgcgtggccgccggcgtcggcttcctcggcgacgcctggcagcgtgcctccgctctgatggaggctggcgtggacgtgctcgtggtcgacaccgccaacggtgaggctcgtctggcactcgacatgatttcccgcctgaagcacgactccgccttcgacggcgtgcagatcatcggcggcaacgtcggcacccgctccggtgctcaggccatgattgaggctggcgcggacgccgtcaaggtcggtattggccccggctccatctgcaccacccgtatcgttgccggtgtcggtgtcccgcagctcaccgccgtgtacgaggccgcccaggcctgccgtgccgctggcgtgccctgcatcgccgacggtggcatccactactccggtgacatcgccaaggccctcgtggccggtgcctcctccgtgatgctcggcggcacgctcgccggctgtgaggaagccccgggcgagaaggtgctcctgcacggcaagcagtacaagctgtaccgtggcatgggctccctcggcgccatggccccgcgcggcaagaagtcctactccaaggaccgctacttccaggccgacgtgacctccagcgataaggtcgtgccggaaggcgtggaaggcgaagtgccgtatcgcggcccgctgaacgccgtgctctaccagatgctcggtggcctgcaccagtccatgttctacatcggcgcccacaacatcgccgagatgccggagcgtggcaagttcatccgcatcaccgatgccggtctgcgcgaatcgcacccgcacgatatcgtgatgaccgccgaagccccgaactactccggcttccacaacaactgatcggttgatgcccgctagcttgcgctagttaggggttgattccttgtgaaaagggtctgcttatgcaggcccttttcgcgtatgtggctcgagatagcttgtatgcgctggggtatagtctgaactgttctgcataagcgatgaccagcgaagaaaagaggcacaccatggtcgacagccatgacgcggaaacgtacagcgcgaaggactcgcgcctgatttggatcgattgcgagatgaccggacttgacatcttcggcggcgacgaactcgtcgaggtgtctgtggttcccaccgactttgacctgaatgtgctggacgagggcgtggattacgtcatcaagccgtccgagaaggctgtgaaccacatgaacgatttcgtgcgccagatgcacacccgttccggcctgatcaacgagtgggagaatggcctgagcctggccgaggccgagcagaaggtcaccgaatacgtgctgcgcttcacgccggaaggcgtgcgcccgctgctggccggcaacaccat

SEQ ID NO: 3794 - DNA, 37388 bp, Unknown
  R35_2m  MAG No. k141_3207
gctgaccgagcagggtgaagccgaagccaagcgtggcggcgagctgctcaaggagaagaacgtccttccggacatcgtgttcacctccctgctgcgtcgcgccatcaacaccgccaacatcgctctggatgccgcagatcgtctgtggattccggttcagcgtgactggcgtctcaacgagcgtcactacggcgctctgcagggcaagaacaagaccgagatccgcgaagagtacggcgacgagaagttcatgctgtggcgccgttcttacgccaccccgccgcccgagatcgacccgaacgaccagtacgcccagaacaacgacccgcgctacgccggcgatccggttccggaagccgagtgcctggccaacgttgttgagcgtgtgaagccgtacttcgagtccgccatcgagccggagctcaaggccggcaaaaccgtgctgattgccgctcacggcaactccctccgcgccatcgtcaagatgctggacaacctgtctgaggaagagatcgccaaggtcaacatcccgaccgccatcccgctgctttatgagctggacgagaacttcaagccgatcaagccgcgtggcgagtacctggacccggaggctgctgctgccggtgccgccgctgtcgccgctcaaggccagaagtgagcctaagccgctaacacggtacaagctgtaaggggagtcgcacataatgtgtggctcccctttgctattcctgccaaatccccatggggcggtgattaccccatggggcggtaaaaccctcatggggcggtaaaactctcatggggcggtatgccagaatggcttaattccgcggtttcacatatctttcaaaccgccccatgggcaagttaccgccctatgggtgttttgccgccccatggatacgccggtgtaccgcccagaagcaacaaaaaaacggcgtccagccgtagccggatcgccgctttcgggcatcctcctcaaaccataggaggacaagtgttcagttattcgcccaatgtgaggacaagccccaatcagtcgatgtcggtgccctcgtcgcgggtcggctccttggtggggtcgaagccggagacgatgtacaccacacggcgggcggcggacacggcatgatcgccgagacgctccaggaagcggcccagcagcacgatatccacggtctgctgacgggtgatgtcatcggacagcgccagatcgaaggtctggtggtgcaggttgtccagcttgtcgtcggccaggatgatggcctcggcggtcttggcatcgcgatcggagagcatggccaccagctggtcagcggtgttgtccaggaagtcgatcatctcggcgaacaccggctgagcggattcgggaatcgcggcggccgggtaggtgcggcgagcggcctcggccacgtggcgggcaagatcgcccatacgctcgaacgtggaagccagacgcatggtggaaacgaccacacgcagatcggtggccaccgggttctgcttggcgagcagcttgacgcactggtcgatcacagaggactccagggcatcaatctcgatgtcgccgtcaatcacagtctgtgcggcttcaacgtcctgattcagcagggcttccccagcgcctttgatcgccttgcgcacgttctgcgccatacggtcgaggtcgtcagcaacctgcttcagctcctcgttgaaaataacgcgcatttctctagcctttcatgcttgcttattgcaacctgtaccagtgtattattccagtacttgttccccacttcaacgtaggtaatggcaacctcaagttgttctactgttcattgggttgttcacctgaaattcatgttaccggcgcgccggcaaaccgcaatcccagcgtgtgatgtgaaagaatgggggcatgacacagatgccgctcgtcgccgcgattgctcttattgtcgcggctgttttatttgtggtaggaatcatcacgctcatcgtgggatttgcgacacatcgagtgtccgtggaatcgccgctggccgatgatgacgacaatgacgatctgtccgacgacaccgccacgctgctgtccatgctgccgggtgcgtccgtggtggtcgacgagcacgacgaggcggtccgctgcaatcccgccgcctaccgcctgggtgtggtgtcagatgacgccatcgcccagcagcaggtgctggatgccattcacgaggcgcgcaagtctggtggcaagcgccagttcgacttgaccaccgatactccggagcggtacgtcgcagaccagaacaagggcgatcacgtcgccacgcagtccgtccaccgccccaactggctgaaggtgactgtagggcgtatcaacgagcagttcgtcatcgtgttgattaccgatgtcagtgacgtgattcgtttcgctcaagtgcgtgactcgtttattaccaatgtatccgagcaattgttgggccccactgaagctctggccaaactcgccgattcgctggagtccggcaatctggacgaacagcaggtggctgccgatgctcgccaggtgcgttccagctgcagcaagctcaaccatatggtgtccgatttgctgctgctcatacgcgcacaggagccgattacgccgtcttccgccaaccgactgaacgttatggaacagctcgaggccacggtggcgcgactggagccgcaggcggccgcggctggcgtgcagctgaacatcaagggcgacgatgatctagtcatcaatggtgaggcggatcagatcgacagcgccgtgaccaagctcatcgaaaacgccatcggctattccaaggaaaatggtgtggtcagtgtgtccgcatccaaagacaaggatggcgaccgtgcggtgattcgcgtgatcgaccagggcgcgggcatcgcgaagaaggaccagacgcgcatcttcgagcggttctaccggggtgcggaacagagcaatcgcacggcggatggcgtgggccttggcttggccatcgtcaagcatgtggcgctaacccatcatggcgatgtgaccgtatggagcgcgcccgggcaaggcagtacgttcagcctgacgttgccgttggcgcagtgaactttattactgtccgaggcggcggtagtcccagcggtcgaagtattcccaaatcagcagtagcaagccaataatgacaccggccacgcacataatcaccaacggcattacgctgtagcccacggccagcagaatcagcacgacaatcaacgccacaatccatagaccggtaccgatggcaaacaccttacgcaggtccacccgtacgggcttgggcgcgggtttgcggacggcagggtcaatgagaggcgcgaacttcatactcatgcactgtagtaagagtagggaggggcgtcaaacacctctccctacgatttattcaatcggtatcagttgagaccgatcaatgtgcatggcatatatggtcggccatgcgaggcatagaccgccatcacaggtgctcgaccacatagtcgacgcacttggtgaaggccatgacatcagccggttccaccgaggggaacacgccaacgcgcagctggttgcggcccagcttgcggtagccggcggcgtccacgatgccgttctctcgcaggatggacagtatctgggaggcctggacgcgctcgtccagatcaatggtgaccacggcgttcgagcgggcgtccgcatcgacgacgaacggagcggcgtattcggagcgctcggcccacgagtacaggatggatgcggacttggcgcaacgcgtggtggcccaggcgaggccgccgttgttgttgagccagcgaatctggttttccatcatgatcagggtggccacggcgggcgtattcagggtctgatccttgcgggagttgttcagtgccgtggtcagcgagaggaacggcggcacccagcgatgtgcgccttccagatgagcgcttgattcgacgcctgccgcacgatcgatggcttcgggggagaggatggcgacccacagaccgccatcggcaccgaaggccttctgcggtgagaagtagtagacgtcggtctggctgatgtccacgggcaaagcgccggctgcgctggtgccgtcgatgacggtcagggcaccggcttcacgactgccgggcacgcggcgaatcggggcggccacgccagtggaggtctcgttgtgagcccagcaatatgtgtccacgcccttggtgagctcaggcagacggtaagtgcccggctcgccggggaacagcaccgggtcttcaaggaagggtgcgttcgcggcggacgcggcgaacttggcactgaacgagccatacgtgccgaatgcggcgcgacgggtgatcagcgaagcgcaggcaatctcccagaacgcgctggcgccaccgttgccaagcgccacctcatacccttcaggcaggtggaagaactcgcgcagaccttcacgaatcgaagcgaccagttgcttgactggtgcctggcgatgtgatgtgccaagcagggtggtggcgccggcatcgagcgcggcgatctgttcggggcggattttgctgggaccggagccgaagcgaccatcttcgggcttcagcgactcgggaatactcagtgtgatagtcatggtttcaagggtagaccagtgttggggaatatcgcggataatgctcggtgtgcgggattgctgcggggctactgcggaattccggggtgccgggcggtagtagcggcaatgcggaatgcagtgcagaatgtacgcagcacatcatggctacggtgtgtcggaatgacatgagttagtgattcttccgataaccggatagtgaggttcgtgaacgggcggaaacaaggcagtttttcaccctgccgcacggttacgtaaatcgtttgacatgcccggatggtgggggatcgcattgaggattgacctctgttcgttgtacagtactcaattgtgccggtcatacggggtcgttgaaaggaccccgccgaacccatccaaggagttaacgtagtatgaagcatgcttcgcataaagcgaccacggtctcgcgccagaagttcagcttagcgaaggcattgtttgcctccggcaagggttctcattccgttcgtgccgtgcgcgcggtgcaatccgctggcagcgacgccgttgttttggggcttgatccggccattgccgagaagatcaatgaaatcgctccccagactcgtcgttccattcgtgaggccgctcgtgccgctgaacgccgtagccatattcttgcctcggcctcactggccgctctggtcggcacggccgcaggtgctctcgcattttccaacaataaagacgccacgaactcgttcgtggctgatccggccacgacgaccacgcagattaagcgcatcagcgatgtgactgcggcttctcgttccgaagcacgtactgatctgagttcgtcctccgttaccgcacagtccaccaatgaaggcggttgggggctgagcaattcagacagcaccttggacgccaagctgatgaatcgcaataatgcgaacaatcctgtggtgtcggctctcatggatgccgatggcgatgctgtgccggctggcttcaacccgaaccatgccgttggcaccaactccaacaactatccgtggggtcagtgcacgtggtacgcgtaccagcgtcgtgccgaactgggactgccttccagcggcaacttcggcaatggtggcgagtgggcggcgtcagcttccgctctgggctattgggtggacaacactcctcgccatgtcggtgatgctgtggtgttcgctcctggccaggccaatgccgatggcacatacggccatgttgccgttctggaaaagatcaatgccgacggctccattgagatctccgaatccaatgccaagggattgggtgtgatttcgacccgtacgttcagcgccgccgaagccggtaagttccagtacgtccactactgattcatttcattggcttacattcggtgattactgttcggatgtgacgtcgccctatcggcaatcgttcgcgcgaaatgacatttcaagtgttgcgaccgcgtattagtccgaactgacctgtgccgacacgccgatatatcccaatagctccggggtgttttatttcttccatcctgtacgagttaatgcgcaccgtgtaaggtgatggttctatgaagaccaaaactgtagcttcttccattgttgccgcgattgtctcctgtgcttgctcgtttatgtttgttcctacagcgactgcagctgagggtgttactgtgacttccaccaagtccttcccctcgtacacccaggtgcgcaaagatctgacgactgaagccactgccacgaatgttgaggacaatgctgattggggcggcattgagaacctcgacgtgccgcagacggaatctcaggcggaaaaggatgccgcagcggccaagaaggctgccgaagaggaggccaagaagcagacggaggccgaggctcaggcgacccagaagcaggccaacgccgcgagccgtaatgagtctcgctcttctgttacttattccgatgccagtggttcggtttccgctggtgccggtgcctctatcgaccgtgcgtattctttgatcggacagagcatggactgcaccgcattggtcagtcaagcgttggcggcccgtggtattaacttccacggttggcctgaagagtacgtcaatgttcccggtggccacgtagttacagacgggtccctgcagccgggcgatattctgatttatgccaacaccggtggatggaatggcggcgcgcactacgatcatgtggcgctgtatgtcggcaacggtcaggcggtccatggtggctggaacggctacagcgtggctctcgctagcgccatgaccgaaaaactcaccatcgtggtacgtatcccgtgatgcagtcttattgattgatatattgcaggcctcggatgccaatcggtatccgaggcccgttgcgttctcctgccgagtgatacacccgcgacatcatcttcgaaaagacattcctgttatgaaatcgacccatgtgtgctaaggtaaggcgctgatgacgaacgttaagaatattatttccacatcagtggcggttatcgccacgggtgccatgtttgcatgcgtagccccgtttgcctctgccgattccgcgcagacgagtgctgtggtgtcctcacgctctttcccgaaggcgagttcggtgaagaagaatttgttcgccgaatccacctccacttcggttgacgagaactctaaatggggtggcatcgagactcttgatgtgccacagaccgagtctcaggccgagaaggaggctgctgctgcggcggcggctcagaaagccgctgatgaagctgcggcagcccagtccgctgctgctgctgctgcagccagccgctctgaacagcgtgcgtcgattccacaggttgacttgggtaaaatgactggcactggcgctgagcttgccagcttctcactgaagttccaaggctatccgtatgttgccggcggcaacactccggcaggatgggattgctccggttttgtacagtacgtcttctcccagtttggcatttccctgccgcgaacctctggtgctcaagccactgtgggtactccggtcgcaagcttggcggatgccaagccgggtgacattcttgcgaatggtactcatgcggccatttacatcggtaacggacaggtgatgaatgctatgaacccggtgcagggaacggcaataagcaacgtttccgtgttcggtggagctggatattccattcgccgcgtgatgtaacaagaattatgcggtaagcgaattcgtattaaggcacgtcctttgggatgtgccttttttcgtatacgcggatttctttttgagcggaggataccggccaaaccgagtgtcgcggggtattgttggaggtacgcggtattcgtgccacaataacttcaaggaggtcgtcatgattaacgacaaggccattctcgtcggcgttgacgggtcgcatgccagttacaaggcaacatggtgggccgcgaattatgcaaagcacgcggggctgacgctgcagattgtctgcgcatattccctgccgagctatgccgccgtttcgttcgatgcaacttacacggcgatgggggacgataacgccgcgcattccgatgctcaggagattctggccaaggccaaggccatcgcagacgagcagggcgtcgaagccgccacactgattgttaccggagacccggcatcggtgttcgtcgaattgtcgcgtaactacaatctgatcgtcattggtaaccgtggcaagggcggtctggccgagcgtctgctgggcaccacgtcctcgtcgctgccggcatacgcctactgcccgattgtagtggtgccgtacaccgatgatgacggcaacctgatgcacctgaacaacacgattaccaaggtggccgtaggctccgacgaatccaagtggggtctgaaggcgctggacattgccgccgacttcgccacgtgctggggtgcggaactggacgtgatttccgctgtgccgaacctgaagggcgtggatggcgaggatgccatcatggagtcctacaaggacgatcttgaggtgcgtatcaagccgttgcaggaatcgcatcctgatctgaaaatcaacaagcagatcgtttccggcccggccgtcagcgcactgaccaaggccagctacgatcacgatgttgttgttgtcggctcccgtggtcgcggcggcttcaccggtctgctgctgggctccaccagccagggactgctgcagcatgcggccggcccggtgtacgtggtgccacgcaagtatgttgaggctgcggaatcgcgtctcgacaccgtgccgagctcgcccgccgaagtgcctaccaagtcgctggaggagattgccggcgtcgaggagattccggtgtccgcagccgagcctgaagtcgcccagcagatcgaaaagaccatcgatcccgacaggcagtaaagtccgggtatacaatgagctccctcatcagagggagctcaatttattagtacgtcggtttattagtacgtcagtgcttgacggtgacgttcatgcgcaccggggtctcctgtacgtaggtgtgcttgaccgtgcagcccttgtcgatatggcgggtgacgcgttccttgagcttgttggcatcctcctcggacaggctggcgtcagaagcatcaatcaccacctgctcctcgaaaccggtgtaggcgtcgttctcggggtcgtacgtgccatccaccacgatcttggcacccttgccctcacccagcgtatgttcgatggcgaactggctggacagcgcggcgcaaccggccagcgcgaccttcatcagatcgcccggcgtgaactggccacgatccttgccgaacttaatgtgcgcgccatcgtcgctgaacgcatcccacgaaccgtccttgttgcgttcaacccacagtcgcttacccatagctgctcctttattttcagccgccggcgatctggcccatcgccatgccagcgggggagcgcggcacctggccgctctcccgcatcatcggacttctctattatgcccctaagctacactggtgcacatggctttgaccgaagaacaactcgcagatattcgctcccgtatccccgcacgtcccgaaacggacattccgatgccctatgaggacctggtgcgcaagatcctgaccgaaggcacgctgaagtccgatcgcaccggcaccggcacgatttccctgttcggccagcagatgcgcttcgacctgtcgaagtacttcccgctgctgaccaccaagaccgtgttcttcaagggcctggcctacgagctgctgtggtttttgaagggttcctccaatatcaactggctgctggagcacaacgtgcatatttgggatgagtgggcggacgagaacggcgatctgggcccggtctatggcgtgcagtggcgttcctggcccgcaccgacccccgaggacccgaatcgcaccatcgaccagatctccaatgtgctcgacctcatcaagcatcatccggattcgcgccgcatgatcgtctccgcgtggaatccggccgaggtggagaagatggcgttgccgccctgccacgcgctcttccagttctacgtggccgacggcaagctaagctgccagctgtaccagcgttcctgcgacatgttcctcggcgtgccgttcaacatcgcttcctactcgctgctcaccatgatgatggcgcagcagaccgggctcaagccgggcgaattcgtctggaccggcggcgactgccacgtctacgacaaccacgtcgaccagttccttgagcagctgggccgcacgccctacccgtacccgaccatcgagattcgtaaggccgattccctgttcgactaccagtatgaggacttcaaggtcgtcggctaccagcatcaccccactattaaggcacctgttgcggtctgatgctgattaccatttcgtggacagcgaagactgtgaaggtgacggaccccgagtcttcgctgtccactacactaaggcccagttccgcaatccaggaggagtaagcgaaatggagcatgacagtagccgtagcggctatcacgaacccgagcccggatctgccgggctgtctgccactgaagaagactggggtgacgattatcccaagaccttctcggtgaatcttatctggggcgaagcccgcgacaaggaaggtcgcgccggtgccatcggcctcaatggcggcatgccttggcactgtgccgaggatatgaagcatttcaaggagctgaccgtctcccatccggtgattatgggtcgtaagacttgggaatcgctgggggtcaagtaccggccgctgcccaaccgcgacaacatcgtcgtttcccacgatccgatgtaccgtgcgccgggggccactgtggtcaccagtcttgacgacgcgctcgatatggcccgtcaggaggcgattccggacgacggtctggatcgttcggagatttggatcctcggcggcgcccagctgttcgccgaggcgttgccgttcgcggacaaagcctatgtgactgatctggccgtcactgtggatgccgacagctacgcgcccgatatggcgtcgctggtcgaggccgggatgtggcgggaagccgaagtgggcgagtggcatacgcccgccaaggaggagtccggcatcgattcctatcgtttccgtatcttggctaaaaccaagtgagcatgcgaatccggcttgtgtcctttatggcggcatgagccggattcatattcattcgaccccaaaaacacattcgggccgtgtgcggcccggtgaagcccgattgaggattgattcaaagctatgagcaatacccagccctacaccgtaatgaccgtctgcaccggcaatatctgccgttcgcctatgggcgagatcattctgcgtcacttctttaatgagcgcggtcttggcgaccaggtgaacgtggaatccagtggtgtgtccgacgaggagtggagccacccgatcgacccgcgtgccgtgcgcgtgctacgcgaacgtggctatggtgatgagattccgcgtgaccacttcgcacaccgcatctcacgtgaggaaatcgaccgtaccgacctgttcctgccgatgaccgcctcccacatgcgcgccctgctgcgcatgctgccggccggcaagcgcgccgaagtgcacatgtaccgcagcttcgacccgaatctgcccaagccgaagcccggccgcgaggatcagattgatttggtggatccgtggtacggcggcaagcacgagttcgaggtcgccatcgaccagattgaggaagtcgctccgtacatcgtcgattgggtggcgaagcagctgtaggaatcggcctgtggccgatgctgtgtgtttcgcagtcttacgaccgcgggtctctacctccgcttcgctgcgttcagcacctccctcacagagggaggtggtcgccgaaggcgaccggagggagagatcaacgaaggagaagccgagcccaacctcagaacaccagctgcaccagtagcatgtatacgatcgtgccgccggcgattgaaagcagcatactgcgtttccagacgtgcagcagcacgatgacggtgcagacgatgagttccggaaggccgtgtgaaccggtcagaatcggggtgttgcgcagtgcgtataccaccagcagaccggtcatcgcatagggcaggactcggccgaaatattcgatgacgcgcggcggctgcttggattcgggaaataccaggaacggcagaaaacgggtgcacatcgtccccagcaccaccgtcacgatggtgagcgcgccttgccagatggtcatcgtcatcgcgtctgtccttccttctgctggtccgctgcgtggctcatggcacggtctgccgtggcttccggggcgtcggcggccgcaacacatccagatgcgggcgcaacgcgacgaacagtatcagcatggcgatcattgagggaatcatgaaatcattggccccgaatatcagcaggcaggccagcgacgtcagcacaccgatgacggcggacagtcgctcgcgatgcttgccggcgagccactgatcgaggaagatcaccagaaacagcgcggtcagtacgaaatcaagaccgtcggtattgaacggcagatgcgcgccaatcagcccgcccagtgtggcgccggtcacccaatacagctggttgcacagcgtgacccagaagtagaaccagcttcggtcgataccggcggggattttcgcggtggagttgatggcaaaggtctcgtcgcacatgccgaaaatcaggtacggacgcttccagccgagccccttgaatttgccgagcatggatagtccataaaacaggtgacgggcgttgaccatcagggccagcagaaagccggcgagtgggttgaacgcggagagcagcagattcaccgtgacgaattccatcgaaccggcgaagatgaacgcgctcatgcacatcggccatacaaacgagaagcccttggtgcccatgagaatgccgtatgaggcgccgagaaacaggaatcccaggcaaatcggtatggtcagcggaaacgccgctttgagcgccggcaaccaggcgttggtgttggcggtgtctgccatgtggatgatgttctccttgtgcaactggtctgccggccgatattcgccgataatgccatatgtggttatacacgcatggtgccgataaacgaggtgaggacggtgtcgggactctgtgcgcgaagtcacagtgtggatgatgtcacatcgtctacggtgggacagtccttgtggcgggcgtgaacacgtgctgagatgaaagcatgagcacatatcaaggtaacgaaccatcgcaaatcgtctacaccgctacggcgcaggttacgggcggccgcaacggccacgccgtgagccatgagccggaactggagttcgacctggacacgccggtcgccatgggcggcaagggtcagggcacgaaccccgagcagctgttcgccatcggctggggcgcctgcttccaaggagcgttggcgcttgccgccaaggagcagcgcgtggcggccaccaagctggccaagagtcaggtgcgcgccagcatctcgctcggtcctgaaggcgagtccttcggcctgaagggcaagattgaggtagttctgcccgatcttgacgatgaggctgccgccaagctcgtcgagcgtacgcaggagctgtgcccctactccaaggccaccgcgggcaacgtgcccaccgaggtcgttgtggtgaagtcgctggactgaagccttccgggttgaaacccgagtccaagcattcggcccgtttccttcagggaagcgggccgaatgctttcaggcctggtcccgcgaatacgaaaagacctcggtcgctatgaccgaggtcttcaatgaagtacccccagagagggggcaacaacatcaccgctcatgcgccctacctcctctccggaagtggtgcatgattcaacttcaattctggatgccactatagcatagggttgcaccgtcgcaaacaccctagcttgggcggtatttcaaggttcctaggcttggctttatcgtagccgaagtaaccaaggacgctctagccgcgtaccgaaatcgcgcagacttgccgccttgtgttgagctgcatatgcaggttttcttcaatctcccttaagtgcatatttgggtgcactttttgttcaagggagagcaatcatgccaaaaaccaacattccagtggggaaggtcatgtccaagccgcgtagccaatggggtaccgtcattccccgatacgacgattccggtagcctcagcgcatggcaggttcgttatccgaaccccgtggatcatggcaagaaggtgcagaagcaattcaagccacatcaggagcacgaggctcatgtgtggttggagaacgagcatcatctggtcgatctacataccaaaggcatccaaacgtgggttcatccccgtgaccgcatgaggcgggaacgagccaaccagatgatgttcaaggagtatgtcgagcaatgggccgtcgaatacacgctgcccaacggcgaacggatagccggcggaaccagacgcaacctgtacctggacatcgcccatttcatgcccgcgttcgaaggactgcgcctgacggaaatcaagcccagacatatcagaagctggtatgacggcccgcatcccgaggggcagtggtcgtttcgacgggcctgcatgcggctcaaggccgtgttccgctcggccacgaccatgagcatggatgggtccccgccattgcttaaggacaatccgttcatctttccgataccgccggagccggattccgcaagggaggacatcccgccggtcactcccaagcaactgcgcgtgctggccgagaacatgccggattacacgcggctgacggtgtttctctccacgcttgccggcggattgcgatgcggggaactctgcggcctgcaggtcggtgacatcgacctggacaacaaggttctgcgtgtgcgcagatcggtcaaccgtgggcatctggatcgaggagaggcaaggttcgccaagaccaagaccaggcgcagcgtccgggaccttcccatcccggacgccttggtcgatatgattcgcgagcacctgcacacgttctgcgatctggatgaccccacttcgccggtgttcgtgcccagaagggtcaaagtcatgagccagaccacgctggaggcgcagttcgctcgggtgcgcaagaaggcaggacgctccgatctgatgttgcacgacctgcgcgccagccacgccaccctcctgatgctcaagggcggcacattacgcgaggtgatgaaccagcttggccatgccggcgaaaaggtcgccatcaagcattatcagcgcgtcgtcgcggagcaccaacgccaaatcgtcaacctactggccgacgagttccttcaggaagcctatgcggagggaacgccgacggacagtttggaagacatcgtcaatatcaccgagcaaagggtgcgcgaactgacccggatgatcgcggacttcaagcaagccatcgacgagctcaacctagccagctgagatgtcccgtgccacagactggccaacctgttgcattcacggacttgcgcatggctgtggtcgtcgggtggcgcccgccgattgcggagagaatgcttcaggcggggctgcgcgacatactctcctccatcgtcgggcggatcgcggccctgggccatgcgcttgcagcgcatgacattgctctttggccgctcgcatggctcgcgggcatgggccgcgtggaagcggacttgggggttcggccaccaccagcatgtcatgccctccgtcttcgctccctatgccgtgtctcgcgccgctccggccccgcatgcccgatggcccaacgagtgtgccatcgggcatgcgtgtcggatcgtcgcgatccacgccttcggtcgctgcgcctgcgggcatgacaggcgggtggtgtccgaacaggaacccacggaaaggaccgatggatatgactggcaccattgcccaagtgtgtccggccgacgagcggctggcggagcgactggccgaggaataccggcaggcgcgcatcgatatggggccgcgtgaggcggcggccgaatggttcacgcccttgctgaggaagtggcgcaggctgctgggcggcaaaggcgagggcttcacggcccgcgagcaactggcgttggccgtgacgctggacaccgaccttcgttctcgcgacacgcttatcgtgaccgcaatcagcccggaggtttccatgaagcaactgcgcgtcatggtcgaggaacgatattcgctgaaatcgacggcgctgctggagcgcgtgttggagggttggttccacgccggccagaagcccgacacgtcacgcctcgacctcgcggtggacatcctcgccgggttcgtcgagcgcgtgccccagagcaggcgggcccagttgctgacggtgtgcgcctacctgtcgtggtcggccggccatgtcggccgcgcggcggaatgggggctcaaggccctgctggcggacgaggaatgcacgctggccgccctcgtggtcacggcctgcgagcatggaacgctgcccgattgggcgctctgaacaacaacacgattccgacgggccgcagggcgcggcccgccgcttcccacttcaatcactcagacaactcttttttcgaaaggaaacccatcatggaaaccgcaaacaccatcgccgccatcaatgaaaccaccggccttgcgccagccgccggcggggtggtcatgctcgaaacggcgcttatcgacccgaacccggcaaatccccgccgcgacgttggcgatgtgggcgagctggccgattccatccgcgcccaaggcatccggcagaacctgctggtcgtgcccgcgccggagggacggttcacgctggtcatcggccatcgacggctggcgggcgcgaaactggcgggattggaacgggttccggcggtcgtggccgagctggacgaacgggaacagcgcgagctgatgctggtcgagaacagccagcgaaccgacctgaccgtcgtcgaggaagccgatggctaccaaagattgctggacttggggtcgagcgtcgaggaggccgcgcgcaagaccggtcgctcggtatcgctggtgcgccgccggctcaaggtcgcggccatcgacgatgatatgcgctcacatgtgggcgcggcccagctgtccatcgaggattgggagaccatcgccgactacgaggcatggccggacttgcaggaacggctcgccaaagccgccggcggacgcaattggaacatggcggtgcgcgaagccaaaacggaacgcaaatggcgcgaatggctcgcctcggcccgcgccacgctggccgggctgggcatcgagcccatcgaggaggagctgtcggagacgggacagtattcctgccccgagggactgcgcgccttggaataccactcgtcgggcgacatcggcgaggccgtggccgaatggcgcgaggaatttggcaacgacccggtggtcgggattcgtgccctgacatggggccgtgcggtcgtgttctaccgcgaggtggacgaacaagccgaggccgaggccaagcgggagcgcgaggagaggttcgccgccgaacgcgaggagcgcgagcgggccgaggccccggcgcgtgggttcgcggacgcgagccgcgaactgcgcctgacgttcgtctcccacctgatggagctgaagggacagcccaagggcatgggccgagcggtggccctgctggcctcgcggttcacgctcgccgtgctgacggagggattcagccagtggaacagcaacgccgatgacatctgggccagcctgacccagagcatcgaggcaacctccggcgatgacggggacggggacttcgacccgttgcgcgtctcggtcgaggcgatgataaagcgcgacccggctcgcgccgctctcggtctgctcatcgcggcggccgaggacgccatcgactggacgacgtggcgagacccggaagccatcgaccgccatgccgcaccgctctacgaggcattggacgcgctgggctaccggcaatccgagagcgaatccgacgcgctcaacggcagtctcattccctccggggacgacggttccgacaccggcgaggcggaggcggcgttggaagaggacgccaagcttcgggaaacgcccgaggaagggtcggcggaagccgatgaagccggcgatgccggtgagaccggcgaggtcgtgcaggccgaatagacgctgggtctgccgtccgtgtgaatcatctcgcgcggacggcagaccgggccgggcgcggcggttggcgaaacgtgaccggggtcagcgccgcgagcgttcctcaagcctttcgtcggcgacccccagcacgccggtggcgagcagggacgcggcaaacactcccacgatggtccagaacgaaccatcgagcgcgggggcgtcggagccggcgaaaaagtgcatgagcaggaacgcgatgacgagcagcaggagcatgaccatgagcgtctgcgcggccagcgcaagcacgcgcaccacaaggcgcaccgggtggacgatgagggccaggcagcttcccatgccgcgcagtagcagccgtatgacgcccagcgcgagcgaaagtccgaaggtgatgaacagcaccggcatgcgaacctccccgccccgtttggccgtcgaatcctattgatcctgagtgtagccggatggatgggcgtccattgactcttgccgctgcgggttcgattcgggcgaaccgtgcgccgcttcgccgtcgcgcgcgtagtcgggcgcgacggcgtggaacgccatgccggtctcgcgcggggccatgcccagagcgccggtgatgtaggagcggggctccgcatactcgcggcagaacgcctccgcctgctctcggaaccgttcggcggcccagcgcatatcgtccaattggacggcgagcctggccagatcggctctcttgcggcgcagggccgtcagctcctcgtccatcgccacgccggcgatgtcgcgcatcatgcggttgcgttcgctgggcttcgccatattgcttgctccttgtccctcgctgagtgtcggtgtcgttgaccgcatcgtaaaggcgcatggccgttgcgtgcggcggacggccgtgccgcgtgccggcgaaacgtcacccggggatgtccgccgccacgcgcggacgtcggatggaatctgacctgtggaagccaccccgccccggcggggtgtttggggagtagcaagcgtcgccggtgtatctacaccggcgctccgaccggccccaggtcggacggagaggcgggacacccgtggaacccgataggaggcgtcagcgcatggcatggaagggcaatcgttcccggccgattctcaagtcggtcacgttcagcgaagaggaatggcggtggatccgggacgcgatgcgcgtggagaaccggatgcgccgcagcgcgggccttcggcaggtggggtggatggcgttcgcgcgcaaccgcatcagaaccgcgcacgcggtgaacatcatcgtgccgcccgacctgcgtggccttgccgcgcaggtggcgcgcatcggcaacaacatcaaccagatcgcacgccaggccaacatgcgcgacgagacgacctacggccagatcatggaggcgcaggcccagttgcgcgagctgcgcggactcctggccacgctgcacgtcgaggcaagccgtcaggtcgagccggaggggaggcccggatggctgtagtcaagatccgcaaggtcaaggccacgctcgccaaaagcatcgcctacgtgaccgacccggccaagaccgacggccagcggctggcctcgaccacgaccggccatgacatcgccgactgcgatgcgatcgccgccgcgttcctaaacgatctggaatccaccaagggcggcagcgcccgcaaaggcgcggtgctggcgctgcacgtcatccaatcgttcgacccggacgaccccattacgccggagcaggcgcattccctcggcgaacgcttcgtgcaggagatcaccgcagggcggcacgactacgtgatcgccacgcacaccgaccgggcccacgtgcacaaccacatcctcatctgcccggccgacctgaccacgggcagggcgatgcgcctgaccaggggaaccctgggccgttggaggcaggtcagcgaccggctgtgcgaggagaacggcctgaaggtgatcgacccgacgctgggcggcagggtgtcgcccgatctggcgcaactgtacgccagcgccaggggcgagaacgccaaagaccgggtgcgcgcgctcatcgaccaggcgtgcatggccagccgtggcttcgacgctttccgacgcgagctggaacgacggggcgtgcgggtcacggtgaggggccggcgcctgacctacaccgtgcttgcctcgggcatgcggttctccgaccggcggctgggcgtggcatacaacatgctggcggtcatgggcaagctggaacgctgcgtggtccacgagatcggcttccacgacagcctcgtggcacgccgcacgaggacggcggtgacggtgcgcgtgcccggcacgcgagggcggcggtgacggtgcgcgtgcccggcacgcgagggcggctgcgcctgacgattcccgtggagcgcacgatccgcgacggacaggtgtggcgggcctacctggctgacggcacgcgccagatgctcaccgacgccaggggacgctatgccatgagcgtgccctgcacgggcctgtacgaatggttcgcccggcccgatgtgcgcttggaggattattgccgccggcgtttcgcagatctgggtttggaggggctggaccggcgcacgatagctcaggccctcgcagccgaccggctggcggacacgttgcgcgagctgaaagtgctggtggaggcggccaaagccggcgaggcgcgcggcgaggcgttcgccaggctgaggagcgatgccgaagcgggaggccgacgcatgctggccctgatggtcgcgctggccgaggcgcgcgaccaaggcgatgacatccgcccattggaaacggagctcgcggccgaggaacggcgcacgggcgaactggccgccgacgccctggccctgcgacgcctcatcgaacgcgagcggcccggccaaagcagagacgatggcagccgggctcgcactgtccgccgcagaacgcggtgaacgcgggcaggctggtggcttgtccgccataggaggcggaacggacttgacgggaagcgaggcaagcgatggcggccgaggatcaggcgcaggaactgctcatgcgcgcgggcgaggcgggcgtgcgcatcgtggtggacgtggcgcgccttggagtgggccgtctgttcgacgtgctcggcataggcgtgcgcgccgcaggcgaatcattgcgccatctgcgcgacaccggccgtgtcagcgtgcgccgtttgcagcggatgggccagccggtgacggtgcaggaggtcaccggcccccacgccgcctccgtggcgcgggcgttgaaacgggccggcgtgaccttccacatcgagcgcagccgcaaggacgggcgcgtgttccttcatttccagggcaaggacatccagtccgtcgaacacatcgtcgccaggctcgtggaccggctcaaccatgccgccgcgcaacgcgagcccgtcgcccgcatcgagaccatcgagccaaaggcttcgcggacgctgccggaggcgcagccggagcccggcgcggcgcttgccgcgccgttcgagaagggcgcggaatccaacggccgtctcgatttccagaccgtgccctgggacggcgaggggcagatcatcgccatgaacctcgaccggctcggcataccccatgcgagccagcaggtcggcggcggcgtggttcgattcgaataccggcgcgaggacgcgccccgggtcgcggacctgatcgaacgattgtcggcgcgcacacgcggcctggactggaatcgcttcgacgcgccggaacgatcggggcgcaatgggcccgtcaagaccaaacggcagacactcaatgacatccgtgcgcgcgccgagcggcgggccggcgcggccgcgccgcgcacctcgccctcccaccggcgggcacgcaaccgatagcccatcccccgaaccgaaaggaacctcatggcggaactgtccgacaacgtgcgctggctggtgaccaacctcatcgaccaggaccagcggatctgcgtggagctgcaacgtcgcggcgaggaatacaccgccgccggccggccccgcgacggcagcctgcaacgtgacgcgcgactgctggtcgaggacgtggtgcgccagcacaacgacatgtggcccgaggcctccatcggcttcactccggaggagctggaccgggcggccggcatggtcgccaaacgcatcgacgagcacgccggattcgcctgggcggaaagcgtcgaagccaaacacgagcccgcgccccggcagacgcctcgattgccggtctcgaatgagccggctcccgctcccagcgccacgcaagctgtgccgccggtttccgcgcctgcggttccccggggcggctagggcgagccggcgcaggctccagcatcgtcgaagccggtgatctggccgcgcgtgaacttccccaacagttacgtgcatgcgtatgcgatgaccgcacgggacgggcgcgtgttcgacatgatgcgcgtgaacatcccgcagggcacccgggtcaacggcgtggacctaaccggctggcagctcgaccggttcgcctctccgcgcatgcgcgaagcgaagctcaacggccgtcccgtgaccgtgggattcaaacccggcgaagcggttgaactctggaggggcgcgggcgagcaacgcgagaccatgcgcatcgacgacccgtggcagctatgccgggccgtcaaggcgcagcgcctggcatacgaacgcgaacgggccgagagcaagacggtcgaggcaaaacccgaacgcgcgccccggcagaatgagtccatcggcccggcggccgactctgacgggccgacggagcacgcgcagggacgtgcatccacgctcgacggcatccgccaacgagcatcggcgagaaccggttccatgccggccgacgccgcgcccatgccccggcagacgaggagccggtgacgatggagacggaagacgatttgggtatccgcgtgtgggtgggcaatctgggcaagtatgtcgagggcgagctcaaaggaggctgggccagcctgcccatgccccaacgggaattgaacaggttcctgcgcgacatcgtgggcctggggccggaggcggccgaggcgcgggccacggggcgtgtgtacgaggaatacgtcatccatgactacgagtacgacggtctgctcgaagccctggactaccggcccgacgagtacgagaacctggatgacctgaacatgctggcccgcgcggcccaagtgttcgaacgcgaatcgccgggcatgatcgaacgggtgcgtatggccgccgacacactcgtgcagtccacgccattgtcgttgacgaacctcatcgcccaatgcgacggcatcgactggtgcgaatacgatccgcccgccggcatcgacccggcgaacatcgatgatctggacgagctgtacgcctggcattgcgtggaacgagaccccgacctggcccgcgtgatgcaggggcggtggggcatgtacatggatatggcctggctcggccgcgacagcgccctgtgcgacgacgtgaccttgggcgagcacgggttcctcctggccaacggcgtgcccgacgccaaccggtacggccgtggcgagctgcgcgaactgctcgacgcgctcgacccgcccgcgcctgcgccggatttccgtctggagaacctgttggaggaaggcgagcacatcgaacgctacgcgatcgaaggcaccggcacgaactggggcgcgcccgactacggttgcatcatgccctacggctccaccgatctggccgccggcctggaggacacggtgcaacgcatcatcgccgaccggcacgaacatggcgacgccaccgagcagatccgactgaccgtgggtgccgtgcccgcgatcgatctggccggagaggaaggcatcgtgccgatcgaccgaggctacgcgctgcccgggcccatcgtcacggccgaccaagcccggcagcccgccaagggcaaggacaagggcgaggctttggaaggcatacgccgacgcgccagccaacgaaacgatatgaaggggacggaggccgcgacgaagaccagaggcggccatgcgcgttgaaaaagagatccccgccgtgcaggtctggctgcgcggcaccctgagcgaggacatgcgcgccgaacctggcgacgaaggccacgccgcagtgtggttgagcgtgctgaccgatcccgtggaagacatggggcccatcggcgtgcgcgtcaaagccgacgggccaagcatcgtgtggctgaggagccatcccgcccgacaaggcatgcgcacgatggcgcacggcaccctcgcctccgattccaacggagcgttcgtgctggccgacgaaatcgccctgtccaccagcctcgacacggaggcaggcgcatgacccccatcatgcccgcaaaactcgccctgaccagccgcatctcgccgccggccggcattaccgcgttctccgtcaccgaaccagtcgggcgggtgctggcggccatgtgcgcacaagccgactgcctgatcgcctggaacggaagcatcacccacatcactccgctcgacgcccggccatcggccagcgccatcatgccgtcgtccgtatccactccgatgacacgagcgcagacgctcgaccacatacgccagcgtgccagccaacgcctcgatcatgccgacatgccctccggccaatcggccggggatttgcccacgcaaacactgacagccgaccggcgtgcccgcgccaccatccaaggaacccagccatgaaccacgccaagaccattctccccgccttgctcggcctgctcgtcctgttctggaccggcgacaagatcggctaccggatacgcgccgacatggaagccggcgtcagcgggctcgacatggccgaccgattctggctagacctactggacccatcgcacatctccacgcatcccaccgacatgctgtgcggtctgacgctcgtcgccgtggccggcctcgcatgggcgtataggcgcgcggcacgcctcaccctgcgcaacggcgaggaacacggctcggcccactgggccggcccgcgcgacatcaaaccgttcatcgaccccgacccggcccacaatctgcggttcacgcgcaccgaacggctctccaccgacacgcggcgtaccctgcgcaacctcaacgtgctgctgctcggctcgtccggctccggcaagacccgctactacgtcaaacccaatctcctgggcgcggacatgaactgggccgtcaccgaccccaagggcgaactcaaacgagacaccgaatctccgatgaaggcgcgcggctacacggtgcacgcgctcgacctcgtggacctcgcacgttccgaccggttcaaccccatgcgctacatcgacccggccgaaccccagtcggcgattctgcgcctgaccgacaacctcgtgaccaacgccaccggcgaccgcaaaaacggcgacggcttctgggaagacgccgaaaaggcgctgctgtccgccctgatcgcatgggtccactacaccgaggacgaacccacgctcaaccacgtcaccgacatgctcgaccagatgggagccagcgaacaggacgaggaacgcgagttcatcgtcgatgccctcttcgccgaaacccgcgtcgaaatcgccgccatgcgcgcccacgaggacgactacgacgagcagactcgcgacatgctcgaaggcctggcgttcgcctgcgcccaatacaacacgttcctcaaaggcgccggagaaaccaagaaaagcatcatcatcaccaccggcgtccacctcgcgcccctgcaagtgcgcgaggtgcgccgcatcctctccggcgacgacatccacttggaggctgtggatgaaggcaagcgcgtggtctatctggaactgcccgacaccaacgcgacgttcggcttcctggccagcgtgttctaccaatgcctcttcgagactctggtcaggaaagccgaccacgcggatggtggccggctcggccgcgatgtgcactgcctgctcgacgagttcgccaacatcggcaaaatcccgaacttcgtgagactcgtcgccaccatccgctcgcgcggcatcagctgctcgatcatcctgcaaaccgtctcccaaggcaaaagcctatacaaagacgactgggagaccatcgccggcaactgcgacagctggctcttcctcggcggcaacgaagcctccaccaccaaaaccatcagcgaccggctcggcgaccaaaccatcgacgtcatcgaaaccagcgaaaccaaaggcgcgaacggctcctggagccgcagcgtccgcaaaaacgcccgcaaactcctcacccccgacgaactcggccgcctcgacaccagccaatgcatctacctgctacgaggcataccgcccttcctcagccacaaactgacggactaggaaggagaactatccatatgcggacagtaggcaagtgcatcaacgaatcaaatctgataggttatccgttgaacagtagttagggaagctcaaagattcatcaacatgcacgagaggttgctctcagatactagtgtggtaggacagtctgagagatgtcatgtttgattaggagtttgtaagagcgatgaagatatcttcggtgattgttagaaatcacagtaggctaatcgactgcaccctggatgttagagagaacctgatactcgtagggcctaacggaagcgggaaaagctcattaattagatgtcttgatctgctattgggcaaaaccatgcagcaactgtattacagtatcagcagtgcagattttaggaacatggaacgtccgctcattattgaagcaaagctaacaaatcttaatgagaatgagttctcatttttcccagacgaagttgatgcttccgacggatctttgacaattcgactggaagcgatcttcgatggcgaggatcttacgattagccgttattgtcctaaaggtgtaggcaacggcacattgagttcatcacagctcaaaagtattagatggaacctaattccatcggatttttcagctaagtctctaaattcagggcggaggactattgtcgatgattatcttaaggaaattaacgcgtcgggtgataagacgaaaatagaagaagccatcagcgcgctctgcaatgcaattgatacttcaagtgcctttgatggagctttaaaatccttggcactgcagttgaacccggcattggcaggcggcgtggacgctactgatctccgtttcattcccggagcagcaattgatggaaatctgctgagcgatgtgagattacaaataaagagtagatccggagttgtacgacaagctactgaacagtcagacggtacaaaggcgttgattgccttcgccgtatttaatttgctgaattcagacggaatcatcgccattgacgagccagagactcatcttcacccatctgcccagcgtaatttgatgcgtattttgttgagcatggggcggcagctagttatcgcaacgcattctggagttgttgctggcgagtttaatcctgacaatatagtggtaactcgggatggactcattcccgtacagccgcgtcaggggttccttcagggagatcaaaaagcgctagcaagatggtggataagcagtagaattgagcttttgacagcaaaacgcatcattgctgttgaagggcaatcagacagaatgctagtagaaaaagtcgctgagctaaccggacggcatttggaaagagacggcatagagctccttgaagccggtggatgtaaggaaatgcctcacgtaatgagcatctttggagagaacggtttcggcatgcaggttagcgttctgattgacgaagatgccgaagcttatacagcgagatcattaggtgttcaggttaataatctcgcctcgaaagccgtatatgtctcaaggattgaccttgaagatgaatatgtctccgctatcggggcagctaaactatgggacaaacttggtgagtcgagtttgtttagcccagaggtgctgcagacttgtgccattactgatgatgcaagcattccagatgaagatcagcttgcatcattctgtagacacaagagaaataaaattgcttgtgctgtaattgctagtgaaaccttgactaaagattccgcagaaaaggtttctagcgttatcgaggtgcttcaaaatgacgtccactgagtatgtcatgacgcaagagcagcaggggattttcaactatcgaccgttgaacatggtgattactgcgccggcaggatgcggtaaaacggaagctctcgcttatcgcgcaaagggtcttattaatcgttatgattttgcagggaacgggaggaagctgctggttgtatcttttacaaatcaagcaaaggataatatcagcgagagaattaagaaacacattggattgcaaaccatgcggcagcatgtcacagtatgcaatttccatggattgtctgcgagaatcattaatgcacacagggaaatgattggacttgatgacgaatggactgttgcgagttttgactggattggaagattcatgcaatcccttaattgcgatagaaaagtaaagatgcaggctagggaggcacttcaaaaaatcaaacttgaatgtctaactgacaaagaagtgaaagcaaaaattcaaacaatttatggacaggtcggcaatcttgcacagattatcgagaaagaacggattaaagaaaaaattattacctatgatgatcaagtcagaactgctttatggattctgcagaataagaatgttgcgaaactttatagaaatcatttttttgcggcgctagttgatgaatttcaagacttgactcatcaacaactgcgtcttgttcaagctctctgcaaagatagagttacgtttgcaggagaccttgctcagggtatttattcattcgctggaggcgacgcaagattcgtatttcacgaaattactaagaataccgaaaaacaagttaagcttcttaaatcgttccgttcttcgcctgccattctcgatgccgtcaattcactctctccgcgaactggtagcgagcatctaagcgccgctttcccggaacattggggcaacggcgggctctcttcatatgcttcattcaatcgcgaggatgctgaagcggaatgggttgttcgaatgtgtcaattaattttggaacgttgtcctgagcatcgaattggaattatctcccgaactgctttccgagcggaatccgtcaagagcactcttaaatctcataatattagctatgctgactggggaaatggcttattcaggcctgaaacggcaaaaatattgcgaaacatctgtgatgaattatcagtcgagtcatgcaaagagcctgaagaattaatgtccttcatcaaaaagaggtataccgcttttcatggaaatttatccgaagaacacgaagatgcatgtggatggttgtttgatcggctagcacaatctgatgcatcctcaatagcagaagtcaagagatgtattaatgcgaaaaaaggcaatgaaactatcgcaacgcgcaaaggaatacattgtttaactgggcacgctggaaaagggcagcaatttgattgggtgtttatcgtaggacttgaagaaggaaccataccgttctataaggctaaaagtgaagaggctatagatgaggaagcgagagttctttcagtaatgatctctcgtgcacgaatcggttacgtagcaacttcatcttcgactaacccacgtttttggtattcaagaaatgcctcatctttccttcgttatctgcagcatgctccaaattttttgtttggtaaagatcaaatagaattatggtgtgccgaagcggattggacagcactgtcgcagatgtagttatatgcttattactcaaagcaattcaacttagttttccgccatgccaatgctaaaaaactaggtgttgttacgaggtgagatgtccttttcctctacaagctaacagaccgagattcggggtaaacatcttttctttttgaggggttcagccgtcgaggcatgaacagacaccctatacgaagtgatgatccagcgaccaggggcagcggttttgataagtcagttggcggtatccgtcggctacgttcttgccgagggaacgctcgatccaagacaaatcaataatgcgggccatgcagtacaccgtgatatatgctgccccgtgaaggcgcaacatcgcagcgacggattgcacggtcgctccacttgcccatgaatcttcgatcagcagaacatgcgcaaggtccagatgttgtgattccggcgcgagtgagaaaatctgcggattgatacggttatgcactttccctgcgttcgcgttcaaatgaagctgcgggattttcgaatgggccatgaacggtgcgaccaaatcggtcaggatatggcgcttcccataattacgactggattgagtggagggaatcgttgcccatgcggtcggcatactgccggtaaaccggcctatgcaggggtagtgcaccgccaaggcgtcggctgcgatgtacttgatatccgtctggtattcggctgccgctggattggtggcattcttgtagccctgcatgacacggtacatctgctcgcctttacaagcgtaatgaccgaaccgcacggtatcagcgagactgacgccaccgggtcgcagcgcgcgagcttgttgggcttcggcatcacatgccagacacaatgcgtatgaagcgttcttgggaccaccacataacgggcacacatggttctgcgtgctgctatagatgacgcagggcgcgtaactgcccatgcgcgcggcctttgccagctccagacgttgataagcgctcgggcgcatcaaatcgctcatacagtggcggattcctcggcgagtacggcttcgatgaggtcgtccacgttgtcgttgacgtagaagatgcgatccagcgcccggctggcccccaccacgtcatcgacgatgtacacgccaggcctgttttccaagtcgcgggcccattgggccttatcgagcaccatgcggttgatgatgatggggcggccatgacgctgcgcctgacgcgcttgggctcgtgtgccggaatgctcgccggcgtccgcgataattgtggcgacgccgtaaccggacatcagggcgttgcgcatcgggaacgactgcttggtcggctgggcgccgggccaaaactgcgaaagcaccagccctcgttcctcgatctcatgctgcaggtcacgattctcggccggatactgccggtcgatgccggtgccgatgaacgccacagtgcggcctccatcgttcaacgctgtctggtgggcgaaggtgtcgatgcccttggccaggccggcgacgacggtcagtcctcgttcgaccagcatatgagcgcaatccacggcgaagcgcgcaccctcgggagtgcaatggcgcgaaccgacgacactgacacccagatcatcggccttcagatcgccgctggcaaacaggaacggcggtacgtcgatggtggcgcgcaaccgttcgggaaacctcgtgtcgaacaccgacacgaaatcaaagccctgactacgccaatcttcaagattctgaacagattcgttccgagcgtcctctagctgcctgacctgttcagcactgagtccgacgtcatccagcaacgtgccctgcatatcgtcaccatcggcatcatcacgcaacagcggatgcgatgagggatcgatcttgtgcagaagcaagcgttccgcgctgccttcgagcacacaatcgttggcaatggaagtccaagtgtctggcctctcgcaagtcctgagcaaagcaatcagcgcggagttttcacgcatgagttcagcatgatccatgacgcacctccgttgttccaatcgtttccatctctacgacagaccataaccgtcatccagtttaggcacgacgtatgaaagctgatatgatatttatctttttcgcaccatttacggacattttgtgcgactacgttgtcggccgacagataccggacaatgttcgaaccctctgatttgtttccatcctgagcaaaagatgctggaatgtcagtgactcaatcagcagcgacgcttgaacagcgtttactagcttcgattaatcatttcataaagtgtcggggaaggtggagggagagtcggtgcttggcacatcccacgatggggctgagggagacggttgaggtgtgggctgagggatgacgggagatgctggcgccgagtgagtggtgttggttgatggctgccgctggatgggcgcggactgtgatttggatgtcccggaaggctcggctggcgcggatggcgtttcttctgcttgtttgatggcgtcggagagccgctgggtgagggcattgaggtcgcctgctgctttgttcagggtagtgatgtcggtggtggtgtgcagggtgttgcgggcggcgtcgagttgggatccgagcgatacgcgcgtctcgttagcgctaacgtcggtgttggcctcggcgcgttggtagaggtcttcggcttgggtgatggcgtcggagagcttcgtctcggcatcggtgagtctacgttcctgttgcgattgttcgacggcggtggccgccttcgagagttcgtcgagggctgtcttcgtttgcttgttgcgctcgtccgcagtgtgggcgttctcttcgagatgcgccgtggaaagatccgttgagcagtgaggaatttcgttcgtcgcgtgatgttctaccacgttgcgtagggagaccagtgcctcggtatcggtcgcgtcggtgtcgcccaatgccagcagtggcttggcgtcgtccagggctgcgttccattggtcgtatagcttgtttgcttgttggattgcttgattgcatgatgcgagggcctgcgcatgggcatggcgttgccctgcgatgatggtcaccgatgccaggacgccagtcaggatggtgaaggcggtcagggccaggatgcgtgcccacgggacgcgccgacgcaccctgatgggtggctcctcggtttcgtccgccgtcgaatcgccggtgaatatttcttctgcctccgacatgttggaggcagaagaggatgccgcgttctggtcaggggtctcggattccgcgattgtcgaggaatcagaggcggtggaattgcccgacttattcgatttgcccgcttcgggcttcttttcctcccataggatcggctggatggcgcggagtcttcgtttgcggggtgtgcctgtcggtggctcgggtggtgctccggctgtcgaggggtcgttgagcgcgagtttggcccatgtggcgagatccggccatgcggccggatgccggggaacttggtcgagtaagtcccagtgctcgggggcggccatgaggtctgcgagctcgtggggatcgagccgtgggttgatgcgtggcatgctctccgctcctttctcggtaagggctgcggctagtggatgtaggtgatgccggggttctcggcttgctcgcgtgtcagcaggcgtgtccaggcgcggcgttggccaccgccggattcgctgatgaggatggagccgtcctcgtggatttcctcgacgatggcgacgtgcccgtattcgccgctggctcccagcactcctcgctcgaaactcatcacgtcgcccagttggatggtgccgccgatggggtacccgtgtcgctcggcgctggccgcccacatgtagccgtggcccatgtaggggtccgccggtttgccgatctgttgccgtcgggtggcggcccaccaggtgcattggcccacgctgtatgagttgatcgaggccacgggcacgccgctggcgtcgatgtcgatgctggtgccatcgacgaccaagggcgggctaagggcgccgatggtggctccggccgtggccgagcatgagccgccggcgttgatggcgggccgcacttcgtccagatattccttggtgacgttcgggatgtcgggatatttcattaggttgccttcgcccgcgttgtgcgcgatgaccaaggcctccagatcggatagccgggcgaattgcgcgtcggggtggctggccttgagctgtctgacgccttcgagccggttcttgagatatatgccgccgtattgggcgtggatgtttggatcggtgatgccttggggcggggtctggtccgcgccttcgggatgcacgccacgccacacgctgcggttgagctgcaacaggccccaggtgcctccgttgctgtcatcggcatacgcctcgggattgaacccggactcgcggcgcatgagagcggcgatgaaatcagcgcccaatccactggactgggcggcccgttcgacccagggcttggcctgttcgggcacctcggcgacgctggactggcaggtggattgtccgcccacggccacggtcgggataagccacatcaacagactgatcatgagcatgacgatcgcgccgacgaccagcaacggcagaccggcggccgccgacaccgtggccatgaccgccgccttggccgccatcatggaacgggccatagtccgaacgacccattgcgtcgctcgcatcgaggaaccggcgccggaacggactgttcgccgtgctcggccgtctctggctagaacagggcccgtgcgtttccggagtgcgctttgagtcaggatggaacggcctccacgcatgttgccacgacgagctacgcggactttgccgggccgccggctcttgcctcgcggcgatatgactcgggaggcaacggaagcgggagaatggccgagggcttcgccatcagccttatcggtgtcgtcgcttgagatttgcgcttgcagcaaagcggaggtctcctccgttgctctcgccagatggcgcagcgctatccggcttggcccatcggaccggcttggtctggccaacgccggcttggacggctgaccctcgatcttcggggcaagagcggcattgccggagaacggcgggacgtcctcgcccttaagcccgatgggtcggccggcccgcagctttcggggcgctgggccggagggctgcgcggtttggcttgcccgtccgatgggctggggcttgttcatggatgctggtcctcgaatttggtggtgtacagctggtagagcaggctgccggtgtcgagtcgtccgtcgaaggggatgaacgcggtgccggacttggccatgccctgtccgggctggacaccggtgaagaagccacgctgctcgtccgagagtttcagcagatcgcacagggcgtcggcatcggtgggattctggttcatcaacagcaggaagtcgctgttggcgagcatgagccgggcggccggattggtcaacagttcctcgatgttctgggtgatgccggtgggtgacaggccccatttgcgcgcccgcttgtagatgcgcaggaacgtctcggccgcatatgggttggagaacagcaggtggaactcatcgacccacagccacgtgcgccgccccaaggcgcggttgcgcacgacgcggttccacacctgatcgagcacgaccatcagaccgaaggtcttcaattccgcgcccagacccgacacatcgtagaccagcagccggttcgaggtgtccacgttcgtgggatgcgcgaaggcatccagactgccggtggcatagatctccaacgtgcgtgccgcatccacggcctccggctctcccagcccgtccaagcgttccgtcagatcgaccagggtcggcgcgggcctgtcgggcttctcatggtgctcgcggtagagttgcgtgaccgcgcggtcgatcaggctgcgctgggccttgtcgatgccgtcagcgccgccgatcagcgcctcgaccatgttcagcacgctcgcgcttttgccccgaatgggatcgccctcagaatcgtccgagtactcgatgtcgagcgcgttgatgtgattggaggagcgttcgccgatctcgatgcgctggccgccgagcctgtcgcacaggggcgtgaactcatgctcggggttgatgacgatcagatcgtcctgctcgcgcagcaggaacgtctgcgtgatctcgttcttggcggcctggctcttgccgcttcccgtggtgcccaggatgaacccgttaccgttcatgcccagggtgcggtcgatgaccagcgggttgccgctcctggcgttgacgccgtggaacacaccacccggctggcacagctcctggctggtgaaaggaacgagtatcgaggcgctggacgtggtcagggtccgtctcatcggcggcaagggattgcccaggggcagcgccgcgttcaatccctcgacctgcatgtaggtcagggattcggccacgcatgactggccgtccaccgtggcctccacctcgcgcacgacctgcgccaaccgttcgggagtgtcggcggctacgtcgatgaccatgagcgtgtccatgagccggtcgccgttatgctccaggtcacggcgcaattcgctggcctgccccatgctttcctccagatcgtgcggcagtaggtcctcgggcagatgctggcggcggttcctgcgtctctcgtcgatggcctgcatgtccatctccgcgatcttgcggttcaccagccgcaacccctcggccttcgcatggggccgcagatgcacgctcacgatgatgtctgccttgatgtccgtcagggaggcgaccagctggtcggaaagccactcggggaaatcgcgcaccatcaggcattgatgccacacctcgcgcgtgcccgagcacagcttgacccgacgccggtcgcccgtgtcgatggcatacggagccacgcagtccttcgtgcacaggccgcgcgaccgggagaacgcatcctcgtcgaatgtgaaacgcacgccggggcgcagcacccggtgcagcaccttgagccgttccgcgcggttgagtttggagcctcggcagccgccc

SEQ ID NO: 3795 - DNA, 18153 bp, Unknown
  R35_2m  MAG No. k141_3308
ccagacgctggtgatgacgatggtcgccctgcttggattcgttctgggccgggcccgcgcctcctcggacgaggcgcggcgcgcgttgctgcacgcgcaggacagggcgcgcgaatcctcgcgggccactcgttcgcgcatcgccgacatcgatgaggaacgcgcccagtcgattcgcatggcgaccctcggtgaacgcacacgtatcgcccgggagatccacgacaatgtgggccatctgttgacccgcgcgatcatgcaggcgcaggccggcaggacggtggccgaggcgacgaacgatacggtcgccgcgcaagggttcgccacgttgggtgcgacgttggatgatgcgatgacgatggtgcgccgttcggtgcatgatcttgaggatgacggcactgatttcgccgcgcagatcgatgatgccgtcacgtcgttcgacggcatctcccccggtttcgccgtgacgctggccaacgacatcgccaaggcgcccgcgccggtctcgcgctgtttcgcgaccgtgattcgcgaggcattgtcgaacgtggtgcatcatagtgcggcgcgcgaggcgagcgtgacgttgcgcgacttccccgcgttctggcagttggtcattcaggatccggggccggccgtgtccgagtccgatgggtcccggacggccgctgcccgcccgcgtgcgatgcgtgccacgctcgtcggctcgcgactcgccgccgacagtgttgccgatatgcgcggttcggccgatgagctgatgcgcggcatgggtttggcggatatcgaatcgcgcgtgcgcgcccttggcggcactgcggtctgcgggccgtatgagggcggctggcgtgtgttcgtatccgtgccgaagaagcgttggaccatggaatcgagggattgatgagaatcgcaatcgtggatgatgatccgatcgtctgccagtcgttggagacgattctgacggccaccggcacggccgaggtgctatggacggcaaatgacggcgacgccgccgtgcgccgttatttcgagacgccggcgagccgaccggacgtactgctgatcgatattcagatgcccggcaccagcggtttggatgccgcgcgcgagattctgtccacggacccggccgcgcgcatactgttcctgaccacgtttgcggaccagtcgtatatcgcgcaggcgatggggcttggcgccaagggctatctcatcaaacaggatgtggcggcggtcgggcctgcgctgcaggcggtgatggccggtcaggtggtgctcggcgcggaagtgctcggcaagctcaccgaacggactccgaatcctgccgattccgacgattccagagataccgccgattccatcgagggcctgcttggcgagcgtgagcgtgagatcaccgcgctggtcgccgagggcctcgataaccgcgacatcgccgccagactgttcctgagcgaaggcacggtccgcaatcgcatcagcgcgatactggacaagctcggcctgaccaaccgcacccaactcgccatcctctggctcaacgcccatcggtgaggggcctttggtcaagtaggtctctctccgtcatcgcttcgcgatgccacctcgaacgcgattcaggacagcttgcagctgacctcttattcgctcgttgtcactcacccttgcctaaaaacacctccggcgttttcttcacggctcggctcatcagagggaggttgtgaaaaaccaacctcagctgtttttcatgacgatactgtcgatggtgttggccacgcgctcgcagtcgtcggagcactgttcgaggtgacggtacacgtcatgccaggcgaacacctgcagcggatcggtgcaggtggtgtgcagcgtgcgcatcgactcgatgaacaggtggtcggcgtccgtttcgatcgtgttgatggcgaacaccagttcgcgcaacgtcttggaatgccggaatcgcggcagttcgttgaccagctcacagatgctttccgtggcacgcactaccatatccgacatctggaccgcatcgtcgcgcatgtcggtcacattgtcgtagtacatgcggttgagcacaccttcgatgctgtcggtcacatcgtcgagcacgtggccaagctcgtcgatgtcctcacggtcgaacggcgtgatgaacgcggtcaccagttcgtccatcatgtcgtggcgcacctcgtccgccgacttctcaatcgcgtgcatgctgtccatgcgttcgcgcagctggtccggattgaagtcgtgcatgacctcggacagcagcttcgcggcctggcatgcgtagtccgcgctgcggcggaacccgtcgaagtagaacacgtctttttgtctcgccatgatgggtggattcctttctagaacacgaccatgaacagtttggccattacgaagctgatgagaccgcaaccggggaaggtgaacacccaggtgagcatcatgtcgcgcaccacgccgaagttgatggcggagaggcggcgtaccgcgcccacgcccatgatggcgctgcacaggatcatgagccagaccagaatcatcacaccggtcacgctgggttggccattgcagaacgccatgccgaggaacagcacgccgatgaacttctggccgtcctgcgcgccatgcataaagctcatggccgccgcgcccacgatctgcgcgtaggtgaagaacccgttggcgcggcggcggtccatgccagcgcaaatcagggtcacggccttgcacaccaaccaacggaacgggggcagactcatactttgcttcgatatgctcgtcgacatttcccgccatctgccgaggattcggtcatgcgtgtgcgaaaatggacacggtgtcaatcaggaggtgcacagtggttgtaagcacggattcgagccgcacaatgcccgattgggtgaagtacggggtgttctggcacgtgtatccgctgggcttctgcggtgccgatatcaggcccgtcggcccgcgccagttccatggccgcggccttgacgcgatgatcccttggctggagtacgtgcgcgatctaggcgcgtccggcctgctgctgggtccggtgttcgagtcggcgacgcatggatacgacacgctcgaccatatgcacatcgatgtgcgattgggcggggatgccgcgttcgaccagctgattgcggcctgccgggacatgggattgcaggtggtgctggatggcgtgttcaatcatgtgagccgcgatcatccggccgtccgggcggcgcttgacgagaccgccggacgcttgaatccggccgacaacccgtggcatggtctggtccgcgcgcatgtcggtgataatgacgaacccgctttggatgtgttcgagggacacggggatctggtggcgctggaccattcggctgacgagaccgttgactatgtggtccatgtgatgagccattggctggatcgcggagccgccggctggcgcctcgacgccgcgtatgccgtgccgagcccgttctgggcgcgcgtgttgccgcaggtcaaagccgcacacccgtattcgtggattttcggtgaggtgatccatggcgattacccgcgcatcatcgaggaatccacgatggattcgatcacgcaatacgagctatggaagtcgatccagcatgcgctggagacggagaacttcttcgagctggattggaatctcaagcggcacaacgcgttcctggattccttcgtgccgcagacgttcatcggcaaccatgacgtgacgcgtatcgcatcgcagattggcccggccaaggcggcgttggcattggcggtgctcatgacggtcggcggcgtgccaagcatctattacggcgacgagcagggctatgtgggcgtcaagcaagagcgtttcggcggcgatgacgacgtacgtccgaagttccccgactcccctgccgaactgtccacgctgggagagccgacataccggctgcatcaggcgctgatcgcgctgcgccgtcgcaacccatggctgatggatgcgcgtaccgaggccgtgaagctggaaaacaagcacttcgtctatcgttcgacgagcgccgacgcccagcattccctgaccgtggacctcaacatcgagcaatcccccaccttcaccatccacaacgccgacggcagtacagcgtatcaatactgagctacctcatcagagggagctcaccatttaccgccgaatgccacgaatcagcaggtcgagcaggtaaccgtacgaccggtcaacccgttcgcggcctcgtgtgcggggttgggcggaacgcagttcgaattggatgaacccgtgtatggacacccagatggaggatgcaatcaggtgggggtcatcgtcacggaacacggtcgccgcctggccgtatcgaatgatctgcgtgatggcttccaggcaatgctgggccgagtccgacgcctgccccatccagaccagcgtgtaaataccgggggcgtccagcgcgtgttcgcggtagatcatgcccgccctgcgaaggcgcagcacggggtcggattcgtcaatggcgatgagctgttcgcgcagatcggtgaagtatgcgtcgatgagcgcatcggacaccgcctgcttgccgccgatgtgctggtagatgctggtgggcgacacgtcggcctgcgcggacagcgtacggatggttagaccgtccacgccgtcccgttccacgatctgcctcgccgcgtcaagaattcttccgcggatttcaagggttggcgtgcgtctggatcggggctgcgattgcgtcatatccgttattctagggtgcgtacaggccattaccgccgttttggcatggccacgatcgcaacgaccgcggcgataagtgcaatcgtcatggccgccaggcagacgctgtgcagcccgtccatgaacgcggatgcgaccgagtcatccagcaatctgcgcggggtgcccggcagggagctggagatggattcggcagccatcacggattccttggatacgccaaggatgccctggggcaggtgggatccccgcagcgcgtccgtcaggccggtggtgtacgcaccggcctgcagcgaccccatgatgccgacgccgagcgttccaccgagttcgcggatcgtgtcgttgacggcactgcccataccctcctcgccaaccggcacggccgtcatcagcgcgtcggtggcgggaccctggacgagggcgatgcctgcggccatcactgccatgacgaccgcgaacggcagtgtggcaatcgccgtctcgagcgccgaacacccacgcagcgcctggaaccattgggttgtgaggaagatgaaaccgaacaggcacaggaaggcggcgcaaatggccagcatgccgatgacggcgcacacccagaacacgctatcccatgcgaaccgttgcagcaggatgccgccgatgaccgggccgagcactatgcccaccccggatatgccggcccacagtccgacggccagcccacgcataggcgatccgtcgaacaacccgatgatggatggcagcgtggctcccatcaagttgtgtattaatataacatatttatgaaacaatgatacacatcatgtcgggaacaggcatccgcatcgaaaacaccgacctacaacacaatcaggcccggcgaccatcaaaggtcgtcgggcctgattcatacgcgctgtcggactaacggcgtccggacttcatacggaatggcgcattgttgcgattcttcttggaatggcggcggttcgggccttccgtgttgccgtatttggcgatcatgcggcgttcgtgacgcttggcaccttctgaacgctcgtcgcgtacgatgcggttctcgttcttgcgatggatgcgcttgtcgaattttccgcccttgccgtaccgatcattgcgacggttcttgccgtactcgttgcggccatcgtcctggcgctcgtcgtaacggtttttgccgtatccgccgcgacggccgcccttacggcggtcatcgccatgctcgaacagatagtcgcggcgctcggcctcggggttgctcatgccggcgcggcgttccgcacggttgcggttcttcttcacggccttcttgctggccttgtcgccgtgcttgcgctgcggctcgccttcggcaacaaactcgccgcctgcgttctcgtgctggaatccggtctcggcaacgttctgctcggcgcggtcgcgattgcgattgtgcttgcgcctgccgctgcggccggactcatcgcccgccgcgttcttggcgcccctgttcttgcccttgcgcgggttgcccacgggctgcgacttgtcgaggctccaaccatccacgcgctcggcgcggtcgcccacaagctcaagcacttcgggcgaatcgtgggtcacttcgatcatcttggttttgatgccggcctggttcagcaagcggcgcgcctcgcggcgctgctcgggcagcacgagggtgaccacgtcgcccgccttgccggcgcgggcggtacggccggagcggtgtacaaaggacttcgggtcagccggcggctcgacctgcaccacaagctccacgccgccgacgtctatgccacgggcggccacgtcagtggccaccatgacgcgcacgtcgccggaatcgaatgcggcgaggttgcgatcacgctggttctggttcaggttgccgtgcagctcggcggccggaatgccgttctgcgtcaggttcttggcgagcttcttggcctggaacttggtgcgggtgaacaggatgcgacggccttcgcccgaggcgagcacgcgcacgagttcgtgcttgtcgccgcgcgtggtctcgaacacgtggtgggtcatcaggtcaggttcggtggtggccgaatcgacctcgtgcaccttgggatcatgcaggaaggtgttcaccacttcatccacgccgtgatcgagcgtggcggagaacagcatgtgctgggcgtcgggcgaaatctgctcaagcagtcgcttgaccggcggcaggaagcccatatcggccatttcatcggcctcatcgatgaccacgacttcgacggacgagagcgtgagcgcctgctggcgcagcaggtcctcaaggcggcccgggcaggcgaccacgatatcggcgccggccttcagatcgcggatctggtggatgtacttgacgccaccgtacaccgtggtggtgttcatgccgaacgtgtgggccagcggcatcagcacgtcgttgatctggttcgcgagctcgcgggtgggggccagcaccaggccgcgcgggtgcggcaggaaatcgtcagcgcggcgctcttccaagctggccttcttgcgacgcttgatttccttgcggaactcctccatcgcgatttcgccaagcgaatcataggagccaagccgggtgaccagcggaatggagaaggcgagggttttgccggagccggtgcgccctcggccgagaatgtcgcggccggccagtgaatcgggcagggtgtcggcctgaatggggaatgcggtcttcttgtcatctgccgcaagtacgcgcaccagcggtccgggtacgccaagttcgccaaaggtaagggggcgggattccgcgctgtcgttcatctggaaatcagcggaatcgtcacgatcatcgaaattattacggggcacagtggcctttcatgtcaaaggttacgcaaattacgcaagctttccgagcttagcgtaagccccctactttgcttgatgctcgccacgctgtcatcccactctttacttatgaccccatggggcggtaactcgcccatgaggcggtaacttgcccatgaggcggtttgaagaaattgtgaaaccgcagaataaagccattttcacctaccgccccatgagggttttaccgccccatgggatgtttgccgccccatgggccaattaccgccccatgggttctaccaccacgtaaggcgagcaccgccccatggaacacgcaaatggcccctacccgtgaaggtaggagccattgtgcaaaagggctgagccacaatacggcccagtagccctaaaacacactacaaaatatccggatcgtctttggcgatagtgccggttgccttgccaatggccttcaggccgtggtaggccacaagaatcacgatcgtgccaatggcaatgccgttgaaggaaatgccaccaacagtgaacgcgaattggccgatggcaataatcatggtgatggctgccaccatgatgttcagcggcttgtcgaagttgaccttgttctcaacccagatgcggatgccgatcatgccgatcatgccgtacagcagcgtggtcacgccgccgagcactccggcggggatcgtgttgatcacggcgccgaacttcgggcacaggctcaggatcagggcgaaggcggctgcacaccagtaggcggcggtggagtacaccttggtggcggccatcacgccgatgttctcgccgtaggtggtggtgccggagccgccgccgaagccggcgagcgtggtgcccaggccgtcggccatgagggcggtgccgatctggttgtcgtagtcgcggccggtcatctgggccacggacttgacatggccgacgttctcagccacaagcacgagcacaacagggacgaacatgggaaggatggaaaaatcggcctgcggcaggtggaacttcgggaagccgatccatgcggcgtcaccgatggcggagaagtcgacctggccgcggatgcaggcatatacatagccgatgattacgccgaccaaaatgttgaggcgacccagcaagcccttgaacagcacggccacgagcagcacggccagcagggtaaccagtgcggtgtccggcgcggcttggaagttggtccacacggaaggtgccagattgaaaccgatgatggccacaatcgcgccgttgaccacgggcggcatgatgatgtcgatccatttggagccggcgtaatgcacgagcacgccaatcagggccagcagaataccggtgaccatgatgccgaagctggcgaccgcaatgcccttgttggcggtggtgaccgcggtgatcggtgcgatgaagccgaaggacgagcccaaatagctcggcagcacgttcctgttgataagcaggaacagtgcggtggacatagccgtgaagaacagggtggtggacgggtcgaagcccgtcagaatcggcaccaggaaggtggcaccgaacatggcgatgacgtgctgtgcgccgataccggcggtgcgcacccaagtcagacgttcatcgggctcgacgacctcgccgggcgccagcgtcttgccgtcgccatgcaattgccattggaagatattggacattactactctcctcgctctcgcttggggcacggcattcacaaccagccgcactacgcgccattctagctcacgaagattttgtgaagtctctcttccgggaaaggctatttgccgtaatactccagcaggtgcggatcgacggcctgcaccacatccaccaaatcgccattggacaggtacgggcgcttgaattcgcgccacggctccaccttgacctcccagcggccggtcgtctcgtcgagcacgggccgggcggtctgctcccagcgcacacgcttggaggtgcggccggtttccgggtcgcggcgcgtgtagtgcaggcaggtgcagttggtgatcttccagtcgtccgagtcggcgcgatgcaggaattcctcgtcggccagatcctcgatggtgagcatcagggcgagcatgaagtcgccgtgggtgaccatgaccacggattccgaatcggatttgcggctcagcgaggtcaggatgttgtgcacacggtcctcggccacatcggcaatcgactcgcctgccggcggacgccagtacagcggatcagtgttcttgaagttccagttgcgtgcgtagttgtttttgaattcgtccttggtgatggtgttgatttcaccccaagaacgttcgcgcagcacacggttctcctcccatttggccttgggcagggccatggtggctgcggtttcgcgggtgcgcacgtatggcgagaccatgtaacggtcgaacagctgctgctggctgaccagccaacgaccgatgcagtcggcctgcttgcgtccggtggcggtgagtctccaggagcggtcgggtacggtgacgttgtcctgcgtatacagggagttgtcgccctgttcgcccgcctggacgatgacgttcgcttcggattcgccatgccggattacgtatagatcgagcggcatgctcatatggattcctctttcgttattggttacgttgtgttgttttctgctgtttcctacttgacctgcgtaatggtgttccccttgaccatgaacgcatgccgggccatgtcgatcatcggctgatcgaacttggagtcggtgtagaactcgtcgatgacggcgtccggaccgtacagttcgcggaaccgtttggtcttgttggtgttgaagttgaggtacgtgaccttcatcgtctccacatccacctcgctggccacgagattcctcacgccgagtctgcggcaggcctcctccaccgtcagaccgaaggatgcggtgaggatcacatcgtccgactcaggctggtaccaaggcttgatacgtgcgtaatatcggtcccagaaatcgtccacgagctgttcgacgctcgccacccgtttggatcggctcagttccgtgagatagccttcggtcatcttgcccacgccgtattccatttgttcaagcgtggcccggccaagcttgtatttgaccgcgtaccgcagcacgggggcgatatagcggaacactttcgggtcgtggcgggcggaatacaggtacaagtcgaacaggctttcgccatcatagatggttccgtcgaaatcgaatacgcgcataccttctgcttctactctgttattccttgtctaaggctaatctcggtaagccggcgaaagcgcaaatacgcagtgaatttcacatgaacactgttttttggattgatttcggtacaggtaacgtacactggtgacagcgtggaaggaggtgcgtaatggcgacgtctgaaatcgaacaatggtggattgataagtttcaggagaacctgggtccgattcgcaaggtagccggatggacgactcagcaactggccgacgagctgggagtcgcgcgacagacggtgtctaacttggagaccggcaaaagcccgatgaccaagctgcagtatctcgctttacgtacggtgttcagcgccgaaatcgcacgtcgtgaagaccgcgatctggcacgcatcatcaagactttggtcgacgatcccattgagcaacgcattcgcgaacggcgcgcccaagagcaggacggcgaggccgttgccgacaatgccccagtcaatacggacggtggcaacgttgccgacaacgccgccaccgagaaacgcaagcccagtgccaccacattgaaggcttcaaagactgccgcaacaggcaagcccacgctcagcacggcgatgcaggctctcgccgtcatcaccggcgcattggccagtggaaccgccgccggcatcatcacttacttgatgttcccggacggcggcccgaacaagcgctgagtcgccgaaatatcgaatccgttactcgcaggccacgccatcgtgatcgcggtccaacttgccgttgtatccaggctgcccttgatacaacggagcagcaccagccgcacggacttcagagcaattcgcataatgcacattttgctgcgcttgctgttgctgttgtgcctgtcgagcggcctcctcagcttgccgctgggcctcggcctgcgcggcaacctgttcttcagcggcctttcttgcagcctcttcttcagctgccttcttggcggctgcctcttcagctgccttcttggcggctgcctcttcagctgctttcttggcggctgcctcttcagctgctttcttctcctcagctaccttcttcgcttcttcctcctgcgctatatcgctggctttacgaacattgataacaggcttgtccccatcttccacggattggacaacccagttcgaagctctgagcaccattttatccgtgtcgcttttcacctcataatcagaggaggaaaaaccggcatccttgagctcgtctttcacatcggccagcgaacgccctttcttggcgatggcgacaattttcgaatatgtggattcctccttgccgtccgcaccgtcagaagaccccgagcatccagcaagcacaagacccagaaccatcataagaatcacggtcaacgcccaaaccgcacgattgacacgcttcatgttcccgaaacgaaccctgttgttcaacattattctctcccttgtagtcgcagatctgcggatggtcggaaccacgtcaatgtgaatccaaccatcctgataattactgcttattcaatgatatattcatccattgttttcgccgatatatcgcaccagcgtttccctcattatcaactatttcgagttgcatgaatgcgccgtttataggccaagaatttcgtgcttttttgcatcaaattcttcttgggagagaatgccgatatcaaccaattccttcaattttttcatcgcctcgacttgttcttccacagacatggatgccgtgtgagaggcgggagcagcggcttccggtgccggcgcaggcgccggcgcttgaaccggggcggccgtcataggattaatggcttgtgccatattcatgcccagcaacatgccaccatcgccaaagccgttgtcttggatgccttgcgcaatgcgctgctgggcagccatattgccagcttgctgggaaacgccctcgtatgcggcaacattcatcttattcgaggcgaactgctgcacgagttgacgtgattgctcggtgaactcgatactttcgatgcccacactggacacttcaaagccaaaacgatcattccacgtacctgcattggcccgatcgccacgcacgcatgccgcgatgtcattcgccttgccgggcaattgcgaaatacgatattcattggacagcaaattgatggccacaataaatgactgtacgaattcagacagaatctgcctacgtggcccttcatcatcgaatgaatacgacacggtagtggcaggcacaaagttacgaacgaatcgaactggatcagcgacctttagcgacatggatccgcgtgcgcgaatttccaaatcgacgccatagaaccggtcgttatacaccagcggcgcagaagtgccgaatttgatgccacgaatctcacgcaggttgacgaaggccacatatttggtgcggccaggctggcctccgaaggtgaatcgatcggcaacctgattgaagaacgatccgatgccgtctccggcgagcacactctgctccccgttgcgatattcataaccgcccgactcggtgatgacgttttcgatacctgtttcagagaaaatgaacgccgcagtattctctggcacatagatacgcgaaccattggtgattattccctcggaaccgtattcattcgaaccgcgatcgttgttgcttccgcggggaatgcccggcacaacgacggtgtgttccgtgaacggaccagcggtgatgatatcacgccacaggtccgcgaatgtaccgccgagcgcgccggcgaacgccttaataactgccatctgtttttcctcgatatctcatgcatatggccgatcttgcgactatgcaatcgcaagaccggccgttatgctggcatgttggttatagctgcgtttcgcgatcgcagtattcgcatcgaacgacttctttgcgatgaccggaaagcggagcgccacaaccttcgcaattcaccgaaaccacgggttcggtaatcccaagcccactacggaatgcgccaaaagtgtccttcagcgccccggccagagcctccgttccggggatggccttgttgaaggccggctcatccattggcgtatactgtctgccgcgtatacccatataccgtcatcgttcctttcttggaaaaccgtcacctcgatacgccagtctgatcactggcccaccgatgcgagcttctgcatgcatcgagtcatgacctcggtgtagtaggccgaatcctcactgctgagggagttttcgtcaatggcgtctaccttctgggagaactcagagtaacgcttcatcatgctggcatagtcggtagccatgctgaccacgttgtcggatttctgatatttgttcatgaaggcaacatactcatcgataaaggcctcgtagctgtccatcgtggccttgaagtcagcactgtcattggtgttctgctgcgccttctgatccgaagactggtcgctctgcttgttggcatcgctggaatcagtgcccgtatcagtgctcttatcatcctgcttcgcggcgtcgccgtccgtagacgtatcttccttcttttccggaacctggatagtgatggacatgatggtctcatcgtcagtgttacgagaaacgctcacactgtatccatcggcgttcttggcattgaaactgtcagcggacttgctatagtccacggtgaaaccgttgtcttgcacggacttgacgtagtcggcatactgcttggcgtcggtaccgcacacctcgatggagaaatagtccgaagactcgcttctaatttcaccctttgtggatttcggctgcggcagcagcgccgcgatatccgactccggccatgaatatgcttcgcacttggtggcgagcgatgcttccaattccgcccgatcagccttggccttcgcaccgtcacgaattacgaacacgccaccgattaccagacccacaacggtgataccgactgccacccaggccagcactcggccttgcaccttgccactcgggcgggtcacgtatacggcgaagcctgagagcagtgccggaatcaccgtggcgaacagcagtccgccccaggatcggccagaaacatccacaaattgggcgagtacgaacaacactccccaaataatggcgaacacagccagcttggaagtcttcttcaccccttgtgcattcggagcaagcacggcaggcgcagcggcaccagcaaaaccagtggcagcaccggcaccatgtgtggcgggtgcaggagccacaccaatacgcttgtccagagcggcgaggaactcatcaacgcgcttggcgctttcgtttccagtcgcctccagacgaatggcggcccctgccgcaccctgcgggactacggttagcgtgcagttcaccccatcataggagtggaaggaaaacgctccggtctgggtgttttcgttatccaaggtaaacgtggcgccagtagtcagctggtcgtgaataacttggaacagctgttgcggactgaccgcatatacacgatcaaatggcgcgccggcgggccgctgcgatgccgtagccggagtcatcggagtggtggtagcaccatcagacgctacgttcggttggccagccggtacagtattcggcacggtaggcgcattcgcgcgatcttccggtgcgtcattcgtgccttcggacggtggaaccggctgaggttgttgatcaaatggcgttgtcatgatgcccttctttccttaagcagtagcattaccagcacagaagaggcaagcccggcaaccgttacggtcaatccgactgccatggcaagccggtatcgttcgctcatcattgcgtcccttcttattgctcgctttgctctgcgatacatcgaaaccagtgtatggcgttgttattatgtacgcaaattagcattttgtatgcctgttagctttattgtcgatgcttgataccgcgcatgaacatcctttccgccaccgcacctacacggatggcatcgaccattgtcggcgacacgcgcgggccatacatcagctgacaactgaatttttcggcgtgtttccgaaaagtcggcgtcctgtacgctgggaatcgagcaaccgcgtacgatggcgcagcacagcacccgcaacacagcgacaaggagcatgggcaatggcagacatccccgaagaacatttgaccgaggaactgttggatcggctgcccgccagcgccagcattgagcagtatctcgatgagggactcgtcagcgcacgcacgctgaccgactatctgttcgaccgtatggaagcccatgacctgagacgagccgacgtggtgcgggcatccggcctcaacgccacagtggtttatgacattttctccggcaaaagccgccccggccgagatcacgccattatgctggcttttggtctcaagtgcacattacgtgaaacccaacggctacttcgtcttgcaggcgtttccgaactgtggtgcaaacagcgacgcgacgcgattatcatctggtgtatacgcaatggattcgaccgcattgccacggacgacgagttgtatcgtatgggagagacgacgttgctaccggccgattgacgacattcggcccaacaacactcaccagtgagacgcaagtaagagggcatcaaggagagacatggacgataagcaggcgatgcatgcgatgagcatcgacgatgcgtaccatgtcgagcgtacgctcgctcgcggaccttccggcgtcaccgaactggtgagcattgacggcaacggcccgttcgtacgcaagaagattccctctcccctagcgcaacgcaatgtgtgggcggcgctcagcgcttgccagagtaatcgtctgccgcgtgtggaagcgacgtacgagctgcccgaccggttcgtcatcgtctacgattacgtgccgggcagcacgcttgcgcaaattgcggaggaaaacgggcggcttgcaccgaatgtggccgtgcagcttatcgaccaaatttgcgaagccgtgcaggagcttcaccagcacggcgttatccaccgcgacatcacgccggccaacgtcatcgtggcccaggatggcgcgcatctcatcgatttcggcatcgcgcgcatccggtcagaggcaagcaaccgttcacgggataccacggcgcttggcacctacggattcgcctcgcctgagcaatatggctttgccaaaaccgacgcgcgttccgacgtattctcgctgggccggctactcggattcatgctgaccggcgtatatcccgatgccagcgactacgagcagcgacttgccgatgatgccgcagtaccggctcgactacgcgccgtcatcggctatgcgtgcgcattcgagcccagcaaacggccacagagcgtccaagagtttcgccaggcgctgttctcccagtccaatccgcccataccgaacgcatcatcggcaaatccgccatcaacgagaacaacgaacggcagcgcgtcggcgtctcgactattccggcgtctgcacttgagcaaacgcgccatcgtgctgtggtccattgccggagcggcactgataatcgccgccattgcgggaggcattgtgttggcaggccaacttggcattatcgggtcggcaacatcacccgattcctcgacacaatccagcagccaatcaaccgataaggccgatggcgggcactcctcgaacgggtcaggaaccgacaatgccaatggcacgggcggagtaggcggcactgacggcgctgatggagacaatcaagacaccgtcaccgacaatcctctgaaaatagtggaatccggctggtcggcggaccagcaagggtatgtccactacgctttcgccctgcgcaacaccagtaagacccagcaggtgcagtatccgcagattaccattacggggcgggccaaagacggttccatcgtgttctcgcagacgcaagcactgaatatggcattcccgaatcagactgtatatgacgccggtcaagcaggcgaaggcaccgtcccagaaacggttgattttactgtgctcaatccggatacatacaacgtcgccaaggctcagggaaccgccgccttccccatcagtggaatatccaaaatagacaacagggacggcggcacgacgttcaatggcgaggtccgcgccgtggcagatggattcaagccatctgatggacagcaaatcaagatttccctagtactgcgtaacgcacagaacgcaatcatctatggagatatcgcattcgtggattggccgg

SEQ ID NO: 3796 - DNA, 20759 bp, Unknown
  R35_2m  MAG No. k141_3315
aaataatcatttagccgattgttgagatcgatcttgtcatcaagaacatttagcagttccgcaactttgctttgttctccgcgggaagggagctgcacaggcatgttgcgaatatcggcaacattaatatgcgacacagttgcgccattggccaatcgcaacattctgtcacgctgttcaggagcattcagataataattcagatattcgggaaccacgaaagacgaatcgggtcgaagaagcattgtcctttgtcccaaacaaacctcaatcccaggtgggacgatagctacatttccggctggtgcttcacgtgcaagaatcagatcaccctgccttggtacagctcgggagacacgtctctcgtatacgtcttgggagaccctgtgaacatcagtcagaatcaatcttccgcgcccaacattaggtgttcggatgagtggatatcccaccccttcatccttagcgctggtatgtggacaatcgacaatcaactcgcagacgtcctgcagtgtcacctgctcacatgccatagccgatggcctccagattcttcttgatctgctcttgcagacggttggattcctcgaagcatttggcgatctcgccggtcagacgggtcatcttctcctcgaatggctcatcgtcttcttccacttcggcgacaccgacgtaacggcctggagtcaggatgtaatcctgcgccttgatatcttccgtcgtggcgatggcggagaagcccttctccgtttccagagtgccgtcacggaacgcgtcgaacgcagtcgataccttggcgatgtcctcatcggtaaactcgcggagcctgcgggacaccatggttcccatatcgcgcgcgtcgatgaacaacgtcttgccggactgcttcttgttcttggtgatgatccacaggctcacaggtataccggtgctgtagaaaagcttgtccggcattgcgatgatgccttcgaccagatcggcatccacgatcttggcgcggatctcgccctcgttgttcgtctgactggacaacgcgccgttcgccagaaccatgcccatgcggcctaaacggttgaggtggtggatcatgtgctggacccatgcgaagttggcgttgccctccggtggggtgccgtactgccagcgtacgtcgttctcgagtttctttcctccccagtccttcaggttgaagggcgggttagcgaggatgaaatcgaatttctcggtcttgtgcaggtcctcgaagaatgtgtcggcattatgatcgcccagatccgcgtcgatgccgcggatcgcgaggttcatagtcgccatcttccacgtggtcggattggactcctggccgtacacggagatgtcgttgatgttgccctgatggcgtttgacgaagtccgcggactgtacgaacatgccgccgctgccgcagcacggatcgtacactcgcccgtggtagggttcgatgacttcgaccagcgtcttcacgacgcacgcgggtgtgtagaactcgccggcgttcttgccctccgcttcggcgaacttggccagacagtactcgtaggtgcgtccgagaatgtcgcggctatcgcccttttcggccatcttcacattggtgaacaggtccacgacctcgcccagacgtcgcttgtcgagctcctggcgtgcgaagttcttcggcaggatgcccttgagcttgttgttctcggcttcgatctggcgcatggcctcgtcgatgaccttgccgatctcaggcgtgtgcgcggccgctgcgatggtcttccagcgggcgttctcgggaacgaagaagatgttctcgctcgcgtattcgtcgcggtcctcctcgaagccctcgccctcctcaacgagttcctggtatttctggtcgaacttgtcggagatgtacttcaggaagatgaggccgagcacgacgttcttgtattcggaagcgtcgatgttgccgcgcagcttgtcggcggcgctccagatctgttcctcgaagccgatctcggcggtattgtccttcttctttgccatgtcttgtattatcctcctgctcatcctattcgctgatcttggtgtcggcccacagctcgcactgttccatgacggtcttcatggcgtcctcgacgccttcgggcggatacttgtatttgcgcagcaaacgtttgatggcacgccgcatgccggccctggcgctttccttcttctgccagtcgatcgtggcgttgctccgcatcgcatcggtcagctcgcgggctatcgagacaagctggtcgttgtcgtagaagtccttgaccgcctgcggctgggtgattgcgtcgtagaacgccatctcctcgtcgctcaagccgagcttctgcgcgtcgtcgcggtccttcatgatctccttggccatgttgacgagctcttcgatgacctgcgcgttagtgagcatgccgttgagatacgcgttcaacgtgttctggagcatctcgctgaacttctgggacttgaccacgctggtgcgcccgtacgcccgcaccttctccttgatgaggcgtttcaggctctcgatcgcgatgttcttctccttcatgccggcgacctcctggaggaacgcctcatcgaacagggagatctccacgctgtccttctcgaacaggttgagcacgccgtccgcatgcacgctctgctggaggatctcgctcacctgcttgttgaactccgtgtacgtcatgccgccgcccccgccggagccacgtccggtcaggcgaaggacctgcacgcgcaatacggataggtaagccgcctcatgcgcgtcctcttcgcttaccatgcttttgcacaggctcagcgcctggttcatgagctggcattgcttgaggaacgattccgtgtcttcgtgccgttccggatcgagcagccagtcggttccttccgcgatggcgtcggcaagcgcctccctgctgttctggaagatgagtttgcggtagtcgaagccgtacatgagatcacggcacacgtcgagcttttcgaggaatttcggataggcggtctcagcgatgttcatgtcgccgtaattgtgctggtcacggctggtatagtccttcatcgcccgcttgagcgcgcctgcgatgccgatgtaatccacgaccagaccgccctccttgcccttgcacacgcggttgacgcgggcgatggcctgcatgaggttatggcccttcatcggcttgaacacgtacatggtggacaggctgggcacgtcgaagccggtgagccacatgtccacgacgatggcgatcttgagggaatcggaatcgtccttgaacctgcgttccatctccttcttgtgcgtggtgccgccgcacacgtcgaaccattcctccggatcctggttcgacatggtcatcaccacgccgaccttgtctttccattcggggcgcagctccatgatcctgtagtagatcttcatcgcaatcggccggctgtacgccacgatcagggccttgccggccaggacgtcggcgcggttgttctcgtaatggtccacgatgtcgcggcacaatgcgtcgatggtttcaggagtgtcgaagatggcatcgaggccgccgaggtcatgcttggacttctccacgctcgcctcgtcggcctggtccgcgaactccttgtagaccgcgtcgatgcggcccagcgcgttctcgtcaagatggagcgagaccacacggctttcgtagtagaccggcttggtggactcgtcctcgacggactgggtcatgtcgtacacgtcgatgtagtcgccgaagatctcgcgggtgttgcggtcatccgtggagatcggcgttccggtgaaaccgatataggacgcgttcggcagtgccttgcgcacgacacgggccgcgccgaccgacacatgaccgtccgcgttgatccgttcggtcaggccgtactggccgcggtgagcctcgtccaccatcaccacaacgttgctccggtcgcacaacggctcgtcgccgtccgagaacttctgcatggtcgtgaagatgatgccgttcgcctcacgaccctcaagcagttcctgaagattcctgcggctctcggcctggaccgccttctggcgcaggaacctggcgcagcggctgaattgtccgaaaagctggtcgtcgagatcgttgcggtcggtgatgaccacgatggtcgggctttcaagataacgctgcagcagatgtgcgaagaacaccatcgaaagcgattttccgcttccctgggtgtgccagaacacgccgatcctgccatccccattgacggcctcttccgctctgacgatggctttccgcaccgcgaaatactggtggtatgcggcgatgatcttcacgaccttctcggaggaatcgttgaagcatacgaagttttggatgatgtcgagcagccgttccttcgggagcatgccgtcaatcatggtgctccatgccgcggctttcgttccggaatagtcgccgtccgccgacttccaagccacgtaacggtcctcgtcggatgtgatcgtgccgaccctggtctgggtcatatcgctcatcacgcagaacacgttgggcacgaacatgctcggtatctgcttcatgtactggcgcaattgcaggtacgcgtgtgaagcgtccgtctcctctctcgacggggacttcagctcgaacaacaccaacggcatgccgttcacgaaaatgatgacatcgggacgtttctcggaatactccacgaacgtccactggttcacgacatggaaatcgttgttctcgggatcgtcgaaatcaagcagccggacgatgtcatcacgctcttccttgccgtcaaagaagtgcacttcgactcctgattgcaggtagtcattgaatatctcgttgcgctgctccaagctgccgatctcgacattctgaatcttccggatggcctcctcgacggctgcttccggcagatttctgttgattcgtcgcaacgcatccgggagaatatcaggaaggaatacgtcgcgatacgagtcgtcggtgcggcgaacatcgggcccgtacaggtgctcatatccgagtttctccgttagatgttcgacgatcagattttcgtaccattcctcgttcagtggatccatggacgtgatgttgttcagagaacactccgagaccgtacgagattcgactttggaaacagccattgcttaccccacaaacatatggattctcaagcaaaccacttttcggttagtctatcaaccagcctatcgttcgggtgtaatcaacatggttgtccatggctattttccggcttccatttaagattttcgcgtcgccgcatggcggaacacgtctagtccatcaagccggtggacaataagcgtccggctgggagcacgcccgtaatcgtaattgtcgtccgcgagcgacagaaaagacctaaagatttctgggagatggcgttgaaatcgtatctcacgccggatggattgctgccgaacaggacatgcgtcgccactcgaaccaatcaagatacaactgcaagtacctcgtgctcacccccacgaaagcccgacatggagccctcaaggttcgagtggagagcgctcatcctgttggcaaattatcaggtatgagatgcccgtggatgagtcaggtcaccgataccgtctttcactgaatcggcgtatcaaggtgtcgcagcatccatccggcaatctgttcaggacgcatagactcaaatgagtactgatcacttgagcgaactcctaatcgcaatgcaccgaagaaggaacgtcgtaataccggatcggcaccaccatgtccaccttcgtcgagatgtccatgatcagtcgtaatgcacaccagccaatcctcgtccggatgattggacgaacgacgttcgactgcatcaaactttatggcataccacggaacaaaaagtggtcccgccgctaaacggcaggaccacttcgtgcatttcacgcgcccgtgcaccacgcatcaggcgcggtcagtccgccacggcatcacgccttggcgacctccacacccagctcggcgccttccttcacttcgaaggaggtagccagcgtctcacgggcgatcagatccttgaactgctcgaccttggccacatcgacagccggcacggtcagcaccagcgagatacggtccgcgatgtccagatcggcagccttacgtgcgtcctgcacagaacgaatcacgtcgcgggcgtagccttcggccagcaaatcggcatccagcgcggtgtcgaggatcacgaagccaccggtcggcagagcggcggagaccgaagcggcggcctcggtggcgttctcctcctccacgcggttgatcagctcgtactcgccttcgaccagcgcaaggtcgccggacggcgtggagaccaccggcgcaccggacgcagcatcgacatgccagtcgccggacttggaggcctcgatggcgaactgcacctgcttgccgaggcgcggacccgccgcacgggcattcacacgcagctcgtgaacaatcttcagaccgtgggcggaggcgtcctccagagtcgagaactcaatattcttgatattaagttcggacttcagcagatcgtcgtacgccttgacggcgtccacgttctcgaccaccacggtgagcttggaaagcggctggcgcacgcggatcttggcggccttgcgcagggacagggtgccggagacgacctcacgcaccttctccatcgcgtccaccagagccggatcgtcgaccagcacacggccgagttcggtgtcttcaccggtcttctcgtccaccacgaacggccaatcggccaggtgcacggactcgccaccggtcagaccacgccacacggactcggcttccatcggggccagcggcgcaagcacgcgcatgaacgcctcaagcacggtgtacagcgtgttgaacgcggaagcgtcctcattccagaaacggtcacgggtgttgcggatataccagttggtgagcacgtcgatgaagtcggagaccgcatcgcaggcgtcggagattgcgaactcgttcagcgacttctcggcggccagcaccagacgacgggtacgggccagcaggtagcggtccatctccggcagaccggcgacctcgtccgcgcgcagctggcgagcgtcgaagccagccccaccgttggccgcgttggcgtacagggtgaagaagtagtaggagctccacaccggcagcatgacctggcgcacggtgtcgcgaatgccttcggcggtgacgatcaggttgccgccacgcaggatcggcgaagacatgaggaaccagcgcatggcgtcggaaccgtacttgtcgaacacgccgttcacgtccgggtagttgcgcaggtgcttggacatcttctggccgtcggagccgagcacgatgccgtggcagatcacgttcttgaacgccgggcggtcgaacagggcggtcgccatcacgtgcagcaggtagaaccagccgcgggtctggccgatgtattccacgatgtagtcggccgggaagtgctgttcgaacttctccttgttctcgaacgggtagtggaactgcgcgaacgacatggaaccggactcgaaccagcagtcgagcacatcggaaatacggtgcatgtgcgacttgccggtcgggtcgtccgggttgacgcggaccaggttgtcgatccacggacggtgcatgttgatgttgccgtccttgtcgcgcggatagtcgccgaagtcggccttgagctcttcgagcgaaccgtagacgtccacacgcgggtacttcggatcgtcgctcacccacaccgggatcggggaaccccagaagcggttgcgggagatggaccagtcgcgcgcgttggcgagccacttgccgaactgaccgtccttgacattgcccgggatccagttgatctgctggttcaattccagtagacgcggcttgatcttggtcacggacacgaaccaggaggagaccggcttgtagatcagcggggtggcgcagcgccagcagtgcgggtaggagtgcacgtagctcttctcctggaagaggatcgcgcggcgctcttccggaatctcggcgagcgggccgtcgccggcgcgcaggttgcgcaggatcggcaggttggcatcgaacacgaaatcgccctcatagtcagggcactgcgcggtgaagcggcagccatcgtcgagcacgtcggtgctcttgatgccgtgcgcgttcagcgtattcatatcgtcctcaccgtagggagcctggtgaaccaggccggtaccttcgacggtgtcgacgtagtcggcggtgaagatcgtgtagccgttcgggccgggcacgtggccttcggattcggcctcgtcacccgcgaagtacgggaagaccgggtagtagcgtcggcctgccagctcgttgcccttgagttcgcgcacgacctcgtaattctcgccgagttccttctcatagtgcggcagcaaatccttgccgaggtagaacttcttgccagcgaacttgccttcggtcgggcggacctcgacgtagtcgatgtcggcgccgaccacgatggcgaagttggtgggcacggtccacggggtggtggtccagaagacggcgtaggcgtcgtcctcatcgcgcatcttgacggccacggatacggtggtgtcctggcggtcctggtacacgtcggcgtccatgcgcagctcgtgcgcactcaacggcgtgcggtccttcgggcagtacggcagcacgcggtagccctggtaggccaggcccttgtcgtagagctgcttgaaggcccacatcacggattccatgtacgggatgttcagggtcttgtagccgtgctcgaagtccacccaacgggcctgacgatgcacgtagttctgccattcgttggtgtacttcagcacagaagcgcggcaggcgtcgttgaacttgtcgatgcccatcttctcgatctggtcgaccgagtcgatgccgagctccttctgcgcctcaagctcggcgggcaggccgtgggtgtcccagccgaacacgcggttgaccttgcggcccttcatggtctggtagcgcgggatcacgtccttggcgtagccggtcagcaggtggccgtagtgcggcaggccattggcgaacggcgggccatcgaagaacacgaattcgttctggctgtggtcgccggaagggttgcgttcaacggactgctggaaggtgtcgtccttgtcccagtagtcgagaacggtctcctccatgtcggggaagctggggttcggtgcgacgtgcgcggtctcgccgccctcgctcgccttgggatatacgttttcgctcaccgtaaatctcctgttagtactgtgcactggtcctacaggagcgtcattgatggcgattgccgggcgccgacgtgtgccggctggtttcacgaatgtcacgtaccgaaccgtgggccgattagtcaatcgcctcgcagccggaaccgactgtgttccgcccggaacagccatgtctgccgttcctgcctacgaggacgatgacgagcgctggtatgcgctccgcaccgcggtaccacctcgcttatcgcaccggttgcgccgctccgaactgttgcactcggagccgcgagcctgcgcgaccgcttgtgttcggctgtctcgggccgatcccgtcggttctactgggcgattgccgccgttcttccgaagactccccgctgataacggatcactgcctcacaacggtgcatatcctaacacgccacgcggtcaaatcgccgcccacggccacggcaccgtcaggagcccgatttagattgggaccggccaccacggaccgagaaaggattgtcggacaatgacgtatgatttcacgtccatcatgaacaggcatggcatggattcgatcgcggtcgacggactgggcaccgacccgggattcgcgccggacccgccacgcgagggtttcgacgtcatccccatgtgggtggcggacatgaacttcccgaccgtgcccacgattccgcaggccatcatcgaacgggcgaagcatcccgcctacgggtacttctcccccaccgacgactattacagctccatcatcgactggcagtccacgcgcaacggggtcaccggattgacccgggaggcgatcggctacgagaacggggtcctgggcggtgtgatcagtgcgctgaccgcgttcgccgcccccggcgacggcgtgctgctgcacagcccgacctacatcgggttcacccggagcatcgaaaacaacggctaccgcatcgtccacagtccgctcacgctggacgagcgcggcgtatggcgcatggattacgaggatatggacaggaagctcaaggagcatcacatccacgtggccgtgttctgcagccctcacaatccttgcggacgcgtgtgggaacgttgggaaatcgagaaggccatggaagtgtacaaggccaacgattgcgtggtcatttccgacgagatttggtccgatttgactctggggaaccaccagcacatccccacccaatcggtcagcgaggacgcacgcaacaggaccgtggcgttctacgcgcccagcaagaccttcaatctcgccggactggtgggaagctaccacatcatctacaatcccacactccgggaccgcatcgtggccaaaagctcgaaatgccactacaacgacatgaacgtgctttccatgcacgcgctgatcggcgcctaccggcccgaaggccatgagtggctcgacgaactgaaggcggtgctcaccggcaacgtcgattacgcctacgactacatcaccaagcatttccaaggagtgagtttggccaaaccggaaggcacctacatgctgctgctcgactgcgagcagtggtgcgaacgccacggcctgagcctgcccgagttggagaaacgcggctgggatgtgggcgtcgcatggcaggacggcgacatgttccaggccccctacagcatccgcgtcaatctcgcattgcccttgagccgcgtcaaggaggccatgcgccgccttgaccaatacgtattcaacgcgtaaacggcatgcatccgcgattgcggtgtcctggaaagacgaatgccgtcaacgaggttggtgcccgttggcggcattcgtcatacgttggccgaaccgggcgaaacccaagttgccgtgcgctatgaggtggatgccgccagcggacgtgtacatctgaccgcccgatatgccggtgccaccgatgcgccgacgctgccggcattcggattggaatggacacttcccaagcagtacgagaacctgcgcttctacggccttggcccccgaggaaacctatcacgaccgtctgcacggtggcaagctcggcattttcgagcgcaccgcggccgaagacaatgcaccgtatctggtgccgcaggagaccggcaaccatgaagacttgcgttgggccgaagtgcttgacgcccaaggacacggcatgcgtatcagccaggccggcagcgaacatttcgcggcgagcctgttgccgtacagctcgctcatgctggaagaggcgacccaccagaacgagttgccgccggtccgtcacacgttcctgcgcctgttggccgcgcaaatgggcgtgggcggagacgattcatggggcgcgcccgtccatgagcagtaccagctgcccgccgatcgcgcctacacgctcgacgtgaatctggaactgttctaacagcgataaagaagctccctctgacgagggagcttctttatcgcacagagggagcttctttatcgtgctggtacgaaactgtcacgcaccactagggtggtggagatgaaggtatggtggtgcagcgtacgccgactggagatggcctcggcaagcatcgtaatcgcagtatcggccagctcattctggtcgatatcgtaactggtcaatgtcggcgaagtgtactgggcgatggcctggttattgatactgatcacactggtatcgcgaggcaccagcactcccgcagcggtaaacgcctgcagtacgccgactgcaatcgagtccgcagccacgatgaacgcatccggcatgtcatctcgatgatcgttaaccgcttcctcccctagagtgcgcccggtgtccacagtgaacgcgccttgcgcgtaaatcaggccttccgcatccagccccaaacgctcggtccaattgcggaatgcggttaatcggccgtcttccggatattcgtgcaaacccatcgtgaagccagtaccgccgatatagccgatgcgtcgtttgcccgaggacaccaacatatccaatgcgtccaaaatggtttggcttaaatccggttgtaccgaatcgaacaggctgggcgcaggattggtgtcgatgaatacgccatagggcaataccagatggagcttcaacagtctatccgaagagagtacggacggtccgatggagatgaagccgtcgaaatcaccggcgtcggcaatcagatcgtcgatatgggaaaacgacgtgagttccatgtgctgggctctggcattgtcgccgagcacggaccgtagttcatcgaaataggcgtccgccagttcttcctcgcgggtggcgttgtcgagtacggccacacggcgtggcaatgcgatacggcgtgatccggtagcgtagccaagctgctcgctgacctcgatgatgcgacgtcgcgtctcctctttgacagacaatgtcgggtccccattgagcagccgggataccgtggcctgcgagaagcctgatttctgtgcgatttccttcatcgtgaccatagttgagccttccacgcctcagtacgtaacaatacgcagtatttcagtaaataactttactacatagtgtaactcacgtcatgcgggtatgacgccgtatggttgcagcatcgtcgatccgcagcgctgatgagaacgtgcatgtttcaggccccccgataattatcgggcaggcgggaatccccagaccgtggagtcaatgcgctggattttcccggacttgtcaaagacaacggtgatgtccggcgcagtaaaactgccggtcgaatccccgaatcggtacggatcactccggtcgataacggcatgcatcgtcacggtccgagttttcgcgtcataggactcattcgagtactcgatactgttatgcgtggccgtagtcccgcccagaccgccgccattgccttgatgcatttgctgacaatacttcgtaaaatccgcgccgagaacattcgacactgcatagcgcctaaatgaacgtgttaggtctgcaccaattcacggccggcaatactccacacttctcagtaatcaattcgtaccaaaccgctcacgaatctgagcagcagtaccataagaggcttgcgcaccgatcccagtcgcggcgtacgcggaaacgtatgaggccaactgcgcactgtccgccaacgcatgacccgaggcaagtccggccagaaccgtgcccataaaggcatctccgcacccggtagtgtcgatggcctcaaccgcaactggcgcaatacgatagatatcatcaccatcgatgaccaccgacccatccccgccaagcgtaattaccgcctgattaaagccgaagtcatgcatctgccgcgccacatcagaccagtccagtccatcccaatcgtcatcgtcaggctcggcgatgtccagcagctgtgccatttcatgttcattgaccagcagaatgtccgaagcctcgataagttcagcgggtagttcagcaacgaatggcgaatcgttgagcaataccttgagcccggcatcatggcagaggcgagcgcatgccgtgaccgtttccatcggactctccaaacacagtcccagtacatcggctgaggtcagattatcccgcatcgattgaatatactcaacactgacgtaagcgttagagccgggagaataaacaatcgtgttctctcctgccgcgtctacggtgatgaccgtggtcccgctggccccatccacgtgccgaatataactggtgtccacaccggtatcgttcaatgcttcaagcaaaaaatccgcattagcgtcggaaccgagcacaccaaacaatcggactttggctccaagacgagcggccgaaacagcctgattccccgacttgccaccaggaagcacccgcaacgtccctcctagcactgtctcccccggtttgggcagacgctcggtggtgacggtataatcggcattcatcgagccaacgacggacacggccccatgaatgcaatcaagagaaacaagcgtttcatccatagccggcatgatattccctttctgaatgatagatgctgctggtgcggtagtctgttcgatcaacatgctccgcaccagcaggcgcaatcagacattgcgttttgccgtaaaactcttgcgaaatacgaacagtacaatcatcgacaacaccgaaaccgcacacataatccagaacatgttggaggtctgcgcttccacaccactgccaacaccgaacagaccacccttgcccatggtgtcactggccatgagactggagtatacgccgactccgatagaggccgaagtgttcatcatcagatcgagaattcctacgccacgaccattctcctcgaccggcaacgcatctgacgcagcgtcgtagattggcgtatatacagcggtaacaccagcaatgaacaagcaggcaagaaaagtcagcactccgaacccactcttaatgaatatggcagatcctgcgaagccgacaatcatgagcgcgatagcgataaccagtgtgcgcatgcgtccgagtctgttgattactggaccagaaacgcatccaacaattgtggccacaatgtagaccaatgttagacacagcgaaaccgtggtcaacggcacgttgtagatctgctcaccaatcacgttgtaaatcggcacacaagcaaagttgaagaagtacagcacaaattgcagcagcagaatggacatatacgcaccattggtcacgaaagaacgacccaggaacggattcttgcctttccaaatccacagcacaaacagtacagcgaatacaatcgaggcaataatcatgccgactccggggaacgagaagtaaatggcaatgagcgcagcaaataccgcaaacaacagaacgccaatggaatctatcttctcgcccttggcactgatgtctggagtgttcttaatcagcagaggaataaagaacacagataacgccggcacaaggaacaggtacttccaatcgaaagaggtgatgaagcctcccgcaaacacaccgatagcagcggccaaataatacacagcattgtaaatgccaatgtagatggccttttccttgtcattcagatatttgactgtcatcaccaggaacacagaaccagcaacttgtgcaccagcaacctgaatcatacgtgcgatgagcacgacccagaagttgaacgagccaaagaaccccaaaaagctaccggcaactaatgcaactacgccaaatagcgtcatacgcttcggggatatgaagtcgcacaatgtgccatacagcatgcacaccacaccaagaacgatgcctggtagtgtgctgatcagtgaggcacttgatgacatgccgagcgaatcaccaatgttttggaacaccagattgaatgcctgaatcatcagtgttcccaaagtgaaaacaatcagcagtgcaggcagtgcttttttggtctttgctcggttggcttcaaaatcatcaatggaagcaaccgactgtatttgttccgtcattacaattctccttattttccttagtgattcaatcgacggtggcggcaagcttcagcagtcgttccatgaattgcgaagtaaatcgttcagcatctacgccaagagctactttggtgttcttcggctggctcaataatcttgtcggatcgccgatggtacgcccaatgctcgggccttcagtctcgaccataaggtcaatcgggaaagtcgtaactagtgtcggatcaagggccacagcagcagccaatgggtcatgcaggttgcatccgccctggaatgcaggatcagtttcctcactgatatcgatgtagtaatcagtcatgtcggcaagaaatgcaccggccttagtgccgacgtcgcgtagagcctgcgtatctttcttggtcatcaatgcctgcatggtcacatcaagaccaatcatcgtgatgtcggccgaagtggagaacatgcgattagaggccttgggatccatggaaatattagcttccatgtaggggttgcagttgcccggctgcgtcagcgcccctcccatcatgacgatggtgagcttgtcaacaatatcgggtgctttgacgaatgcggcgtcaatattggtcgagggaccagttggcacatagacaagctcttctttgctgtacttgcgagcggattcgataatgaaatcgactgccgacttatcagacgcctgacgtgttgccgttgcaggcacctcaacattgccggtgccattgcgaccgtgaaaaatgcctgaactgtcaggcacctcgaaagaatccgcatcactgggatgcggcacacccttaaacaccgggatatctggccgtccgtacatttccagcaaattcaaatcattacggatacccgtttccaacaacacattgccataggtaccggtaataccaatcagttccgcgtcttcggatccaaggatgtatgacaatgccaaggtgtcgtcaatgccggtatccaaatcgagaatgatcttcttcatgatgttcctttccatcagcttccttgccgaaaaatcggagacgtcttccatgaccatctcctcacgaccaagccgaggccttgtcgccgtcacaagatttaacgttttatcaagtgatgggagtaatgataaaacgttaaatcatcgttgtcaaaatatagtcttctgcgtgtcacgcatacggacaaagaagtagtagaagcaggaaaatactgaaacaatcagccggcgacggctgcggaggggccctgcttcacagacccgcggttgatgaacatcgtgggcacggaatgggtgacgccctcatccgaagcaccagagcgaatacggcacagcagcaaatccacgccctgccgccccatcagctcggcctgttgggaaaccaccgcgatacgcggtgtcatcaaggtgaacgccgcaatgtcatcgaacgacaccagcgacatatcctcacctatcgaaaccccacggtcgtgcagcacaccaatcatcgtgagcgcatccggcgagtatgcgcacagcatcgcgcttacgccggcatcaagcaacgactcaaccgctgccgtacgcgattcataagtggagtcgcaagcgactaccacgccgttaccctcgataagcatatccgacgcaaccgcacggaatgcggtctctcgttcgttgacgctgaacgaccctaatgagggatgcgacacatatcccacgcaacggtgtcccaaacgtaccaattcctctaccgcctcgcgaatgcccgtatacggattggaaaccacaaacggcaccgattcgacgcccggcacacgccgatccacgaacaccaatggcaaattacgtttaatcaacgactgcaccccgggtgactccacaccttgcggcaccacgatcgcaccatcaatacgctgcccgagcagattgccaataaacgcatcctggcgttccactgtttctgctgaagtaccaatcagcgtggaatagccccgggcatacaactcatcctccattgacgagaccaaatcggcgaaatacggattgcgcaaatcaggaaccagcaaaccaacagtcttagtatccgacgagcgcatggagcgagcacgttgatcgggcacataccccatttcctcaacagttttcagcaccaactgtcgcgtatcgctagaaaagcggcctttattgtgaagtatttgggagacggcagcagccgacacaccggcacgttgagcgacatccttcaacgtcacgaacgccatagtcccctccttgcggccgatacatcgtcaaaacaacaattcaaatgtacccttttcaccgccaatattcgcaatcctgcgccaacacacggctctcaacatagaaaaccgcgcccccaactaccggataagaattacttcaacccgataatcgaggtgcggtttttgcaggcgtaccgactactccagctccaccgcgccggtgtagagctgatagtactcgcccttttgcgcgatcagctcgtcatgcgggccacgctcgatgatgttgccgtggtcgagcaccatgatcacgtcggagttgcgtacggtggacagacgatgggcgatgacgaagaccgtacggcccttcatcaggttatccatgccggcctgcacgacttcctcggtacgggtatcgatggaagacgtggcctcatcgagaatcagcgcgggcggatcggccaccgcagcgcgggcgatggaaatcagctggcgctgaccttgggacaggccggatccatcaccctcaagcaccgtgttgtatccctcgggcagcatacggatgaagctgtccgcattgaccagacgcgcggcctcaatgcattcctcatcagtggcgttcagacggccataacgaatgttgtccatcacggtaccggtgaacaggttcacgtcctgcaacacaatgcccaaagacctgcgcaaatcaggcttcttgatgccggccacggagatgccatcatacagaatctgaccttgctggatatcgtagaaccggttgatgaggttggtcacggtggtcttgccggcaccggtggcgccgacgagcgcgatcttctggccgggcttggcgaaccaggtgatgtcgtgcagcaccggcttgtccgggttgtagccgaaggtcacgttggtgaagcgcacgtcgccgcgcagcagcgtataacgcccatcaggcgaggtgatcgcctgctccttggccttcatcgccacctcgcaggcggaaccgcgcagcttttcggcggccttcagagacctcgtaccatcgtcgccgatctcacgcttccacgcccagtggccggtctcatggtcgacttcggtcatggtgcggccgtccggcccaagttccacgttcacgagcgtcacggtgcccttgtcttcctcgatgggttcgtccatcaacttgaagatgcgggaggcgccggcgagcgccatcatcaccatggtcagctgctgggagacctggccgatcgggttgatgaacgagcgggacaaggtcagcagggagacgagcgtgccgagggtgagcggcttgacaccggtcagaccgatgtcattgacgccggccagcgaaacggcggcaccgacgatggcgagcaggatgtagagcagatagcccatattgccgacgaccggcatggtcacattgccccaagtgttcgcctcggcggacgcctcaaagagttcctcgttcttctcatcgaaggtcttctgagtggcgtcctcatggttgaagaccttgatgaccttctgaccattgacggactcctccacgaaggcgttcacgtcgccgatccactgctgctgcttgacgaagtagcggccggaacggctcacgatcttgcgcacgatgaaatacagcagaacggtgaacacaatcacgaacgcagtgaacgggattgacagccacagcatggacagcaatgccgcaatcgcggagataatcgaggagaacatctgcgggaacgactgcgagatggcctggcgcagcgtatcggtgtcgttggtgtagtggctcatgatgtcgccgtgctcgtggctgtcgaagtagcggatcggcagcttctgttggtgggcgaacatatcgtcacgaatcttcttgagcgtgccctgttcaacggtgatgatcagccactgccaagcccaggatgccacgataccggccacatacaggcagcccatcagactgatggcgcgcagcaacggagcccagtcggggttcgattcccccaccatcggcaggatgtaggtgtcaatcagcgattggaggaacagcgcggatccggcctgcgcggcggcaccgatcaggatgcacactacgatggcgataacgcgcaatttgtattggaagatgtagctgaagatgcgcttgatggttccggggtcggctttgcccatggcgggctcgcgattcttgaaactctggtcgttgctcatcgtgcttctccttccttggtatcggctgcattggtatcagctgcgctggtatcggccgtgggcatggtcactgtcaccgtcacggtttcggacggctcagcggtagatgactcagcagcctgtccggcagcggccagttcttcgggcttagcctggctcttggtctgggattcgtaaatggaacggtattcgtcgcaagtggtgagcagttcctcgtgcgtgccggaggccatgatacggccggaatccatgacaagaatcatgtcggattcctgcacggaggccacgcgctgggcgatgatgatcttcgtggtgtccgggatctcgttgtggaatgcggcgcggatcagcttgtccgtcttggtatcgacggcgctggtcgaatcgtcgaggatcagaatcttcggcttcttcagcagcgcacgggcgatgcacaggcgctggcgctgtccgccggacacattggtaccgccctgctcgatgtacgtgtcgtacttgtcggggaattcctgaacgaatccatcggcctgcgcgagctgcgcggcatggcgaatctcttcatcg

SEQ ID NO: 3797 - DNA, 7716 bp, Unknown
  R35_2m  MAG No. k141_3350
caagcgtggcccgcgcaatcggcgctgcggtcacgccttgttaacccaccggcggctttgcttagggcctttcggctccgcgcgaccatccgatacacggcgtaaagaaatcgtttttagttatgtgttgaattattgtgcgcatcgttcgagacattgcccgaatcagcgcttggcctaccctatcagcggcctgaacgcgacatgccgggcggcgaaactacgttggcagctcagttggaaggcatcaatcgccccccctcctacgattccgccaagaattcccgtgcatatgaggggctcgcagcccttatgcgcctgcagctgacgtcctgccagaacgattcccgtgcatacaaaagcccacggaacaagatatctgccgccgctccggccgacccagccaaacgcttcccgcgtatacgaaaggcccgcagcaggagttgctcactgctgcggacctttgcctatctgacacggcgttcaacggttaccgctcaacgccgtgtgacgcgctgaaccagctttaccacaggccgaatgggtcggagaagccgccgccgtcaccggtgccgccatcgttgttgccgttgccattgccgtaaccattccggccgttgccgttctggttgttctgcttattctggctgttaccgttggaatcggagctggacgaaccgttcaccgacgactcctcctgatcgagcgtcacgtccacatccatggtcttgccgtcgcgcacgatggtcagcgtcaccttgtctcccaaagccgcggcacgaacgtaaccaagcagcgagtagttgttgttcaccgcgttgccgttgaaggccacgatggtgtcgccctccttgaggccggccttgtcggccgggccgccggagacgaccgcgctgccagtggcgctggacttggtgatggtcgcgccgccgcgagtcacgccgtcggcttcaaccgtgtcggacttgatgaccacgccgagggcaacgtgcttgaccttgccgtccttgatgatttcgtcggccacacgcttgacgaggttggacgggatggcgaagccgatgccgatcgaacccgcggagtcggatgaggtggcggtcgaggcgatggacgagttgatgccgatcacctggccggccgcgttgaaggtcgggccgccggagttgccggggttgatggccgcgtcgatctggacggcgttggtgacgatctcgttgttgttgtcgtcggtcacggtcaccgggcggttcagggcggagacgataccggtggtggcggtgtcgtcgtagccgagcgggttgccgatggccatcacgttctcgccgacggcgagcttgtcggaatcggcgaatttcacggccttgaggtcgctcggcgggttgtcgagcttgatgaccgcaagatcggtggtggtgtcggtgccgacgagcgtggcggaatacatgttgccgttggcaagcgtcacctgaatctgctgggcaccggagatcacgtggttgttggtgatgatgtggccttcggtgtcgatgatggcgccggagcccttggcggtgccgttgctcaacgcggtctggatggagaccacggagccggagacatcgctggcgacagtctgccagtcgggggcttcgccgctcttggcggtggcggacccggagccggacttattcgagctgacgttggacagcgaattgctggtcggcagggtgattaggccgctggtgagggcgccgtaaccgaggcccaggcagagggccgcagccagaacggcggcgaccacggcgatgaggatgttgctcgccgtcttggacatgccctgcttggcggggccgggctgaccgggctgtcccggctgggccgggccttgaccgttcggcgtaccggtaccgggagtgccgaaaccgaacagaccgccctgctggggctgctggccattccggccattctgaccggactggctggcaaacgggttgccgttgttctgctgcggctgcgtgggcggattgaacggattgccgttgccctgcggctgcgggttattggtgtagtagggattgcggttgccctgctggccctgtggggtttgctgtgcaggctgaccgaacgggaattgctgcgtgggctgggcattgctgccggcctggccgccctgctggccctgtgcctgagtcggggtcggaccataagcgccatattccggggccggacgatacagcggagttgtggccgaggtctggcctgcggccggtgctgccggagaagccggcgaggaggagaccaccgtgctctcgcccttggcggaggcgtagtccgggatgggctcggtggcggcagtgtcggtagcggcttgcgtaggctgctgatcggcagcgagggcggccgaggaaaccggggcttgctgctcgctggaatcgctggcgttgccggcatcaaccgagtcgccacccacaaacgggttcttcggctcggcgttgccggtatcggcagtactattggggttttcgttattccgcggggtctggtcgacgccctgcgggttaaattcgtcagccattgctgctccttttcctaaattcctatcacgtctgttcggcggctattcgggcacttgcccattgccacttctcgtgtgctacctcagtagtaaaggcagtcaatctggaggttttctgaacgttgattgaaagtctatgcgtaatcatcgcagagtcttatgggcatctcggcttcgaggggctgatttcctgtttcgggaacatctacttgcacttcaaggggctgttcgcgcggtcaattccgagtatcaagggccctcatttaacgccattccgccatttttgcagccggcctacttgaccgggagccccttgaagcggaagtagacgttcgggagcggcgaaatccgcccctcgaaaccgagttcttcacaatttccggcccttttctggcccttctgcctaaagtgaacatatgacgatcagccttcttgaacatccgttgggcgcacagcccggacagcccggcgaccgcagcgctttccatttcgaaacgatcacccgcctgccatccacggccagcgggcttgggcgagacggtgcccgatacggccgcaccggcatcattcacacgccccacggcgatattcgcacgcctgccttcgtgccggtgggcacgcaagccgcgatgaaggccgtgttgcccgagcagatgaaggatctaggcgcacagtgcctgctggccaacgccttccacctgttcgagcgcccgggcgaggacgtgctggacgcggccggcggcttggcgcgtttcatgaactgggatgggcccacgttcaccgattctggcggtttccaagtgatgtcgctgggcgtcggcttcaagaagacgctggcaatggacgtgaccggcatgaagtcggacgacatcatcgccaagggcaaggagcgcatggcctgggtggatgaggacggcgtgacgttcaagtcgcctttgaatggtgacgcacatcgtttctccgctgagatttcgatgggcatccagcacaaaatcggcgcagacatcatgttcgcgttcgacgaactcaccacgctgatgaacacccgctcctaccaggaggactcggtggagcgcaccttccgctgggcccgccgatgcgtggacgagcaccagcggctgacggctgagcggctgggcaagccctatcaggcgctgtatggcgtggtgcagggcgcgaattacgaggatctacgccggcgcgcggcctcgcagatcgcctcgctggacttcgacggcgtgggaatcggcggcgcaatcgagaagcgcatcattggagacacctgcgcgtggatctgcgacgcgatgccggagaaccgcccgcgccatgtgctgggcatcgcctccgtggacgatatcttcgcgtgcgtggagaacggcggcgacaccttcgactgcgtggcccccgcgcgctgcgcccgcaacggcgcgatctacacgcgcgccggccggtacaacatcaagcgcgcccagcataagttcgatttcgggccgctggaggagggatgcgactgctacacatgccagcattattcgcgcgcgtacgtcgacctcctgctgcgcgcccgcgagttcaacgggtttacgttggccacgatccataacgagcatttcttcgtgaagctgctagacgacatccgcgcctcgatcgacggcggatactttgatgagttccgcgacgaagcgctggcccacttctacggcaacggcgagcgcagaccagggttgtgagtttttctccttcgttgcggcttgtgccgaacttctctctgctcccctcgctgaggctgagacgttaagcaaacagcccagtgggctgtttgtagtcgaaggtgagacgatagtcgaaccagcaggttgcaggcaaggcccgtccttaattgcggacgagctgtcacgaagtgactgaggggagtgccgccaccctcaaagatcacggcgcccgcaggagacccacaagcgatatatccctgcctcccatgcgacacgccgaagattgcatgattacccagccgggtgtaagttagtcgattgtctgcgagtgtggcggaatggtagacgcgctgtcttcaggtggcagtgagtgtatgctcgtgggggttcaactccccccactcgcaccagcaactaaagggctggaatcggaaggttccagcccttttgctttgtccgggcaagcgccgtttttcaggggggctttaggacttgagacttatggcccaactttcgtggcggaaaatgtcccggtacctgcatcaatcgtttgacgttcaagccaggccagaatccgctgtcccggttcgcgatttcgggcgatctttgcaaaccgggacaatttttgttgccccggtataaatgtcaatcgatttatgcgaaaaccgggacaacgtgccaattccagaatcggccttattccgccgattccgtctgccagacgatatgagttgaggaaaccggagtgtcccggttcacgaaaacaagccgaaatcgccgaccgggacagcggattctgccccggtcgacaggtcaaacgattgacatatgaaccgggacaaatacagatcagagagaagcccatgaagcagatttaactttcctcaactttccatccgccataaactagcattacataacatcatgaaccgagacgaaaccaacgaagtatctggagtcaccgacgaccagctcggccgaacggccgagccgtacgaatccggcaactggcggggcggcgttgggagcatcattcgcagcaatccgaaatcaggaaccgacacaagtcggacccagcagacacgcataatacgagttcacagactcggcgatgtattccgcaaccgcaccaccgaataccgcaccacggaagaactgtaagcattacgaaatcaaccttgattattgcgcgggcctatactaggttacggtagcgtaggttagtggtcgggagagcgtcgccggccatagcgaggtgatcagtatgagcgtttccatcagcacgccatctggacgaaccatggcttccgccgcaacagttgcgccttccgcaaccgcgagtcaaaaatccagcgcaaacgccaaccccaccgcactggaccgtgcatcggcccgatacagggccgcgcaatcgcgctaccgccaagccaaggccgcactgaaggcgatcaagcgccagatcgtccccgtggatgcattcggcaatcgcaagccgcgactgcgcggatggcttcacctcgccaccctgccgctgtgcatcgcggcgtccatcgtactcatctgcatcgcgccggccggctcggtcaaagcggcctgcgcggtgtacggcgcctcggccatgctgctgttcggcaacagcgcgctgctgcacgtcgtgccatggcgcagcgcgaaggtgactcgcgtgctgtgcggcatcgattattcgaacatcttcctcatcatcgccggcaccaacacacccgtgctgttcgcgctcagcccggcgattcgccggccatatctcacggtaatctggacgaccacggcgattggcacgatactgcatatcgtctggctgcggacgccgaactgggtgttcaccaccgtatacgtcgtgttggggctggccccggtaacgcttattccgcagctctggacggctcccgcagtaggcccggcgccgaccgtgctcatcgcgtgcggaggcgccgcgtacatcgccggcgctgtatgcttcgcgctgcgcaagccgaaccccgtccccggctggttcgagtttcacgaggtgtttcacttgggcacggtcatcgggtatgcctgccacgtcgtggcgatttatctgattgtctgtgcgctgtaggttcgctcgcccagcaccgaggcgggccttcatacgttacgagataggttcttgaccagccagccgtgacggccgccttcatagacctcgtcagtgagccggtagccgcgctgttcgtagaacttgtagtggtcgttctccgagtgcacggcggccatggttccgccggcttgcgcgatgcggcgttcggcgtcggccagcagccgcgagccgatgtgcctgccttgcgcctcgggcagcaccgccagtcgcgcgatgatgtatcgcccgggctggtcgggatgatcggggtccgcgtagaaccgacaggtcgctacggggtgattctggctgggctgaatgggctggctgcgtgagaccaattgcgcggacgagccagggcgattgggcgcatcattatccgaatcgaacgccagcagatgcacggacgcggcatcccattcatcgaattccggccgccagtcgcgttcgcggatgaacacctgctcgcggatggcgcgggccgcgtcgggcaaccggtcgtatgcttcgattcgtatggtcatgagcgtcagtgtaatgcgtcacgataaccgacaaagcccggctcggtggacgagctcgggcccaagctcggcaggctcaggccgtacgcgcgatctgcacggcggtgccggacgcggtgaccatcagcataccgttgtcggcgccgagcacctcgtagtcgatgtccacgccgaccacggcgtgcgcgcccatcgcctccgcacgctgctgcatctcggcgatggcctcgttgcgggcacgcatcagctcttcctcatagccctggctgcggccgccgaacatgttacgcaggcccgcgccaagatccttgaacatgttcacaccggataccacttcgccgaagacgatgccctggtagttggtgatggtgtatccgtcgacagacggggtggtggtgacgaggatcatggcgaggctcctttggcttgtctgcgtagataaatcactgccgagagtcggaccgttcccgaatctcacatcggaaacggatcgcttctcttggctaccacaatagtcggcagcgtccacaccgacattttcgacccgtccgatcgcataatcaaaagcatcaggatcgatatgcaaaaccaccgaggatcgtggatcgcttgtggatcttgaagcgttgtatcctggttgtccatggagcgggaacgcaaaatcattaacgtcgtgggagctgcaatcgtcaccaacggcaccgtactatgcgcccagcgtggcccgggaaagtcgttggccggatactgggagttccccggcggcaaaattgagcctcatga

SEQ ID NO: 3798 - DNA, 8880 bp, Unknown
  R35_2m  MAG No. k141_3550
caggcgaggaatgaactggcaatcattgactataaagaagtagtacaaacacgctcttgagttctcaaaccaccaccactcacccacctcgcagctccccggaggagaaccactcgctgagcggcagcaaggaaataacttacacgcattcacggactcgcgcaaatcaggcatgaaaaggtacgccagaatcgttgcaacgacggcgttctatcggcgtgtcgaaatcagcttgaatcacgccgttatcatcaggatacgccggctttttatgggctcacgtaacgaaatcagatgttcaccggcgtgtcgcaacaattcattccacgttcaactcccctcagtccgatcacgcggacagctcacccgcaattacggacgagcaaagctcgcgcccttatggctcgactatcgtctcgccttcgtctaaaaaaaacagtccaccggacttttttttaaacgacccagcatcaaagagggaagccaaaaggggattagaaggtcaggcgcatttggtgccagaccacgtcaccgtgagtggaatcggaaatgccttcgtcctcatatccgaatcgcgcatagaatccgaccaaccgatctttgcaggtgagcaccaggcctttacggccggctgcacgagtgtcttcaatgactttcctcatgagtgtactggcgcaaccgcgatgctgatacttcggcgcagtatccacgccgaaaatcatttgccagtcaccttgagggttgtgctgcgcggcatcctcgtacatgtcatcggtcaagtcgcgccgatcggtcacaaaaccgttgatgaacgccatgacgatctcgccatcaatcaatagccagaaacattccggataggtctcgattcgggcgcgcagggacgagcggtcggcggcctcggcggccgggaagcattcgaattccatggcggccagcgcgtccagatcgtcgatggtggcgtggcggattaactggggatcagaatcagtcatgttttgtctttctcttaacactccgttgtgagcaactcccccagtcacgcttcgcgtgctggctcccctcaccttgaggggagccggatggatgtcagattacgtggtattcgcgtagcagggtggcaatatcggtgccgtcgagtttcttgagcaccttcttgaccacggcctattcaatgaagttgagcttcatatcggtgaccggtgcaccgtcacgcaatttgacggtggcgttgagcaggttgcgcacgtcatagacactgccccacacttcaggcacgccgcggtccacgccgagcaacgtgtagacagcttccataccggtgcgcatcgagtactcggtggtgaagatcgtgtcacgcggggtctcggcgaactggccaaggaatgcgaagttcacggcaccatcgggcaccacgtccgggcggtcgccggccgcgcgcggcatgaagaacgcggtgatgtacggcatcatgaccggcacggtgttggcgtgatgcttggcgagcgcctcgatcttgtcggtcggcacgcccatgtggtaaagccactcctcgcaaatctcttcaccggtgcattcggtcatcggcttcttcacatagttgccgggcttgtccgggaacaggccgtagacccatacgcacagctggtccttgggctggtcgcggaactgctgctggcggttcagggtccaactcatgagccagttggagtcctgcacagtgacgatgccgccggtgacgaccttgccggagaacgggtcgcgcttgcaaatcttctggatgtacggcggaatctcgccgtccagggtggtgatggtggcgctcatccacttggtggcattcggatcggagcagaacttctccggatggccaaagctcgggtcctggtcggcgatacgcttccacatatcccagccgccgccgggcttcaggtctgggttccatgcggcgggcgagttctgggaacccatggtggagttctccacgcaaccgccgttggtgatgaacaccagatcgttctcggtcaggtcgatggaggatttatcaccctcgtgatccacgtcgatgcgcacggcaagcttcttggtgggcgtgctggcagggttgcgcttgaagaaaccggaggtggcctgaatcttttggatggtgtcctggcctacgccggtgtgctcgcgcttggggccggctcccccgccaatcgcgaattccacgttctcaaccttggtgttgtagcggaattcgacgccatgcgattccagatacttgaccatcggcagaatcatcgactcgtactggttgtagcgggtgaaacgcagcgcggaaaagtccggcagtccgccgatgtgatgaatgtagcgtttgatgtacagcttcatttccagcgcggagtgccagttctcgaaggcgaacatggtgcgccagtacagccagaagttggagttcagcacctcatcatcgaagaaatcggtgatcggcttgtcatacaggtcttcgtccggggtgaagaacagcttcatgatttccatcgaagccttgtcggacaggccgaacttgcccttgagccccgcgtccttgccgaggtccttggtggcgcggcacagcgagtagttcgggtcctccttgttgagccagtagtactcgtcgagtacgctgacgccctcggtttcgatggaggggatcgagcggaacagatcccacatgacctcgaaatgattgtccatctcgcggccgccacgcatcacatagccgaggccgggaatatcaagaccgtcacaggcgccgccgggtaccgggtccttctcaaggatgtggatgttctcgccaggcatctgaccatcacgcaccagataacaggctgcagacaatgccgccagtccggtaccgatgatgtatgcatgcttgttgtccacgtcggccggcttcttcgggcgtgcgaaagcctcataattgccgctgctgtagtacatattccgcctccttggggtagagttgacgcttcgtcaactcttcttgaatagacatcatgtcacattattgccgaacacgccataggcaacgttcggcgttctgccgtattcgccaataccttgcgtctacggttttcgaggcctgtgttggctgttggctcataactattgaaggcatacaggcatactgaggatgctgggtgcttcaccgaaccggatgattgataaggtcccgctcaatccatgccatgaccaaatcggcaagtcggtttacctccgcttcggtgagttcacggcctttgggcagatgatgccatttttcgatgcatccgcggcagcatgtggcggtagcatgctgagcggtgaataccggatggccgcgccatggcgtctgcctgccgtcgttcttcggttcggctgcgcctatgcggtctcgcaacatttctcgcgcatgacgatcgatggtcgccttgcctttggtgcgggcataggctcgttctttgtcggtcaaaacgaatttggcgcggaactgcgaatgagacagccgttccagcatcgcggcaatccattgtcgctcgtcatcgttgttaccagtatccgccatctccatgcccatacgttccacaatagtcgcgcacatcgtatggtggcacatgccttagctccctctgatgaaggagtccccagcaaagccaggtgagggagaggccaggggcgaaacccgccaatcaggcggcaggcaagcagctggggccaaacagaatcttgatctcagcaaacaacgaagtatcccgcttgacgcggaaacgatcgccaaacgtgagcacctgagcgttacccttctcatccagcaccgcaagatgtacttcgcagtaaccaggatgattagcgagcacctgaccgagttgcatcatgcgttggcgctccaacgccaccggcggcagcgtgatgaccaacggacgttcatcctcggcttccaaggtcggaatctgcatttccgtggctctcagagaaacggtttcgtcgcgcaactccacttggccacgaatctgtacgatggcgtccacggcgagttcggcggcggccgcttcatagaccttgccgaagaacatgcattggatggagctttccatgtcttcgatggtcacgatggcccaggggttgcccttcttggatacgcgccggtccacattggtgaccaaaccagccaacgtgacctgctgtccttcacccatcgttttggctcgatcaaccagatgcgcgatggacatttcacgcaaggacgcgagaatcgactgcataccggagagcggatggtcagacacatacaggcccaacatttcgcgttcgaagttaagcttggtcttcttgtcccattcctcaagatcgggtacggtcacggaagcgtcgcccatggcctccgctcccccatcctcggcatcggagaacaaatcgaactggccctccgcctgtttgcgcttcagactcaccaccgagtcgatggcggcctcgtgcacggtgaacagcgcgcgacggttcgggtcaatcgagtcgaaggcaccggccttgatcaacgattcgaccaatcgccggttcagcgcggtcaggggcacgcggcggatgaagtccatgaagttcacgaacttgccgcgcgggccttcgcgttcggcgatgatatcggccacggccttgtcacccacgttacggatggcaccaagaccgaatcggacgacgtcgccgactgccgagtactcgtacaccgattcgttgacgtccggcgagagcacctggatgcccatgcggcgggcctcgcccaagtacagtgcggtcttgtctttgttggtggcggcaccttgcaacagggcggccatgaattcgaccgggtagtgcgtcttcagatatgcggtccagtaggagatcagaccgtatgcggcggagtgcgctttgttgaaagcgtagccggagaacggcaccagaatatcccacacggcctgggaggcctcttcggagtatccatgctccttcataccggcgaagaacggcaccttctccttggccagcacttcgggcttcttcttacccatggctcgacgcagcacgtctgccttgcccagcgaatagccggcgaggattcgggcggcggactgcacctgctcctggtagatgatcagaccataggtctcgtcaagcacctgcttcagaggttcctcaagctcagggtggattggcgtgatcttctgcaggccattcttgcgcttggcgtagttggtgtgcgaatccatactcatcgggcccggtcggtacagagcgataagtgcggaaatatcgttgaagttatcgggcttcagggttttcagcagtgaacgcatgccgtcggaatcgagctggaacacgccgagcgtgtctcctcgggacatgagtttgtaggtttcggcgtcatcgagcggaatcttggtgtagtcgatggcgggtttgccgttggcctcgatgttcttcagggtgtcgtggatgatcgtcaagttggacaggccaaggaagtccatcttgaccagacccagcgtttcgcacgtgtggtattcgaaggtggtggtgatggtgccatcggtgcgttccagcaacggcgaggtgtcggtgatgggcgcgctacccatgatggtggcgcaggcatgtacaccggtctgtcggatcaggccttcgatacccttggcttcttcggtgatgcgcttggcgtccgggtcggaatcgtagagttctcggaattccctggcctcggcgtagcgtttggctgtcgggtcgaagatgtcatgcaggctgatatccttgccgccggtggccgccggaggcagcgccttggtgactttttcaccgaccgagaactcgtagcccatgatgcgggcggagtccttcaaggcctgcttggttttgatggtgccatagatcacgcactgggcgaccttatcggtgccgtatttttcgccgcagtattcgatgactcgcgcacgaccttcagggtcgaagtcgacatcgatatcaggaaggctcactcgctcagggttcaggaacctctcgaaaatcaggccatgcttgagcggatcgagctcggtaatgcccatggaataggcgaccatggcgcctgcggccgagccacggcccggacccaccataatgccgtggtccttggcccactgaatgtagtcggcgaccacgaggaagtatccgcagaactgcatctggcagatcacaccacattcgtagtcggcctgcttcaatacgtcgagcggcgggttgccgtcgtaacgcttctccagaccttcctcgacttttttaaggaacagggaggtctcatcccagccttcggggcaggggaatttcggcatgaacgcgccgtcttcgtggtcgtcgaacatcacgttgcagcgttcggcgatggcgagggtgttgtcgcaggcgtccggatggtccttgaacaggtcgcgcatctcttcggcggttttgatgtagtagccggtgccgtcgaatttgaatcggtccggatcgtcaagacgggaaccggagttgatgcagagcatggcgtcctgtgcctgggcatcttcggcgtgtacgtagtgggaatcgttagtggccagcagtggtgcgttgagtttcttggctatggtcagcaggtcaccggtcacctgagtttcgatgggcagaccgtgatccatgagttcgatgaagaagttgtctttgccgaagatgtcctggaattcgccagcggcgcgcagggcctcatcgaactgaccgagacgcagacgggtctggatgatgcccgaggggcagccggaggatgcgatcacgcctttggaataggtggcgagcacctccttatccatacgcggataacgcatgacgcgaccttcgaggttggccacggacgaggctttgatgaggttgaccaggccttcgtcgttttcggcccacatggtcaagtgggtgataagaccgccaccggagacgtcgtcacggcgctgggcttcggtgccccaatgcacgcgggatttgtcttgacgtgcggtttccggggtcacataggcttcgatgccgatgatgggcttgacgccattggccacgcagttggtgtacatctcgtaggcgccatgcatgttgccatggtcggtgatgccgaccgcaggcatgccaagttcggccgcacgcttggccaaatcagggatcttcgacgcaccatcgagcagcgaatagtgcgtgtggttatgcagttgcacaaagttgttcccgtaatcagccatgcgccccaccataccgtgtggtctgggcggctgttcagcattcccgtcggcactccgcgatgagggcggcgcacagcatgatgacctgggcgacgagattgaaccacaccagcgcgccgatcaacgccgcgaacggtgcgagcagcggattgcgggaagctccggctaatagtcgcgcaccgagaagctgcattgcggaaaccgtcagagatcccagtaacgcgccgaatatcgtgaatcgtccggctttgatgtgggagaccacacgcagcagcaacatgaacaacgcgaaattcagcgcgacgccggtaccgaaaccggtcatctccaaaagcacggtgccgggcaacgaactgctggggatgccgccccattgcagcagtcggcgtacgatgccaccggacaccgtaccggccgcggtcgaaagaatgaacagtattgcgatggcgatggcggcaagcgtatcgcgtaaccttgcgacgacgatattgagctcgtcgccgcagtcgtcgaacatggaccgtacggcgtggcgcagcgagttcatccagccggtcaccgtccaccagaatatggccaacgtggccagaccggtccacgtcaatgtgcttgacatggtgtttagtgcggaagacgtcagaaacgagtcggccacaccgggaatgacttcacgcaccgcgtcaatcagcatctgctgccaatcaatgttgccgaccatgataaggccgaacacgctcaccgcaatccagacgccggcaaaaaaggcgaatagcagaccatatgccagaccattcgccagcagggggccgcgccgcgacacataccggtcgagcacgcgcccaggcagcgaacgcgcccacgcgtccgctcccctgtcaatcgcactcttcaacccatgcatagttcaactgtagctgttgttaccattgtcccgaattcaatttgtaagtacaacgctcgtcggggggggggtgacgttttgttggacttcgttgtctgtatggtcgttcgcaacgatagcacgcgcgttcaggcgacgagcccgagttcgatgcgtttgtccatgatgctcatgccgtattcgagtttgatgcgcttgtccctgtaccagaccatgcactcgtccaacaacgtgacgaactcgtcgatcgagacaccttggaagcttcgcttgtggaagaactcctgcttgcctgccgaagcccccggcggctgcgttgtccggactgcggcccttcgcgcccatcgaccgcgtcaggccgtggctcccgcagacgcggatccattatgcacatctcggtaggaacaaaacaacgtcaatgaagaaacctgaagaatcgctggttgtcctgtcatctttagatgacaggacaaccagcgacaagagtaatcgcctcccgttgtctaaatgaaagtgcaacacccgttagattggagattgtccagataaccagtccgaagggatgtcgcacctatgggagaagtgtattcgcacctgtcggaagaggaacgccaggtcatccagatcgaggtaggcaacggcgccagcatacgcgggatcggcgcgatgctgggccgcagcccgtccagcatcagccgggagatcaagcgcaacacatggttcccg

SEQ ID NO: 3799 - DNA, 11965 bp, Unknown
  R35_2m  MAG No. k141_3729
agttccttccctgtgtgccgtatcagacgcgatacgcgccgattatcaggcggcgaagtattccacgccggcctcgaagatcggctggtacttgttgccgggcacgttgacgtacaggccgttgccggaacgctccgagtgacccatcttgccaaacacgcggccgtccgggctggtgatgccctcgatggcgagcagcgagccgttcgggttcacatctaggtccatgccgggggtgccggtctcgtccacgtactgcgtggcgatctggccgttggccctgagctgggcgagtgcctcgtcggaggccacgaagcggccctcgccgtgggagatggccacggtgtggatgtcgccgaccgaagtcttggacagccacggggagaggtcggaggccacgcgcgtgcggaccagtcggctctggtggcggccgatggtgttgaaggtcagcgtcgggcaggcgtcggtcatcggcacgatgtcgccgtacggcaccagacccagcttgacgagcgcctggaagccgttgcagatgccgagcatcaggccgtcgcggttcttcaacaggtcacgcacggcctcggtgacggccggcgcgcggaagaacgcggtgatgaacttggcggaaccgtccggctcgtcgccgccggagaagccgcccgggatcatcacgatctggctcttgttgatctcatcgaccaacgcctgcgtggattcggcgacggcggccggtgtcaggttgttgatgatcagcgtggtcacgtcggcgccggcgcgctcgaaggcggcggcggaatcatactcgcagttgttgcccgggaacaccgggatcaccacatgcggcttggccacggaagagccgacgtacacggtcttcttcggcgcgtggaagtcgatggtctcgacggtcgcgcccttgtcctcgcccttggaacggtacgggaacacggattcgatgccggactcccaagcttcctgcacagcgtccaggtccagcgtctcgccggcggccttgaacacgtactcggaggtggtggtgccgatttcgccgatctcgaccaaattggagacggccggaagcttggcatcgtctgccagctcgacgatgaacgaaccatatgccggggtgaacaggtcgtccacggcgatgctgtcgttcagagtcacgccgatgcggttgccgagcgtcatcttgaacagggcttcggcggtggcgccatagcccggcgtagagacggccagggcatcgtggaagtcggtgagctcctcgatcacggagaacgcctcaagcagcgcatccttgtccggggtcagaccgtcggccaggtagcgcggcgcgatgcgcacgatacggtgatcggcgtccttgaactcgggggaggtggcgcgcttcatgttgcccacggccacggcgaaggagatcagcgtcggcggcacgtcgagatcctcgaacgaaccggacatggagtccttgccgccgatggcgccggcgcccaggtccacctgggccatcagcgcgccgagcacggcggccgccggcttgccccagcgttccggctcgtcgcgcagcttctcgaagtactcctggaagctcaggtaggccttctcatgctcgaagccggccgcgaccagcttggccagcgactcgaccacggacaggtaggcgccggtgaactggttcttggacatgatgtacgggttgaagccccacgccatcgccgaagcggtggtggtctcgccgaacaccggcagcttggcgaccatggccatgttcggggtgagctgacgcttgccgccgaacggcatgagcacggtgcccgcgccgatggtggagtcgaagcgctccgaaaggcccttgttggaggccacgttgatgtcggtgaccagcttgttcatacgctcggccagcgtgccctcgccccacggggtctcgtaggactgctgtgcctcgacatgcacggtctggtgcttggaagcgccgttggaggccaggaactcacgggacagattcacgatcttgtcgccgttccaggtcatcaccatgcgcgggtcctcagtcacggtggcgatcaccgtggcttcgaggttctcctcgcgggcgtagatcaggaactcgtccacgtcctcggcggccacgtccacggccatgcgctcctgggattcggagatggccagctcggtgccgtccaggccctcgtatttcttgggcacggtgttgaggtccacgaacaggccgtcggccaactcgccgaccgccacggacacgccacccgcgccgaagtcgttgcagcgcttgatcagacggcaggcatcgccgcggcggaacagacgctgcagcttgcgctccaccggagcgttgcccttctgcacttcggcgccgtcgagttcgagcgattccacgttatgcgccttggacgaaccggtggcgccaccgatgccgtcacggccggtgcggccgcccagcaggatgatcttgtcgccgggggccggggtttcgcggcgcacatggtcggccggagtggcggccacgaccgcacccacctccatgcgtttggccacgtagccggggtggtagatctcgtcgacctgaccggtggccagaccgatctggttgccgtaggagctgtagccggcggcggcggtggtcacgagcttgcgctgggggagcttgccttccagcgtctcggagaccggcacggtcgggtccgcggcgccagtgacgcgcatcgcctgatacacgtaggaacggccggacagaggatcgcggatgcagccgccgatgcaggtggccgcgccaccaaacggttcgatttcggtggggtggttgtgggtctcgttcttgaacaggaacagccagtcctcgtcgtggccgttcacgtcaaccttgaccttgacggtgcaggcgttgatttcctcggactcgtcgaggccggtcaggacaccgttcttcttgagccacttggcgccgatagtgcccatgtccataaggcagacgggcttggcgtcgcggccgagctcgtggcgcatcgccaggtaacgctcgaaggcggccttgacggtggcgtcatcgatggttacttcgtccagctcggtgccgaacgtggtgtgacggcagtggtcggaccagtaggtgtcgatcaccttgatttcggtgatggtgggctcgcggccctcctcgctgaagtacttctgacagaattcgaggtcggccagatccatggccagaccgcgctcgtcgatgaacttctggccggcttcggcgtccatctcgttgaaaccggcgatggtctcgaccttgccgggcaccggcacctgggtcttcagggtttccttggtctccaggctggcctcgcgggcctcgaccgggttgatcacgtaatgcttgatggcgtccacgtcggcgtcagtcagttcgccttccagcgcgtacagcttggcggaacggaccgtcgggcgctcgccctgggagatgagctggatgcattcggcggcggagtcggcgcgctggtcgaactggccgggcaggaactcggtggcgaagaccttggcgccggcgaagtcgggcaggtcgtaggccacattgtccacctgaggctcgctgaacacggtgggcacggtctggccgaacagctcctgggagatgccttcgacgtcatagcggttcacgatgcgcagggccttgaggccgttcagtccgaggatcgtgcgcagttcgcccgcaagctgctgggcttcgacatcaaagccgggcttcttttccacgtacacgcgaaaaaccatggaaatcctttcttgaaaatattgaaaaattgaagaagtgcggtaaaagaacttggctcccctctccgaggggagctgtcagcggagctgactgaggggagttgtcatggcggtgaacgtcttgacctcccctcagtcgcctatcggcgacagctcccctcggagaggggagccagctgtatgttctgctacctgcacctaaacgacttattcggcgacttcgatgccttcggacttggcgagttcggcgaggcgctcctcgatctcttcgtaggccgggatgatgctgccgagaccacggcggaacaggtccttgtcaaggtgctcgaccttgccggagtggtccttctggtcccacagacggcaggaatccggggtgatctcgtcggccaacagcagcgtgccgtcggtggcgcggcccatttcgatcttgaagtcgaccagcttgacgtcgatcttggcgaagatctcgatcaaggcctcgttgatcttgcgggccagcggggcgatctcggcgagatcctcgcgagtgcatacgtcgagggccaccaggtcatcgtcgttgacgaacggatcgtgcagatcgtcgttcttcaggaagtactcaagcaccggctccttgagcggcaggccttcctccacgcccagacgggagcagaagtggccggcggccacgttgcgcagcacgatctccaacgggaacatgttcaccttgcgtaccagctggccggtgtcgttcactcgcttgatgagatggctgtcgatgccgcgcttcttgagcaggtcgaagatgatggtggtgatgaggttgttcaggcggcccttgccggtgaagtcttccttcttttcaccatcgccagcggtggcggtgttcttgtattcgacccacagaacctcgggatcgtcggttgcgtacagttgcttggccttgccctcgtagagcttttccagcttctccatgactcacctttcaggagtggaatttctgggtgaactaacggtaaaagggtaccaatcgagggctacaacaacactcggcatgacgctacgatgcggccagcgcatcatacgtcgctgcatcgaacgaccatacgctgttgggatggcggaggcggatggtattggtccgacaatcgactcattgccggtcgcatagtcgttcggagtaacagtatctacgcaagcacgcggacactcagatgttcgtcaatagacaaaacgtgagtgtacggccgcgcacgcacgataatgggagtgacgaaatggtgcaaggaggttcgtcatgatcgatcatattggtttgtttgtttccgacgccgcacagtacgcggatttctacgagaagctgctggccccgctgggttacgtcaagaaagtggcgtacccgaccgccgtgtgctttgccaatgacgaggatggcgacagcgtttggctggagtcttcgaaggacggcaacccggtggtgccgtctcatgtggcgttccgcgccaaggatgaggacgccgtcaaggcgttccatgaggccggtctcgcctctggcggtaccgacaacggcgctccgggcccgcgcccgaactatggccccacgtattacgccgcgttcatccacgacccggacggcaataatattgaggccatgctgagctgatcaggccgtggactactccacggtaatcgtcaacgcatcggcaacacggccggccttggcacgggcgtcggcttcggactcgccgacggccagtgccacggccatacgacggtggccatgcacttcgggcttggcaaaaatgcgcaggtccgtgccgggttcggccagagcagcggccatatcggtgaactcggcctcaccgtcgccggccaccacaatcgcatggcttgccgccaccgagccggccggaatcgtgagcgccacatgctcgggggtgatcggcaggccgagaatcgcgcgggcgtgcagcgcgaactcgctcagacgctgggaggtcatcgtcaccataccggtatcgtgcggacgtggggagacctcgttgaacagaatcgagccgtcggtgagcacgaacagctccacgccgaatacgccccaaccggtttcgccggtcgcctgagccttggccaccaagccttcaacggcggtacgtgcgatgtcgcgcgcctgctcggcctcaccatcgggctcggtagccggctgccaggactcgcggtaatcgccggactcctgacgttggccgatcggcgcgcacgtcacaatgccggcggacgaagaaacggtcagtaccgtcagctcacgctccagcggggcaagcgcctcaacgatcacgcgcgacacatcgccctcatcggcggcgcggcggccctcctgcgcttcggtccaagcggcatcgatggcgtcggcggaacgcaccaccgactggccgtgaccagacgagctcatcaccggcttgaccacgcacggatagccgacttccgaagctccggcgcgcagctcttccagcgagccggcaaaacgatacggtgtagtcggcaagcccaattcttcgtgggccagtacgcgcaggcgctcgcggtccatgcaaatcgcggcgatttcggcgctcggcaccacctgggcgcccgcggccgcagcaccggccagcacatcggtggcgatggcctctacctcgggcacgatgatgtccggcttgatttcatcgaacaatgcctgcaattcggcggcattcgccatatccaacgcgcggtattcatgcgccacctgctgggccggagcgccggcataggagtcagcagcacacacccatgcgcccagtcgcatgagttcaagtgtgacctccttgcccagctcgccagcgcccaaaaacagcacacgggtggggtgcttgcccagcggtgtgcccagcgggtggttggctgcgcgagttgcgggggggacggcggaagtctcggcgggaattgcgggagaggaggcggaagtcacggcagtattcacggcgttctcagtcatacccacattctgccatgacgcgatgatttcggtatgtcgcgtgagcggagtgcctcgcgcggcaaaattacgggaggaatatccggcttcatggggcggtaatgagtccatggggcggtaatgagtccatgaggcggtttgttggttttgtgaaaccgcggaattaagccgttttgccttaccgccccatgggaatttcaccgccccatgggataaataccgccccatgaagattcagatgcccgtaacccgccataaatactgcgtatagacatgccattgcgtgcgtaacagagccgtcgtaccttagcaattaccggccgatgaagtatggggcggtcgggccaacattttgggatgcgacatatagcgaatagcggcgtgccggttccggcatttcaggctacaagccggcacgctggcaatagtcgaagtacttaacgattccgcctatgcggggctcgaattcggtgacgtacgctcgctgagcctgctggagactccgggcgcgctggacgtggcgctggaacttggctcgctgtccaaaatgtatatggtggccggctggcgcggtggcatggcgattccgccgcattcgtggattggctgctcaacacggccggcgtggcgctgatgccgggggtctgcttcggtcaggtgggcgaaggctgggtgcgcatcagtctgctcaagcacaccgccgagttgttccaggtcgtggcccgcgtcgatcgtgcgctgcgaagcgcgtgattcaatattaggcaaaatgcggcagcccataccatttcacacgcgttcaggcagcgcggccgacgccattgcctcgcggtggtttaggatgaggcaatgcgcgaaaacgggattgaagagagcattgatcgtccgctgactatcgctcttgtggtcgatacggtgggcaatcagggcaacggcacctccaattcggctttgcaatgggctgcggaattggagcggcaaggccatcatgtgaggcttgtcggtataggggcgcccgaatatccggcgcgcgtgaataaggtgccgctcgtctcgtgggtggccgccaagcagctcatgcaattcgccgaacccagcgacacgttgttccgcaccgccttccaaggcgtggatgtggtgcatatctatatgccgttcaaattcggccgtcgtgccgctaaagtcgcccaccaaatgggcattcccgtgactgccggattccacctgcagccggagaacgtgctgtattcggccggcccgctacgtcgcattcccggtatttccagcttcctgtactggctgttcaagcactggctgtacaagcgcattgaccacatccatgtgcccaccgaaatgaccgcgagcctgttgcgcgcgcacgggtataaagccaagttgcacgtgatttccaatggttattcaccggtgtattcgccgaagaagccggccgatccggatgcctcggctcccgtgccgttccgcgtcatcgcttccggccgactggccagcgagaaagatcagattacgctgatcaaggcggtgtcgatgtcccggcacgccggcgatattcagctggtgatcgccggtacggggccgctcaagcagtatctcaagttccgcgccgggcgtttgctggcgcgcaaggccgatatcggattccacaagcacgccgatatgcccgatttgttgcgttcgggcgatttgttcgtgcattgttcgattgccgacatcgaatcggtgagcgtgatcgaggcgatggcgtgcggattggtaccggtgatcgccgcgtccgaactgtcggcggccggccagttcgcgctgatcgacgagtcgttgttccccgtgcgggacgcggccctgctggcccgacgcatcgattggtggatcgcacatcaggccgagcgcgccgaatggggcgagaaatacgccgaatacaccaaggcgcattattccgtggaagcctcggtccacaagttcgtggatatggaacgcaaggcgataggggagtaggagccttctcgtttgcggagaggttttccctcagtccgcctgcggcggccagctccctcatcggcgggagctacgaaaaaacctccctctgatgagggaggtggcatcgcgaagcgatgacggagggagggattagcgaagggttttacaacaactcaataagctgatcgacttcttcatgcgtggtggcccagctggtgcagatgcgcatcacggtatgcgtgtcgtcggccttctcggtaaagccgagcttgacctcgcgctccagacggtcgatggtcggctgatccatcgtcacgaaaatctggttggtgggcgcttcgaaagtgagcatgtagcccttggcgcgcagggcctcgcgaatacgatcggccgcctcattggcgttgcgggcgatcttgaagtacaggttgtcggtgaataaggcgtcaaactgcgcgcccagcacgaagcccttggccagcaaggcgccgtgctgcttgatgcgggtcaggaagtgcttcggcgtgttgtgcttggtaaacaccacggcctcgccgaacagcgcacccaccttggtaccgccgatgtagaacacgtcggcgatggtcgccagatccgtgagcgtcatgtcggaaccggtggcggtcagcgcgtagccgagtcgcgcgccatccacgaacagcggcatatcgtacttatgcgccacatcggcgatagcctgcagttcggctttggagtagatcgtgccgtattcggtgctttgcgagacgtacacggatccagggaacaccatgtgctcgtagttgccgtccgcatagaaggtcttgcagaactcgtccagttcggtcgggtccattttgccgttgtgctggggaatcgtaagcaccttgtggccggagaactcgatggcgccggcctcgtgcacgttcggatggccggaggcgaccacgaccacgcctgcatacgccggggtgatggtgtcgatgacgacctggttggtctgcgtgccgccgacgaggaaccacacatccgcgtccggctggccgcaggcctcgcggatcttggccttggcctgatcgctcagttcgtcggacccgtagcccgaatacagatggttgttggcttcagccacggcttcaagcactgcgggatgggcggcgcgggagtaatcgttctcaaaagacagcatgacggaccttttgtccttgtgttagatgaattggatatgcccgagtgtacaacgtggcggttcccggcaggagcggggaattcatggagaaaaacaaaacccttccgcgaacggaagggttttactggggtggccaacgcggctcgaacgcgcgaccttctgaaccacaatcagatgctctaccaactgagctatggccaccatagtgtcgtattcagcaagctgaattcgcacaacaggtgaatactatacacaactttgcggatgtgtgctcatcggtgtgtcgcgatggaatcaagcggttggtttgctgatgcagctgctcgcttctcagtacgtgtccgtgccgactcagtccctgttcctcaatgccgtcaaggtggtgcttttcccgatcgccctcggcgtgatctgccacatgatcttcggcaagaagatcgagaaggtcacggtggccctgccgatcgtctcccaggtggccatcctgctcatcatcggcgtggtcgtcgccgccaacggtccgaagctgttcgtggccagctccctgatggccattccggtggtcatcctgcacaacctgtgcggctactcgctgggcttcggcttctcgaagctgatgtacaggatctacccgaagggcttccgctacgcgcagcagaaggccatcacgttcgaggtcggcatgcaggactccgccctgggcgccacgctggccctgacctccttcgcgtccaacccgctcgccgccgtgccgtccaccttcttctccgtgtggcacaacatctccggctccatcctgtccagctggtggcgcaaccatgacgaccggcacgagattcattgggattctgacaacggcgagaagggctccgccaagagcaccgtttccgtggcccacccgttcgacgccgacaaggccgccaaggtcgctgcctgaaatcctgagatggtgagaaaggtcgggtaaggcacgactccagtcagtcggtcactcacctttcctacctcgcataacatagccgctcccgcttactcccgattgatgtatcgggcgtttcgcgagggcggttttgctataattagtaatgcagaaagcggcaaggtgatacggcaaagaggccgggtcgctagaggttcccatcggatatggaagagcacgaggatgtgctggaaacagataacacagaagcggcatgtggtgaaaagaaacataatgtaacctccttggcggtgcccccgtgtgacatagtctccgcgggggcacctgctgtgtggcgttcgcttttttgcgacgcattcccgggaatattgcgttgggagggcgtgtgtgcgtgtgttgtgcgacgcattcccgggaatattgcgttgggaggaggggagaagtacagggcgcggattgtcccaagctagtgagtcgaggcccggcgcgtcgttgtccggcggaatcgtagtatagatattcgtgtgtgccagcagcacgccttatgtaacaggcgagcatgctgggatatccttcaaaccgctgatcgcacgtagtaatgcgccgacgggaggggcgaaggccatcgggccggtggactgggctatcttttccgattcgtcgggtgtcgccaacaggcagatgccaagcgagtgtgctgaaaagtgtgggtgcagtgcggcggtcacacaaaagcaagagaaaccactgaatcggagaattcaagttgcctactattgaacagctcgtccgtaagggacgtcaggcaaagccgaagaagtccaagactttggccctgaagggcagcccgctgcgtcgcggcgtgtgcacccgtgtctacaccaccaccccgaagaagccgaactcggctctgcgtaaggtcgctcgtgtgcgcctgtcctcgggcatcgaagtcaccgcctacattccgggcgagggccacaacctgcaggagcactccatcgtgctcgtgcgcggcggccgtgtgaaggatctcccgggtgtgcgttaccacatcgtgcgtggc

SEQ ID NO: 3800 - DNA, 31320 bp, Unknown
  R35_2m  MAG No. k141_3929
cccgatgttctccgaagttcgctgatttataggaagagacttggcagacaacaaacgcaccggcctgtccgctctagccgacgccggcaatgaaggcgaggatttctccgtcatcgacgccatcggtggcccgcgtggcgtcatcgaatccatgctgcctggcgtggtgttcgtcgtactgttcgtggccacgagcaatctgaatctcaccattgcggtttcggccgtgttggcggtattgcaggttattgtgcgactgattcagcgccagtcggtaatgggcgcggtctctggtctggtggcggtaggcatctgcctgatttgggcatggcagactcatgaggcccgcaattactacatcttcggattcattaccaatgctggctatgccgcgttgcttgccgtgtcgctgattgcgcgcgtgcccggactgggtttggtcgtcgaattcatccgtagcctgcccaccgagcatttcaaggcatggttccatgactggatggacgacaaggccctgaaacgcgcctatatgattgtcaccggcctgtgggtcggtctgttcctgctgcggctggtggtgcaggtgccgctgtatctgaccaaccatgtagctgcactcggcgtgacccgcctgctcatgggcattccgttctgggcattggcgatttgggtgagttacctcattattgccacgccgatgcaccggcataaggtcgcggctaggaagatacagactgaagtcgctgttgatgccgaactcgaaccgagcgcaaccggaaaggacgatgatgcaagctgaagttcgtatcgaacgatacgccgaccaaggccgctgcgtggcccatatcgacggtcgtgtggtgttcgtccgcttcgccttgcccgacgaactcgtgcgagtcgaacttgacgagccccacgaccgggacgaccggttctggaccggcgaagtcgtcgaggttctcgagccgtccgaagaccgagtcaccccggcatggccacttgccggtcccttggcgatgggcgggggagtgggcggcgcggatctcgtgcacgtctctttgcccggccagctcaagtggaaggccatcaccgtctccgaacagatgagccgactcggccatatcgacgtggccgttcccatcgagcgcatgcccggcgacaaggcagccggcggcctcaattggcgtacccgcatcgaaatgattgccgacgacaacggcatgccatccatgcgccggcgcggcacacacaaccgcgtggccatcgacaccatgccgcttgccacgcgcacgctgctggacgtcgccaagcgcgaacacgtgtgggaaggcggctttgaacccggctcccagattcgtctttccgtgcccgaaccgcgcggcgagatcgtcgataccgcggcagcagacgacaattacgccgtacttgtggacggcgaactgcgcgccggctcccagctgctcaccgaacaggtgaccatcaacggcacgaccttcgactatcaggttgacgccaacggtttctggcaagtgcatcgccaagcgccgatcgccctcggtacgcacgtgatcaacctggtcaacgggcagctgcagtcagcggcggacgccgtaatctgggatctgtattccggttccggcctgttcaccctgccgctggccacaatgaccggtgaacgcacccgcatgctcagcgttgaaggcgcgcgtgtggccgtcaagaacgcccagcgcaatctgcgcgccatgaacctgaacgacgtggacgcccgcgcgggtgacgtcttgcgcacgctggaccatgtgccggcgcatctggccaagccgaatgtcgtagtgcttgatccgccgcgtgccggtgctcgtgccaaggtctgccgccagattgccgcggccgacgcatccagcgtggtctacatcgcctgtgatcccaccagcctcgcacgcgacaccgcgacactcatcggcgaaggctacgagctcaaagacatccgtgccttcgatatctacccgatgacccaccatgttgagacggtggccctgtttacccgctgacaggtgagcatatgacacgacgaattctcggattgctggcctgcatggcggctgtgttgtccctggccgcctgcacgccggccggtagggcggtcggcgatacccaagacagcatgccggaagtcgcccacgattccacacatcccacggatgtcacagtcggctttgtggggtcgactgacaccaccgcagacgagttcgtcatcaatgcgctgtctgatgacaaactcaatgtctactatgcctcgctcgaaacatccgcaagctcggcaaacgcaactgatggcgtatccggtgaaaccgaatcttctgacgccggcactaccagcgaaaacggtgccgatagtatggatgctcatactggcgtcgacaagaatgcggccaccgcacagcagggtgttgccgatttcgtagctcgcgcggtcaaaatcgtggttatcagcggcatcgacgttaccgacgccaaccgggagagctggaaccagacgttgaccaatgcgcgtgaagccggtattccagtcgctctcattgatccaaagcatgcgcccgaagatgaactgctgtacgccgtcatccttcacctcaacaccaacagtgccgattctggcgacactgccgataccaagccaatgactattactgacgccgtgctcaccatcacgcgcgatgaaccccacgaacgcgagatcaaagtcaccgtttcctgagccgaatcaggcccttgaagctgagaaagcaccctgaatcatccctgagccttagcggattgcgaaacaagacgcggtaggctggggaatatgagtgcaacaacagccgtggaaatgcctgaaatcggagcaaccggtcttacctccaaagaagtggtgcagcgtatcgaaagtggccaatcgaatgcggtgaaaacatccacctcgcgttcggttcaagatatcgtgcgagccaacgtattcacgctgttcaacggcatcatcttcgccgcgatggtactggtgctgatcaccggttcctggagggacgcggtgttcggtttcgtcatcatcatcaacacgggcatcggcatcgtcaccgaactcagggccaagcgcacgttggataagctttccatccttgtggcctccgaattcctcgtgcatcgtgatggcagggacgtggaggtgccccacaacgagatcgtgctcgacgacctgctgtggatccgtgccggcgaacaggtgccggccgacgggcagatcatccagacctggggactggaactcgacgaatccatgctcaccggcgaatctcgtaccgtgcgccacaaggtgggggagcaggtgtattccggtgccaccgcggtctccggcatggcattggtcaaggtcaatgcggtcggcagccattcctacgccgccacgcttaccgcgcaggccaaggtatacaagaaaaccgtgtccgacctgaacaagggcatcaacacgattctgaaattcatgaccttcctcgtggtaccgctgtgtattctgctgattctttcgcagattcatacggtcggcggttggggcacggcactctccaccggcgaatggcggcaagccgtggtttccgcggtcgccggcgtagtaggcatgattcccgaaggcttggtgctgctgacttcgctgaacttcgcggtggccgccatgcgtctcgcccgtcacaatacgctggtgcaggagcttgaatccgtggagacactggctcgcgtggacgcgctgaacctcgataaaaccggcacgatcaccgatggcggtatcgccttcaaccggctcgtgatgctcgattccgccagttcggctgcggaacaggcagccacgcaggccctctacgactgctgcaacgaagagcagcccaacggcaccggccaagccgtactcgccgggctcaaggcccaaggatatggggcaggtgcggttgagtctcgtgtcccgttctcttcggcgcgcaaatggagtgcggtgcgtaaatccggcgagacctggtacatgggagcgccggaggtgattatttctgcgcttgagggtgactattcgtcggtgttgcagcaggttaacgagtatgccaatgacggcaaccgtgtgttgctggttgcgcggtctacagctcccctcagtccgcgaagcggactgagggacgcagttgagggagccaatgtctcggacggcccgcaactggatgtgcaggctgagccggtggcgttggtgttgtgctctgagaagattcgcgaggacgccgagcggacgctcgcttggttccgtgagcagggtgtgcgctgtcgtgtgatttccggtgacaatccagtgaccgtgggtgccatcgcccgcagagtgaaactgacaggcgaccatgagccggtggcgatggacgcgcgcgaactgcccgaggacgtgaacgaactggcccgcgtgctcgaaaacgtcgatgtgctcggccgcgtgctgcctgaccagaagaaggccatagtgaaggcgctgcacacgcagaaccacgtggttgccatgaccggcgacggcgtcaacgacgcgctcgccatcaaggaggctgacctcggcatcgccatgggcaacgcggcacccgccaccaaggccgtggcccaggtggtgctggtggattccaagttctcgcacctgccggacgtcgtggcgcggggccgtcaggtcatggccaatatggagcgcgtggccagcctgttcctcgtcaaaaccgtgtactccgcgctgatctcgctcggtgtagtgctgacgcaaatcccatacccatacctgccgcgccatatcacctatatcggcgctctcaccatcggcatgcccgcgttcatcctggcgctcgcgccgaacacgcgccgctatattccgggattcctcaagcgcgtggtcacgttcgcgctgccgggcggcatcgccaccgcgctgtcggtgctgctggccgcttgggtgctgccgccggtcatgggctggaacgtgaccggcgatgccgcggacctgtccgccctgcgcgccaccagcgccatcatcctgttcgcgatgggcgtgttcgtgctggcccgcgtggccagaccactcaacggttggcgtggcgtgctggtggcggtgttcgcggcggcgggcgtgatcggcgcgttcgtcccgttcgtggcgaacttcttcgccctgattctgccgaccggcgccacgatggtggccacgctgatcgcgttggccggttccgcgctgatcttcgcgctgtgcctgtggctggcgccgttcgtgcgcggactgacgggcaagctctcgcgtcggcattgagacggcggcgcgattgtctcatacttcaagccgacacgccagagcctcggtaacgtgcccgtaccatgtgtagcggataatcagcggcatcataagccgattcatgatttcggaggaagcatgtccttacgcgacgaccagctggctaccctcaaggcagccggcaaggacttcgattactacaacatcgccaatctcgacggcatcgatcatctgccgtactcgctgaaggtactggtcgagaatctggtgcgcaacatcgacggtgccaacatcaccgacgagcacgtcaagaccctgctcgactgggatccgaacgccgaacccagccacgaaatccagttcacgccgtcccgcgtgatcatgcaggacttcaccggcgtgccctgcatcgtggacctcgccaccatgcgtgacgcggtcaaggacctcggcggcgacccggaggtcatcaacccgcaggtccagtccgatatggtcatcgaccactccgtgcagatcgacaagtacggcatcgccgacgcggtccagcaaaacatggacatcgagtaccagcgcaacggcgaacgctaccagttcctgcgctggggtcagcaggcattcaagaacttccgcgtggtgccgccgggaaccggcattatccaccaggtcaacatcgaatacttggccaaggtggtcatgagcaaggccgaggccaacggcaacacgctcgcctacctcgactcctgcgtgggcaccgactcgcacaccaccaccgaaaatggtctgggcgtgctcggctggggcgtcggcggcattgaagccgaggccgccatgctcggccagccgatctccatgctcgtcccgcgcgtggtcggcttcaagctcaccggctccatcccggagggcgttaccgccaccgatgtggtcctgaccatcaccgacatgctccgcaagcacggcgtggtcggtaagttcgtggaattctacggcgaaggcatcgcctccgtgccgctggccaaccgcgccaccatcggcaacatgggccccgagttcggctccacctgcggcatcttcccgattgacaatgtcacgctcgactacctgcgcctgaccggccgctccgaagagcaggtcgcgttggtcgaagcctacgccaaggccaacaagctgtggggcgacgcttccgacccggattacgtggaaccgcagtactccgaatacgaggaactcgacctcggtaccgtggtgccgtccatcgctggcccgaagcgcccgcaggaccgcattctgctgtccgaagccaagagcatgttcgagaagaccgcccccgcctacgagaccgagaagaccgtcaaggatccggtggccgtgtccaccgacttccgtggcgatttcgacatcgaaaacggcgacgtggccatcgcctcgatcacctcatgcaccaacacctccaacccgtccgtgatgatcgccgccggcctgatcgcccgcaacgcacatgccaagggccttaagcccaagccctgggtcaagacctcgctggctcccggctcgcaggtcgtggccgactacctgaaggccgcggggctgcaggacgacctcgatgcactcggctaccagctcgtcggcttcggctgcgccacctgcatcggcaactccggcccgctgctgcccgagatttccgaggcgatcaacgccaacgacctgaccgtcaccgccgtgctttccggcaaccgcaacttcgaaggccgcatcagcccggacgtcaagatgaactacctggcctccccgccgctggtcatcgcctacgcgctcgccggcacgatggacttcgacttcgagacccagccgctcggcaccgacgcggacggcaacgacgtgtacttgaaggacatctggcccaccaatgccgaggtcgccgccgtggtcgacggcagcgtgagccgcgagatgttcctcaaggactacgcctccgtgttcgacggcgaccaccgctggaagggcctcgacgtgccggaaggcgagctgttcgcgtggaacgacaagtccacctatgtgcgcaagcagaccttcttcgacggcatgaaggccacgccggacccggtcgccgatatccacggcgcccgtgtgctggccctcctgggcgactcggtcaccaccgaccacatctccccggcaggcgcgttcaaggcctccagcccggccggcaagtacctgaccgagcgcggcgtggagccgaagaacttcaactcttacggttctcgccgaggcaaccacgagatcatggtgcgcggcacgttcggcaacatccgtctgcgcaaccagctgctcgcctccgtgggcgaggaggtgacgcctggcggcttcacctacgacttcctcgccaagaagccgaccacgatcttcgaagcctcccgcgactacatcgacaacaaggtgccgctcgtggtgctcgccggcaaggaatacggcaccggctcctcgcgcgactgggccgccaagggcacggtgatgctcggcgtcaaggccgtgatcaccgaaagcttcgagcgcatccaccgctccaacctgatcggcatgggcgtgctgccgctgcagttcccggcaggcgaatcctatgagtccctgggcctcaacggcaccgagacctacgatatcgccggcgtcgagaagctcaacgagggcgtgacccccaagacggtccacgtcaccgccacccacgaggacggctccaagaccgagttcgacgcggtggtccgcatcgacacgcccggtgaggccgactactaccgtaatggcggcatcctccagtacgtgctgcgcaacctcatgaagtaaccaccttcttggctcccctctcttgaggggagctgtcagcgaagctgactgagggggagcaaggccggtatccgccaacggataccggccttttccatgcatgccaaaatgctatactgtatagcatcttcgaaatggaggttgccatgaccatggtccaaatgaacgttcgcattgatgcgaaactgaagaacgaggtcgaagaagtcctcaagggcaaaggcgtatcggtgagtgacgtaatccggtcgctgtggttatacatcgccgaccgcaaggaagtgccggcattggaaacgactgccgaagagcaagcccgcgaggaggaaaagcagcgcaagctgaaactgattcgagaaggtgccggatacgtacacaaggaactggtcaaggccggactgatctcagaagacaccgacctcatggaaggccttacctacaagcagttccgcgacaaaatgtacgacgagcaacttgatgcgtattacaacatgaagagggccgattgatgaccgacgtttccatgcagcgtattttgcttgataccaacgtactgttggactatttgctccatcgcgatgatcacgccaagatggcggaagtggttatggaacttggcgcgaagaacaacgttacgttgttgtgcgcgtcattgtcgctgaaggatatcgcatacctatcatcatcggcgattcgtagcgaattcaaaccgaatgaatcggaagtggagaatttcactcgcggctttctgtcgtcacgggtgccatggcgttgtatcgagcaggtgaaggagatgtgtgacatcgtcgctgtcgatgagtcgacatgtgatagggctttttccctgcaaaaacggcatcgggattttgaagatgatctgatcatcgttgccgcgcaacaatccggtgccaactgtgtggtcacatcggatgccgaattaatcagtcattttcccgaatattgcaaaacaccggctgaaatcgtggcggcgctggaataaatgagcgtgtggctcccctcacggaggggagccaccaatgatgtgccggctactgtagcctactgcgcctgtagacggaactgcttccagatgtcgctgagcttctgaccgttgcgcgtgcgcttccacacgtccagaccgccgccgcgacgtcctccggcggcggcacgggccgcggcggtcggagtcggatattcggagccgtcatccagacggagacgaccgttttcggtgaccgtggcaaaccagcgctcgcccttgcgcggccgctcccacaccagacgctcgcccggcaccagcagaccagcgtcaatcacctgccggatcgtgacgcgccgcgaactatgagacggccgtggagaggtcttcgacaactcatcgacattctgcttggtcagatcacgggcgtccttgtcataccggatgccccagtattccacgatgagtcggaccgactcttcctgccgcgcctccagcagggcaggtgtgcagtcagcgaaatccttcaactgattggtcagcgggaaacgacgtgaatccgcgcgcaacagcatgcggtcgcgacgtgccggatattcactcaacctgtccaactgatcctcagggccctgcaccagcgccatattgccgagtcggtacatccagaaatcatgctgatcctgcggccagtccgcaaacgatttcgaccgttcgatatccaacggcataatcggcagcgcactgaaccggcgtggtcgatccaactgcatgccggccttctgctcgttggcgcgaatcagcagcagacggaccaaatcgccgtcaccctgcatctcgccatgcaaacggaccaatgcgccttcacggtcgccgtccgagacatgcaacccgttcacgcgctggaccaaatagcccttgtcaagatcacggatggcggcgttcgcataaccgcgccgctccaacgctccagtgcgattcagcgtgcggatgccggtcacctgttccaatgcggtcagaatttccagcagccgacgctcgtcatgggcgcccaacgattccaacgtggccgtggttctggcgatacgtgaggcacgaaccacaaacggcgacaaatcggcgtcgcccagcccgcgatacgaattgaccaacgcccacatggccacgggcttccactcgtggctgcggtaatcgtccaatccctcaagccggctacgcacctcggcgggcagtacggtatcgctggggcgcgcgatgatccgccacgccatcgcgtagggtgccagcacctggttgatgaatgtgggcaccgtgcctttgtcgatgtacggttgcagcacgtcggccaggaaatcctcgatgagcttgtcggtggccggcttgtgcgtgagtacgagatgcagataggcgaagaattcctcacagtcatgcggatcgtcgccaagcgggtcaatgatgtcatcccaacgggctgcgtacacgtcaagttcggcggtcgacaggctggccgtggcgcgcgccttgaacacgtcggacggggtgagcggcaggccgcgcatgttcatcacgtcgaagatgcgatgcgcgccgtcgagatcgtcggtggtcacgatgacgagagtcacctcgttgaccagatactgcgcgaattgctggcgttcggatgccgaccaattggagatctcgtcgtacgtcttgcggatgttggcgacgatgttgcgttgcgcagcggtcgccagatcgtcgtcgttcatgtcgaacacggattcgaggttgtcctcctgcacgtgttcgcggaagaacgccgcgtcgcgctcgcgcaacgtgaggcgaggctcggtgacgatgccgcgcagcttgtcgccgggctccaccagcagcgcgtcgagttggcgcatgaggtccgggtctcgctccagatcgcgcagcacggcgatgatgatcgacagggataccagccgctgctgcccgtcgatcacgtcataacggttgtcgccctcgcgcaccagaatcagcgagccgaggaagtacggggtaccgggtgacttgcaggcgtcgtccaagtcgcttaccagttgcaggatgttctcggccttccatatgtaggcccgctggaatgaggggattgtgaaccggaaatccggggtgaacactttcccgagtggtagttccttcgcgctgattgccatgtcaatcccttcgtcgccggcctctggacggtatgccgacgtgccgactgtgctcaagcctaccagtgttcgcccgacggcgggcacatcacgccggctcgggcaccgacccctcatacaagtagaacgaagatgggttttctcccggcacggatgcgggcagtgactgctcgcacacctgcgtcaggccgcgatgtacatagaatccgacatcgcacgtggtatccgtgaataggaagtactgacgtatgccggctgcgcggaatgcgctcatcatcgtctcgaacatgcgccggcccagaccgtgaccgcgcgccgccggatcaagtacgaacagcaccacttcagccgaatactcatggccaatgttcgccgcctgcttgcgcagttgcctatcgacatgaagagtcccgagaatctcgctcgcagctgccatgccgtcgtgggcaaacgccagttgcaatagcttgcgcaacgaatgacgccggtgcatgttcagcgggctgcgatggtcgagctcgtcgatacgccccacaatcaatgcgacgggtttatcttccagctccgcgacaaaggccgtggtcacacgtgccagacagttctcccaatcggcctcggctgccagcaagccggtccgctcatcatattcggcgtaccaagtgcggcgcaccaggtcgatcagcgccggataatcgtctttacgtaacgttcgaataatcgcttcactcatgttctccattatgactgatatggctcgataaccggacgtgttacagtcgcgccggcaaatcggcccgctccaccagcctcgccatctgtacgcggcccatattgagcttgtccgccgcgtaggagagatgcgccttggccgtacgctccgagataaacatacgggaggcgatttcggcgttgggctatgtgctgcaagacgattcgccgattacggtgcatgccacgcgcatggtggaaacgcccgttacgctttgcgatgagcagaacgagccgatcgatcctattcatggaatgttcagctttgttcctctaagattggtactggaacaaacgctaaaggagcgattatgacattcggtcagcagccccagaacaacgggcaatacaacccgcaatacaacccgcaatacaacacgcctgattacaacgccgcccaacagtctggatatggccagcaatacgcacagtccggttacggccagaactactatgcccagccgcagggtgcccccacctaccagtacgcgccgcaggatgcggccggtgccggcgcgggtgccgccaccatcaacacgacgatgacctacaactacgaggaggcccgccgcgtctccgtagccaaggtgtacggcgagatgaccatcggcatcctcgtcaccgccgtggtcgccgtgctcggccagatcaccggagcctactacagcttcctcatggccaccggcatggtgggcctcatcggcctgtgcgtggtgcagattgccctggccgtggtgctcggcatgcgcgtcaccaagatgaagtcggccactgcgcgcgtcatgttctatgtgtacgccgcattgatgggcttcaccttgagctcgatcttcatggtctacgacctcggctcgatcggcgtggcactcggtgtcaccgccgcgttcttcttcgcgctgaccatgttcggcatgactaccaagttcgacatgctcaaggccggcccgatcctgatgatcggcctgatcgtgctcatcatctcgcagatcgtgctcgccttcgtgcaggtcgacggcatgaccaagatcgtctgcgccatcggcctgatcctgttcgccggcatggccatctacgacgcgcagtccacgcgcgcgctgctgaccgaatacgaggcccagggcccggaaatggtcaagaagatctccatcctgtgtgccctgaacctgtacctcgacttcgtgaacatgttcctgtacatcctgcagctgctcggcaacagggactagcctcgccagccgattggtgggcggcatgtagcctgctcgtcaaacgtcacagcccgaccacattgtggccgggctttttcatgtctgtcacattcgcacgttaggctgtctccccgtgaaaagacaagaactcgtaggcatgctgagcctgttgttgaccgcgctgatctggggttttgcgttcgtggcgcaggtccagggcatggatttgatgtcgccgatgttcttcaacgccacgcgcttcacgctgggagcactgtctttggtgccgattctgctgtggcagcgtggccgggggagcgcggataagggcgatacagccggggtcgatgtcgttgggaccgaggcccccagggccgtctccacagatgccgcatcgaacggtgcatccgacgtcgttaccatcaccggtgccaagctgaatgcgaacaagcccgattcggccgtggcgcgattgctcgccaacccggtggtcatttccgtgatctgcggcatcgtgctgttcaccgccagcaccctgcagcagtatggcattctgtacggcaaatcggccggccgcgcgggattcctgaccgccatgtacatcgtgatggtgccgttgctggcctgcgtgttcctgcgccggcgcatcggcatgctggtgttcgtggccgtggtgctgtccatcgccggcttctatctgctgtgcatcaccgatggtttcggttcgatcggcctggcggatatcctgctcgtgttcacggccgtgctgttcgccgtgcatattctggtgatcgatactttgggcggcaccgtggacgccatcaagctttcattcggccagttctgcaccaccgccgtgctgagctgggcgggttcgctgatcgaaggctcggtcgactgggccggcgctgctcattcctggattccgatcctgtacgccggcatcggctcggtgggcatcgcgtacaccttgcaggtggtcggccagcaatgggtgccaccgacgcgagccagcctgctgatgagcctcgaatcgttcttctcggcggtaggcggtgcgttgcttctcggtgaagtgatgaccccgcgcggttacctcggctgcgccctcatcttcctcggcaccctgctggcccaagcgccggccaggctgccgaagtggctgcaacggtgaatgaatcggccgcaggccgattccatagcacctcagtccgaggtcttaggcgcttcacccacttgcggcgcgccgttgatgtcgcggtggatgttctgcatttgcacttcgatgttctgcagcgaacgggcgcagtcgagcagtgtctgtgaatgctcgctgagcttgttgtccggcaaatcggtcttgtagcgcagcgcatgctccagcgacgcccaataatccatggcgatggtacggaactgcacctccaccggcgtgtaatgcgcgcccgaggagagaaacacgggcaccgcgtagattacgtgcaatgaacgatacccgttctgtttcgggttcttgatgtagtccttgacgcgcagcacctgaatatcggactgcgacgacagatagttggacacggaatacacgtcgtcgcggtaattacagatcacgcggatgccggccacatcgaacagattgtccttaatcgaattgacactgattggcagattcttgcgctccagcttgccaatgatcgaactcaccgacttcagacggcgttccatatgatgtatcgggtcatggctgaaccgcacctggaactcgtcgtcgagaatctccagcttggtgctgatctcgtacatcgcgccttcatacacctgcatgaggtcaacgaatttaacgacctgttcgggagtgaaggtgcctcccggaagatccaacgctttgagacgggcctgtagatcggaggttttgagtcggctatgtcggtcaagtatcacgtccaccaatatactcggcggattccagacaatctggatgttcgcggggaatctttccaagaacccatatttaagatcgtgacaaccaatggcatacgtgaccggagcatgacgaaccccgccgatagaatcggtcgttatgaatgaagacatgatgaccgaggcggagcgtgcctcgattgcagccgatggaaccgatagcttgctgggggagcgcggcaagggcgtattccatatccacacgctcggctgccagatgaacgtgcacgattccgagcgcatcgccggcgtgctggaggccaatggctacgtccctgcaaccgaggaccagatcaatgacaatgacctcgatctgctggtgctcaatacctgtgcggtacgcgagaacgcagccgaacgcatgtatggcaccatcggccgattcaatcgcgtcaaactggttcggccgaacctgcagatcgccgttggcggctgcatggcccagcttgaccgcaagaagatcgcggatactgcgccatgggtttccgcggtgttcggtaccaagaacatcgaagatctgcccaagctattggatcagaatcgtgcgaccggcaaggcgcaggtccaggtcactgaacaattgcggcagttcccgagccagcttcccgccgcccgcgcctcccgcatcagctcgtgggtggcgatttccgtgggctgcaataacacctgcacgttctgtattgtgcccaccacgcgaggcaaggaaaaggaccgccgccccggtgacattcttgatgagatccgccaatgtgtggccgatggtgccaaggaggtcacgcttctcggccagaacgtgaactcgttcggttatggtattggcgatcgatacgctttcagcaagctgttgcgcgcctgcggaaccatcgacggtctcgaacgtgtgcgcttcacttcgccgcacccggccgccttcaccgatgatgtgattgcagccatggccgaaacgccgaatatcatgcatcaactgcacttcccgctgcagtccggttccgaccgcatcctgcgcgcgatgcgccgctcctacaggtccgccaagttcctcgatatcctcggtcgtatccgcgaggccatgcccgacgcccaaatttccaccgatatcatcgtcggattccccggcgaaaccgaggaggacttccagcagaccatggacgtggtgcgccaggcgcgcttctcctcggcgttcacgttcatctactcgccacgccccggcacgccggccgccgcaatggaacagattccgcgcgacgtggtgcaggaccggttcgaccgactggtggcgttgcaggagcagatcaccgaagagaacctcgccacattcgagggccgcgacgtcgaagtgatgatcaccggcaaactcggcaagaaggacaccgacacccaccgtgtcaccggccgcgagaaaaccggcgtgctggtgcacatcggcgtgcctgaaggcgaaccggtacctgaaatcggcgatttcgtcacggtcaccgtcacacacgccggccgccataatctgcttgccgaccccgatgtggccgctggacagacctattccgtgcgacactgagggggcgtatatgacgcaacgagtcgtctccatcgtcggtcccaccgcgtcaggcaagacggggttgggcatcgccatcgcccggcgtcttgccgaagcgggggagcgggccgaaatcgtgaacgcggacgcctaccagatgtaccgtggcatggatatcggcaccgccaaacccaccgccgaagaacaggcggccgtgccgcatcatctcatcgacatcatcgaccccgaagacacgatgagcgtggcccgattccagcagcttgcgcgcgagaccatcgccgacctgcaatcacgtggcatccggccgattctcgtcggcggctccggcttgtacgccagagcggccatcgatgacatcacctttcccggcaccgatcccgacgtgcgcacacgtcttgaggaacgcgagaaaaccgagggtgccggtgctttgttcgacgagctgcgggccaaagaccccgaagccgccgcgcgcatggacccacgcaacccacgccgcaccatccgtgcgctggaagtcatcgagcttaccggcaaaccgtattcggccagcctgccgcgctaccggtacgtgattccgtccgtacagatcggactcgacctggaccgcccggatttggaccatcgcatcgacctgcgcaccaagcagatgtatgacgatggattcatcgaagaagtcgaacggctgcgcccgcatctgggtgccaccgccgtacgcgcgctcggctatcagcagatcatcgacctgctggacggcatctgggatgtgaacgacgccttcgcggacatcgcacagaaaaccaagcgactcgcccgcaaacagatgggatggttcggccgtgacccgcgcatccactggctgcaggccctgaacccgaaactggtcgacaacgcgatggccattatcgcgcacgccgacgccggcgactacgacccgatcgacgcccgagccgacgaatacacccagcatcatctgggcgatatcacggcgtaggaatcagccaaaggccggtgcaatcacccgcaatcagtgtgcaggcccctgattccagccggcgatcaagaacacgcgcgtcggattcgccgggcgtagtatcgcgtcgaacatcgtctccagtgcagacgtgtcgccccgatatgccgagtgcttggcggagcgatactcctcgcgcgtcactgagccccagtcgagatcccagccggcgtcatgcgccaagcgtgaaccgaatatacgcagcaccatcgcattgccgccacggaacggatgcagataaccgagctcatcataaatagaagcgaacgcgtgaacgaacacgtcgcgatccaacgcatgcaggttgcgcttgtccgccaactccatcgcgatgttgtgcgcgccggtctcaatgagcccagccgggaagaacgcctccggattcgcggcccgagcccggtcgttcgtcacctcgcgtgtggtgtttgaggtacgcaacttgcccgcatcctcgaacacgccttcgaacagccccttatgaatggcggtcaactcgtccaagtcgccagacggattccaccgacgttccgccaacaatacggtacgtgcgaacaccgcatccgcgcgatccgtggcatgatcatccagactgccggcagccagacgatcctttccggcagggtcggcggcggcgcgcagacgcatggcggtctgctcgtccgccacgtcgatgagatgggtcacgggctccaagccacgttcgtaggcaaccgcggcgcgcatcgttgcctcgcccggcgtcatcgcttccagtgcgcagttcttgagtgcaaatgcgactgcgctcgcacgctctgcgggtgtcatgcaacccatgataaggcatattcgcgctccagcggggaatcgactcggacgaacctcgacgaaccgcggcgaatcggctgtcgggattcgtcaatcgaccatatcgtcacggtgtcgtcaccaaccatgcacccccgtactagtagaatcagacccgatatggcacgaacagcatcctccaacagcaccaaaccccgtaaatccaaagacaacgggtctacccatgatggcgaaaccaaggtccagcccgagcttgacctcgaacctgagccgttgtggaagaagatcctgctcgcgattccgcgcgcgttcggctccggcgtacgcgccgtcaccggcgtcggcgaatacgacccagcctaccgtcgtgacggtttgtgcttcctgctgctcgtgctcgccgtactgttctgcgcgtccgaatggttccgtgtcagcggtccattcggccagctgcttcacgccatcgcggccggtgtgcttggtctgatgagcgtcgtgctgccggtgttgctcgccgccgtggccttccgactcatgcgcaattccggtaaagggtccaataacccgcgtgtggtcaccggttgggtgctgctcatgtggtcgatttgttcgatcatcgacgtggcgatcgccgccgaccacaccggattcgacatcacgattctgcaatccgccggcggcctgttcggcttcttcctcggctcaccgctcgcctggggcctttccaacgtgttcgccatcatcattttcgtggtcgtcggcctgttctccttgctgatgattaccggcacccacgtcaccgatttgccggaggatgcgcgcaaaatcgcagctaaaatccaacgcaaaccgtatgtgccgatgggccaggaggccgacggaagcgccagccagttccccaacgaggtccgtgtgggagataccacactcgcctttgccgacggtgttccctcgcatgacggcaacgacgacggcaacgacaacgatcaggccggcgatgcacggcccagcctgttcgcacgactgttcggccgcaaatccaagaccgaagacgacaaaacccttgacaagtatgctgccgacgatccgttcgaccgtgccgccagccagcatggtgccaccgccgaaaccccggtggtcgatccgatgaccggcgagattaccggtgcgcgaaccattgcatcgtcttcgtacgacggtcgtccgcacctatccagccctgcgcctgctgccgatgcggatgatggcgacgcttcccgaacccgcgtcatcaccagtggccagaccatcgccatgcccggtgggggagcggtagacgatccgtgggcacccagtgccgcccaggccggtactgtcgcgctcgcaggggcagccggggcgatgggagcggccggggccgccggtgccgcggccgcggcagccgcgaccggagcctacgcaggcgccgatgcggatggcagcggagtcggccagggcgtgcccaatacggacggacagccgaatgccgccgccggcaacggtacagacgacgacgccaataggccgtatcagttgcccgacctgaacctgctgaccaaaggtcagccccatgcgatgcgcaccccggccaacgatcgcgtgatccgggcactgacttccaccttcgaacagttcaacgtggacgccaaagtcgtcggcttcctgcgtggcccttcggtcacccaatatgaggtcgagcttggccccggcgtcaaggtggagaaagtcaccaacctgcagcgcaacatcgcctacgcggtggccagttcggatgtgcgcatcctttcaccgattcccggcaagtccgccatcggcatcgaaatcccgaacgaggatcgcgaaatcgtgcacttgggcgacgtattgcgctccgacaaggccgtgggcgacccgaacccgatgctctccggcatcggcaaggacgtcgaaggccacttcgtgaccgccgacctgaccaagatgccgcacctgctggtggcaggtgccaccggttccggtaagtcgagttttatcaactcgatgctcacttcgatcatcatgcgtgccacgcccgaacaggtgcgtctgatcatggtggatcccaagcgcgtggaactgtccgcctacgcaggcatcccgcacctgctgaccccgatcatcaccgatccgaagaaggccgcacaggccctcgaatgggtggtcaaggagatggatgcacgctactccgacctcgaattcttcggattccgccacgtcaaggacttcaacgaggccgtgcgcgccggcaaggtacatgcgcccgccggctcccagcgcaaggtggccccctatccgtacatcctcgtggtggtcgacgagatggccgaccttatgatggtggccaagaacgatgtggaaagctccatccagcgcatcacccagctggcacgagccgccggtgtgcatctggtgctcgccacccagcgtccgtccgtggacgtggtcaccggtctgatcaaggccaacattccatcccgactggcgttcgccacctcgtccgccaccgattcgcgagtcattctcgacacggtcggtgccgagaccctgattggtcagggcgatgcgctgttcctgccgatgggttccgccaagccgattcgtgtgcagggctcgtgggtgtccgaatccgagattcgcaaggccgtggagttcgtacgcacccagcgcaagccgaagtaccgcgaagacatcgaacagatggccaaggaagctgagaagaaagacagtatggagcctgacgaggagatcggcgacgacatggacgtgctgctgcaggccgccgaactcgtggtcaccagccaattcggctccacctcgatgctgcagcgcaagctcagggtcggcttcgccaaggccggccgactcatggacctgctcgaatcgcgcggcgtggtcgggccgtccgaaggctcgaaggcccgcgaggtgcttgttcagccgcaggacctgccgcaggtgctcgccttcatccgaggcgaaaccagctcgctcgaagccagcgccccgcaacaacccgaactcggcgaataattcacccatcgacctccctctgatgagggaggtgcccgaaggggcggagggagagaagcgcggacagcatcagcacgaaacctgattcccgaataatagcagtcaatatccagccaccactcactcaaggtaggagtatgggggtaacgtgaacactatggatgagaacacaatggacaagcagtcatcgcccaaatcatcgctgttcgacggatggaacgcgccgccgaacctggtcacctactcgcgcatcgtactcgtggtgattttcctgacactcgacattctcgccggttcctggggtgagaacaacctgatcatgcgttgggtcaccgcggtactgttcatcatcgccgcgtccaccgataaaatcgacggttggatggcccgcaaatacaatcaggtcaccgaaatgggcaagctcatggatccgatcgcggacaagctgctcacttgcggcgcaatgattgtatgctccgcgttcggcgagctcggctggtgggtgaccatcctgttcctgattcgcgaaatcggcatcaccgttatgcgcttcttcgtcatggagcgtccgggcggcaaggtcatcgccgccgcatggcccggcaagctcaagaccgtattccagtgcgtgggtctgtccatgctgctgctgccgttctggtcattgggtaacggacaggccacgccgttctggatgaccgcttactacttcctgacctacgccatcatctacgtggcattggtcctgtgcctctactcgggtgccgtgtacctgtacaacacgttcgtcgccccgaagcggaggtgacggatattccaatgcaggaattgtgcgacagtctcgcggccggcatcctcaagatctgcgaggcgaacaatacgaaaatctcctgcgctgaatccctgaccggtggcctgctcgccgatgcgttcgtgcgtattcccggtgcctccaacgtgttgctgggctccgctgtcacctacgacatcaatgccaaggcctcgatcctacacgtggacaaggccctattggatcgagaaggcgccgtacaccccgaagtcgcccggcagatggccatcggtgccgctcgcctatacagccagccggaatacggcgaccgaatcatcggcctttccaccaccggcgtggccggccccggtccggacggtgataagccggccggactggtgtatgtgggcctgcgcatccccgcaagcctcaccgcggaccatgccgaagtgctcaaagccgtcgaactccatcttgatggcatgcgcgaagaggttcgtcgcctcaccgtattccacgttctgcaaaacttgagtctattcacagcaagttttaaggaataaaaccacgggaccgtcgtgttgtacatagtggaaacactgaaccgaccttggaaggggcgatggcgatggaaacgatgacccgagtgaacgaacagatggatgtggccgccaagaagccgatggctgtgcagctgggtgtcgcccgtatgcgtgaactgactccggcccagcgccgtgcggtgatgttcgcccagcagcaggtgctcaaggcgcaggctgccaagaaggccaaggatcagcgtcaagccgttcgtgaacgtatgtgggatgaggattcgccgtcgtacaagccgactgccgccgccgagcccgtggtggttgaggaggagcctcgcgaggtttcgctgcgtggtgctatcggctacgtgctgcgcgaactgcgtacgcgcgatcgccgcacgttgcgtgaggtctccgagaaggcgggcgtttcgctgggctatctttccgaagtcgaacgtgggcagaaggaagccagctccgaactgctgagctccatcgccgatgcgctcggagtctccacttcgcgcatgctgcgcatggtggccgattatctcgactcggtcgagggctgatcggttggcggtgtgaagccgcatcccgtaatctatgtctagctgtgaacccgtatcgcttgtggcgatgcgggtttttgctgtcctgcgggtggtggcacactggcgtgtatgcgtgaacgggaattctgggaattacttgaagaggtgttcggtcggacctacggtcgttcgctgtcgcgtgatcaacggatgtccaaattggcgaatatgaccgtggtcgaggcgctggacgcgggggaggagccacgcgtggtctggaatgtgctctgtgaccaaatggaggttccggactccaagcgttggggccacgatcataacgcgccgcccatgcccgccgtctgacactgcgggattacggagtcgctgaatcgtgaaattggcgatttcggcgtgttgcacgccaaattcgaacaaatgttcgtgtgtgtggttatagttattcacagtgacaagaagccgcatacgtgtgcacagggtgcttgtcatccgccataagccttaccgcagtaggtcttagggaggtcagatggccgagctcgggcaagctggaaccacaatggttggtttggattgcctcacatggcatgtccgtcatacggtggaggcatccgattcgcgcacgacttcgacaaggagaagatcatggcacttgagaccaagccggccaaggacccggcagccgaggacaagcacgagctcgatcccaagcgcaaggcggcgctggacaccgcgctggcgcaggttgagaagagctttggcaaaggttccgcaatgcgactgggcgaccagcccgagcagaacgtcgaggtgattcccaccggttcgttggccctcgatatggcgctcggcatcggcggcctgcccaagggccgcatcgtggagatctacggccccgaatcatccggtaagaccacgctcgcattgcatgtggtggccaatgcccagaagaagggcggcgtggcggcctacatcgatgccgaacacgcactcgacccggcctacgcccgcaagctcggcgtggacaccgactcactcatcgtctcccagccggataacggcgagcaggccctcgaaatcgccgacatgctgattcgctccggtgcacttgacgtcatcgtcatcgactcggtcgccgccctagtgccgaaggccgaaatcgaaggcgaaatgggagacagccatgttggtttgcaggcccgactcatgagtcaggcgctgcgcaagatgaccggcgcgttggctcaggccggcaccaccgccatcttcatcaaccagctgcgtgaaaagatcggcgtgttcttcggcaatcccgaaaccaccaccggcggcaaggccctgaagttctatgcctccgtgcgtctcgacattcgtcgtattcaaaccctgaagaatggcgacgaagcggtgggcaaccgcacgcgcgtcaaggtggtcaagaacaagatggccccgcctttcaagtccgccgaattcgacatgctctacggtgaaggcatttcccgtgagggctcggtaatcgacatggctcagcaggttggcgtggtcaagaagtccggttcgtggttcacctatgagggtgatcagctcggtcagggacgcgagaaggttcgtcagttccttaaggacaacccggccatcaccgaggagattgagaataaggtcaaggccgagttcggtctgatcggttccgccgaccagttcgcggaagatggcgaagccgcagcagcggccgctgtcagcgaggccgccgctgccgacgtggccaaggacagcaaggccgcagcggcgcctgctgccaaaacgacccgtgccaaggccggcgcagctaaggcctgaacatgattagtgccgaagcattcttgcggcgcaatcctgttgcgtcgcaagacatgcccattgccgagcagcgtgttcagtcgaaaccgccgggacgtttttctcgacgggggagagacgctgccgttgtcgaagatcccaatgatttggacgcttgccgcgaggctgcattgcgtttgctggacgcggccccgcgtgcatccggcgcgttgcgcgaacgattgctcagcaaaggctatggcgaggcgattgtggacgaggtcatcgaacggctgattcgcgtgcaactgattgacgaccgcgcttatgccgaatcggccgtacgctattgtgccggtcgcatgatgggtcgtcgtggtgcggtcctggaacttgctcgcaaaggcgtggaccgcaaactggctgaacaggtgtgtggcgaagctgagcaaaatggcatctttgaagatgccgcatgggaattgggccgccaaatagcccgcaaaacccatggcctcgatcgtcaggtccgtcagcgtcggttttggtccgcaggcggccgcaaaggacacagccccgaaaccctccgccgagtcgccgccgaattgttggtgtagccaagaaaaaaatgagacctcttataccccgggttctgtcgtgccgtgcgcgaacgcacggcacggatggccatccatctcgacctgacgttgccgccaggctctagcagcctacccgatgacacgggcgagcagcccttaccgccatctgcttggccttgctcccgatgaggcttgccatgcgacctactgttaccagaggcccggtggtctcttacaccgccgtttcacccttacccgtcgaggacgggcggtctgttctctgttgcgctatctctcaggtcaccctgggcggacgttatccgccatcgtgctctatggagcccggaagttcctcagccgatcccaatgaagatcacggccgcggccatcaagaggtctcaagcctgcaattatacataaggtgcggaaaaggcggcatcccgccctgcggtgaggccatgacgttgcccagttatcctgttttctccatagttgggcatagttgggcgattcgtgaacgacgcgccgaatatcggatggggcgtgtcgggcgtgttgtggcgtgtcgtatggagacgaatcaaatctgtaagagcttggtatgtgcgagaaagagcaagaaaacgttgcctatccattgcagtatttaccatgacgaacaaacgagccagcctgataaaccggtatcaaatcttcttataggagactgctgccaaaaccccagtatatacatcgtttcattgcagagaaaagcccgggaataaacatatattctctgggcgagtttccggccgttcacccattgttcgtctacaatgaaacatacccggtcggtgatgatgccgttcggaacacatatagcgggttacaccgcttgagttagaggaggtcaacatggaaatcgtcgttaccggacgccacacgcaggtcaagcaaaggttccgtgatgtggtcgagaccaagatgaatcgtgtgaccgctatcgccccggatgctcagcgcgcgcagatcgtgctgacccatgagggcaacccgcgtcaggccgataccgccaagcgcgtggaaatcaccgttatcgccggacgtaccgtggtgcgtgcggaggcttccagcaccgatgaattcagtgcgctggacatggcgctggataagttgacgctgcgtctgcgtcgtactcgtgaccgtcgcaaggatcaccgtcgtggttacgcaaacccggtcccggtggatctgggtgttatcgccccggagcccgagccggaggtgtcggaggaagagccgaacaacagcccgcaggctgcggtcgcctccgatcttggccctggcgaatccgtggaggtccaggttggggatacgccgattgtcatccgtcgcaagttgcacatcgccgagcctatgagcatcgacgaggcgctgtacgagatggaactgatcggacacgatttcttcctgttcgtgaacaaggagaccggacgcccgtccgtcgtctatcaccgtcacggttggagctacggcgtgttcgaaatcgacactccggagaatgtcaagaaagcctgagggtaagggctgctgacacgatcagctgataccgcatggaccgcttccaatatggaagcggtccattttttcgtaaaaaggtcgaaaaattcgattgctgacggtgcgaggcgctattctggtacgcggacaccaccacttatcagtcaagggagaacccagtggtcgatattgttgacaaagccctgcgaatgggtgaaggccaccagctcaagaagctggagaacgtggccaaggccgtgaacgccctggaggacgagatctccgccctctccgacgaggacctgaaggcccaaaccccgaagttcaagcaggaaatcgaaaacggcaagagtctggacgagatcatgcccgaggcgttcgccaccgtgcgcgaggtctccaagcgcaccctcggccagcgtcacttcgacgtgcagctcatgggcggtgccgccctgcactggggcaacatcgccgaaatgaagaccggtgaaggcaagaccctggtcgccaccctgcctacctacctgaacgctctcgaaggcaagggcgtgcacgtggtcaccgtcaacgactacctcgccagctaccagagcgagctgatgggccgtatctaccgcttcctcggcatgaacgtcggctgcatcatcaccgagcagaagccgccggagcgccgcaagcagtacaacgccgacatcacctacggcaccaacaacgagttcggcttcgactacctgcgtgacaacatggcctgggagaaggccgacctcgtgcaacgcggccaccactacgccatcgtcgatgaggtcgactccatcctcatcgatgaggcccgtaccccgcttatcatctccggcccggccgaaggcgacgtgacccgctggtaccgtcagttcgccaagctggtgctgaagctcgcccgcgacgaggactacgacgtcgacgagaagaagaaggtcgtcggcatcctcgacccgggcatcaccaaggtcgaggatttcctcggcatcgacaacctgtacgagccggccaacaccgccctgatcggctatctcaacaacgccatcaaggccaaggaattgttcctgcgcgacaaggactacgtcgtcacccaaggcgaggtgctcatcgtcgacgagcacaccggccgtatcctgccgggccgccgctacaacgagggcctgcaccaggccatcgaagccaaggaaggcgtggaggtcaaggccgagaaccagaccttcgccaccatcaccctgcagaactacttccgtatgtacgacaagctcgcgggcatgaccggtacggccgaaaccgaggccgccgagttcatgaacacctacaagctgggcgtgctgccgatcaagaccaacaagccgatgatccgcaaggaccaggacgacctcatctaccgcaccaagaaggagaagctggccgccatcgtcaaggacgtggccaagcgacacgccaagggccagccggtgctgctcggtaccgcctccgtggaaagctccgaagtggtctccgccctgctcgacgtggcgaagatcccacaccaggtcctgaacgccaagcagcacgagaaggaagccgccgtggtcgccgtcgccggccgcaagggcgccgtcaccgtggccaccaacatggccggccgtggtaccgacatcatgctcggcggcaacgtcgagttccttgccgacgccaagctcaagtccgaaggttactctccggaagacaccccggaagagtacgagaagcgttggccgggcactctgaacgagatcaaggcccaggtcaaggacgagcacgaggaggtcaaggagctgggcggcctgtatgtgctcggcaccgaacgccacgagtcccgtcgaatcgacaaccagctgcgcggtcgttccggccgccagggcgatccgggcgagtcccgcttctatctgtcgctggaagacgatctgatgcgtctgttcaacacccagctggtggcccaggtcatggccaagggcatggaggaaggccagccgatcgaggccaagtccgtcaccaagggcgtgcgcaccgcgcagaaggccgtcgaatcccgtaactatgagattcgcaagaacgtgttgaagtacgatgacgtgatgaacaagcagcgcaccgtcatctactccgagcgtcaggccgtgctcaagggcgaagacatccacaaggacatcctgcgtttcatttccgacaccgtcgagtcctacatcaagggtgccaacaagggatccgagaaaccgaaggactgggattgggagggcctgttcaaggcgctcaacaccgtgattcccaccaaggtcgacgaagacgaggtcaggaagatcgtcggcggcctcaagggtgcgaaggccgtcgaggccgtgcgcgacctgatcgtcgaggacgccaggcagcagtacggcgaaatggaggagaccatcggcgagaccggcttgcgcgatctcgaacgccgcgtggtgctcgccgtgctcgaccgcaagtggcgcgagcacctttacgagatggattacctcaaggacggcatcggcctgcgtggcatgggccagcgcgacccgctggtcgaataccagcgcgaaggctaccagatgtacaactccatgatcgaggccattaaggaggagaccgtccagctgctgttccacatcgacatcaagcaggtcgccaccaccgacgaggccgttgacgaggtcgaggagaccgccgaaagcgccgacaccatcgccgtggcctccggccccgacgagaacggcgaatccgtggtcgaggccgccgagggcgaagtcgaggaagaggacgaggatacggacgccaagcaggcgatcgccgaatccgcagccgcctccggggccggcgagtccacgctgcctgttgccggaccggctccgatcagccacgccgaaggcaaggtcccggtttccaagcgtccgaagagcgaagagctcaagacgccgtgggccgacggccgcaccttccctggcactggcaagaacgccccgtgcccgtgcggttccggccgcaagtacaagatgtgccacggccagaacgagaagtgacgcatcgctagttagtaactagctcatggctccccacacggggagccattttctatgcggttcatcagcatgtattcgtgcggtgccgtacgcgcgggacggcacgcgattttcgcggattttgacgtcgtatcccacactgttgcgggatggcacgagtgtcaatcgattgactagcgtggcgtcccgcagtacgaattacggaatcgttgaaattccgccattctcggtgttatggtgtcacggtccacaaagggtgatgtgggacggcacggctaaaacggcgaaaatgagctgccgtcccgcagttttacgggatagcacaaaaaagaggcttctgctgttttcgtgggttgggctcttggttgtggtgggcgtatgtcgagtccgccgcggcggagcatgacgagggcgatgggattgttcgcgtggtggaagccgtaggccatgcggatggtggccttgatcctgttgtcggacgcctcgagcctggcgtttgaacagcccaattcgattgtcccgaggatgtcgggcccatgacggcggatctttcgggcgagttcgacgatctcggggatgcggctgtgggacgcccggaaca

SEQ ID NO: 3801 - DNA, 9318 bp, Unknown
  R35_2m  MAG No. k141_3984
cgccgcaggcctgctggtcgagaaggaagtcaaggccctgtccaaggccaccgagaacccggagcgtccgttcaccgtggtgctcggcggttccaaggtctccgacaagctcggcgtcatcgagaacctgctcgacaaggccaaccgtctggtcatcggcggcggcatggtgttcaccttcctcaaggccaagggctacgaggtcggcacctccctgcttgaagaggaccagcttgagaaggtcaagggctacatcgagaccgccgagaagaacggcgttgagctcgtgctgccgaccgacgtcgtcgtgaacgccggcttcccggccggtgacaccccggttgctccggaagtcgttgccgccgacgccatcccggccgacaagatgggtctggacatcggcccggagtcccagaagctcttccacgacaagatcgtcgactccaagaccgtcgtgtggaacggcccgatgggcgtgttcgaggttcctgagttcgcctccggcaccaaggccgtggcccagggtctggtcgacgccaccgcagccggtgcgttcaccatcgtcggtggcggcgactccgcctccgccgtgcgtaacctcggcttcccggaggacggcttctcccacatctccaccggtggcggcgcttccctcgagttcctcgaaggcaaggagctccctggtctgaaggtgcttgagtaatccattttctagctcccctccttgaggggagctacgtattttttggaggggaaacatatggcgtccaaacgcattccgttggtggccggcaactggaagatgaatttcgaccatcttgaagccacttacttcgtgcagaagctggtatggctgttgcgtgacgctcgctttgacttcaaacgctgcgaagtcgcgcttttcccctcgttcacgtcattgcgcagcgtacaggtgctggtcgaagccgacaagctccatgtcgcctacggcgcacaatccgtttccgtgaccacccaaggtgccttcaccggcgatgtgtccgcggacatgatcgcccatctcggctgctcgtacgtcatcgtcggccactccgaacgccgcaaataccatcctgaagatgacgccaatatcgtcgatcaggtacgtgccgtgctcgccgccggcatgcagccgattttgtgcgtcggcgaaagcttcgaggaacgacgtcaaggcattgaactcgatttcgccgtgggccaggtacgagacgtcacccgcgatctcaacgaagaacaagccgccgaactcatcgtggcctacgaacctgtctgggccattggcaccggcatggtggccactccgcaatccgcccaggatgccgcaaacgccatccgcaacgatttgaagaccacttttggcacgaaggtatccgatagcgtacgtatcctgtacggcggatcggtcacctcgaaaaacgcggcggaactcatttcccaacccgacgtcgacggcttcctgatcggaggggcggccctggatgttgaggaactcgccaaaatcgctcgactggcactgaaatccacgaaatcacggaactaataccacggttttcccgtgtgtgcgctatgctggtcaacagtccaatcaatccggaggtaccctgtgaccgctcttaagatcacgctgcaagtcatcgtcgtgctgctcagcttcgtgctgaccctgctcatccttatgcacaagggcaagggcggcggtttgtctgacatgttcggcggcggtctgacccagaacgccggtacttccggtgtcgccgaaaagaacctgaaccgttggaccgttatcatcgctctggtgtgggtggcattgatcatcggcctcgacatgatgaccaagttcaacctcggctgatcggcttgcacgccatatagacttgtcgctcgcgacccatgaccgttaccgtcggtcatgggtcgtatgcgttctatcgagtattacgaaaggacatcaccatggtcactatgaaccgcaacaaagtcgttatcgtcggcactggccaggtcggtgccaccgccgccttcggcatcgtcacgcacggtctgtgcaatgagctcgtgctcatcgaccgctccgccgccaaagccctgggggaggcccgcgacctcgatgacggcagcgaattccaggaccgccacgtcaaggtgcgcgccggcgactacgccgactgcaaggacgcggacatcgtcgtcatcaccgtgggccgcaagccgccggccaactccaaccgcatggccgaactcggcttcaccgtgggccttgtgggcgaagtggtcgacaacgtcatggcctccggcttcgacggcgtgatcgtcatggtctccaacccggtcgatgtgatggcctggtatgcctggaaacgttccggcctgccgcgcacccaggtgctgggcaccggcaccgcgctcgacacctcgcgtctcaagaccatcatcggcgaagagaccggcctcgacccgcgtaacgtgggcggcttcgtgatgggcgagcacggcgactcccagttcaccgcatggtccaccgtctcgctcggcggcaagccattcgcccgcttcctggccgacaaccaagaccgtttcgcctccgtgtccaccaccgaaatcgaagagaagacccgcacccgtggcgatgagatcgtcgcggccaagggcggtaccaacttcggcatcgcctccaccgtggccggcatcgtgcagaccatcctgtgggacgaacgccgcatcgtacccgtctccaccctgctgaacggcgaatacggcgaacatgacgtgttcctcggcgtccccactgaactgcgcgccaatggtgccaacgagatcgtcgaactcgatctgagcgaggacgagcaggccaaattgcaccattccgccgaactcgtgcgtgaacactgcgaggggctgctgtgattctcgacgccatcacaccgaaacaaccccgactgctggtcgccgacctcgacggtacgttgctgcacgacgccgaggtattcgaggaccggttcatcacccagcgcagcatcgacaccatcaaccgcgcgcacgatgccggactgaaattcgccatcgccaccgcgcggccggtgagtaccggcctccagttcgccgaaaaactgccggtggacgccgtaatctatctgaacggtgccctcatcgatttcgacccggcccactccgacttcgacctgctcacctcaggtgccacgccggccgatgagaaccatttgatcaagattggcttctcctcacggcgtgcctgcgaagtctgtctgttcctgctcgatcgcatgcccggcctgaagctcggcatcgtgatgaacgacgtgcgctacaccaacttcgatgtgcgcgtgtattggaaaacacaggccttccaatacacggacttccacgacgtgcccgaaggcgtggcggataagatcgccatcttccccgagcctgaacagtggaacgagctgcgtgcgctgattccgccggacttcgacatctccattagcgaaggcgtgatgtggatgctcatgaacccgcaggccaacaaggagcacgcgctgcacctgctgtgcgaacgactggacgtgccgctcgaacagaccgccgccttcggcgacgacctcatcgatatcaacatgatgagcgaatccggccggggtgtggccgtggccaacgcgaaccccaaggtgttgtctatcgccgacgagatctgcccgcccaacaacgaggacggcgtcgcccaatggattgaagcgcagttgggctgaaccggccgagactcgagaacacgccaaaattgaacttgtgttgaaccgggagtatgctttgaactgttgttcaaaagataaattgaactcccggttggaggcataaggatatgagcgtatcggtgtttgcggaacgtctgcgcaatgcgatgaacagtaggggattgaagcaggtcgatttggtgcacgccgccgaacatcgtggcgtaaagatgggcaagagccatatcagccaatacgtggccggcaagaccatgccccgcgaagacgtgctcgaattcctggccagcgaactggacgtcgacgcgaactggctgcgcggcgaggaatccaccccgcaattgaactcggacgcttccaacagcgtcacggacggcgaacacgccgccacgccgcttgccacgggcaccgccaagcccctgacggacagcgagattcccgtgggccgccgccgtaccttcggcaaatcgcacaagctcgacaacgtgctctacgacgtgcgcggcccggtcgccgacgaggcgatgcgcatggaggccaacggcacccacatcctgaaattgaacatcggcaatccagcacccttcggcttccgcacgccggacgaagtcgtctatgacatggcccaccagctcaccgacaccgaaggctactcgccgtccaagggcctgttctccgcgcgcaaggccatcatgcagtacgcgcagctgaagaacatcccgaacgtcaccatcgacgacatctacaccggcaacggcgtcagcgagctcatcaacctgtccatgtccgcgctgctcgacaccggcgacgaagtgctcgtgccctccccggactacccgctgtggaccgcctgcgtgaacctggccggcggcaccgccgtgcactacctgtgcgacgaacagtccgaatggtatccggacatcgatgacatccgctccaagatcaccagcaacaccaaggcgattgtcatcatcaacccgaacaaccccaccggcgcactttacccaaaggaggtgctccagcagatcgtcgacatcgcgcgtgaacaccagctcatcatcttctccgacgaaatctacgatcgcctcgtcatggacggcctgcagcacatctccatcgcctcgatggccccggacctgttctgcgtgaccttctccggcctgtcgaaatcgcacatgatcgccggctaccgcatcggctggatgatcctgtccggcaacaagcgtatcgccaaggactacatcgagggcctcaacatgctcgccaacatgcgcatgtgctcgaacgtgcccgcccagtccgtggtgcagaccgcgctcggcggccaccagagcgtcaacgactacatcgtgccgggcggccgcgtgcacgaccagcgtgacctcgtttacgacatgctcaaccagattcccggcatcaccgccgtcaagccgaaggccgcgttctacatcttcccgaagatcgacgtcaaacgcttcaacatccactcggacgagcagttcgcgctcgacctgctgcatgacaagcacatcctcatcagccacggcggcgcgttcaactggcatcgccccgaccacttccgcgtggtgtacctgccgcgcatgggcatgctgcacgaaaccatgggggagctcgccgacttcttcagctactactggcagagctgatccttggtacaggcgaacacgatcgatgccgggctgggcaccaaaccggtgccccgtctggccctgaccatgtcggtccccaccatcgtggcgcaggcggcgaacgcctcgtacacgatcatcgaccgactgttcatcgggcacatccccgaagtgggcaacgcggcgatgaccggcgtgggcatctgcttcccgattctgccggccgtcaccgccttcgcctcgctgatcggcgcaggcggcgcgccgcgcgcctccattgaacttgggcgcggcaacttcaagaaagccgaacgcatcctcggcaccagcgccgcgttcctcatcgccatagccctgaccctcaccgtgctgctgcagttggcgaaaccactgtggccatggtctccgtactcatcggcaccggcatatccatccttcttgaccccgtgttcattttcgtgttcggatggggcgtcaggggagcggccgccgcgaacgtgctcgccacattccccggcttcttcgcctcatggttcacctcggaacagacggtcatcgacatcgtgacccgcatgatgccgattttcgtctgcggctggggtatcttcggcatccagatgggcgcgcaatgcgcactcgtcggcatgggccaggccaaacagtcggtgttcttggccatcttccgcaagatcatcctgctcgtgccgcttgcgctgctgctgccgcactggatcggcgtcaacggcatcttcatcgccgaacccatctccgacgccacctccggcatcgtggccggcttcctgttctatgccacctaccgcaagattcggcgagatatggtctagactcctgattcaatggatgtgccgtctcatgcgttgcgaaacacggaacggatagaatgcctcgcaaaacgggtgcccgttgtttcgtgatatgaaggagattttatgccggtggtgtcgcgtcgtgcgcagccaacgtgatggccataatcgccgaaagcagggagaacaatggcagcacgcacaacacgacggtcagcagtcccaaagcttcacggccgatgcaataagcgacaagacctgcattgtcagttgccgatagcgctgggcagaaatcggtgtgtctaccagtgttgtagctgtaggtaaagaacgtgagacctgaccagaacagggcaacgggaacagagccgatggcgcgaaaagccctgtactcccgcaacggtcagacagagaatcgcgacaacactcagcgcagtcaccgtcataaaccacagtggtgaggtgacgcagactccataatcgtcagttgcttggcccgagagatagtaggtcattctgccaatcgccggacagttcggatgcagcatcatgccgccccaaatgcgctcatatagtggtgcgaacgatacaccggcaccgctgagcgtcgcaacaaccgccatcaccgaccgaccgccagactccggcacagaccgggaagaactaccgtcgcggagcatcggcgataccaatggcaacaccgaggatagccgggaccacccagccgagctggtattgctgcaagggcagcatggccagcgtcgtgtccagccagccgatggagccgccaaagacggtgatcaggctggagatgcaggtggcgaaggagtcgatgcccaccagcagcacggtccagaagtagacatgcgggaatcgcgcgccgagcgacttgtgggtcagcgccagcagcaccagcacgatggcgatcggatacagtgcggacaacaccggcacggaaaccttgatgatcgcgcttagcccggcgttggacacgatgaaactgaacacggtgaagatgacctgccaggtgcggtagctcaacgttctccctgcaacggtctggaaccgagtgtggaagtaggtggcgcaggtaccgatcagtccggtgcatacgttgaggcaggcgatgacgaagacgataccgaggaacgcggtaccgaacgcgccgaacagggacgaggtgagattggtgagcacggtcgcgcccgtgtctttggcgggatcgatggtggcgatggcaccggacaccaagcccacgtagctcagtgcgccgtagatcacgatcagcagcacaccggtgccgagtccggcatacgcggtctccttctgcacttgcgattcgtcatcgacctgctgggtgcggatattcgcggaaatcacgatgccgaaatagagcgcggcgagcagatccatggtctggtagccgtcgaggaagccacgtgcaatctggtttgtggagtagtcgcccatcggtttggccggggtaccgataccgtggattaggcaggcgatgaacaggacggcaatcagcaccagcagcaacggtcccatgaatcggccgagcactttggagagtttttcgggatgctgggcgaacaggaacgccagtgtgaagaacacgagcgagtagatgagttgggccagccagccgtaggaggacggcacgaaaggcgccaccatcatttcgaacgaggtggtcgccgtacgcggaatcgcaaagcaggggccgatggtgagcatgatcgccaagccgaggaacagggcgaatttgggggagacccggccggcgagtttgtcgaagccaccggcgaaggtgaccgccagcacgccgagaatcggcaggccgaccgcggagacgatgaagccgatggccgccggtatggtcgcggaaccggcctgagctccgacaaacggcgggaagatcaggttgcccgctccgaagaacatcgaaaagaaggtaaaggtcatcaccaaccgctggcgtgcaacaagtttgttcattacggttcggcctttctctcatgtgctcgtactactgtagcaacaaacgtaagaagccccgaccggttggggtcggagcttctgtgagctaatcagttaatgcgcgaaatgcgcatcagctaataatctcaggcgttcacgcggtcgatgccggactggacgtcagccagcacggaatcccaggacttgatgaaggcggcgacaccgtcggcctccagcttgtcagtgacgtccttgaggttgatacccagctcagccagcttgttgatgacggcgtgggactcctcgtaggtgccctcgatggacggagcgccgttgccgtggtcggccagagcgttcagggtcttctccggcatggtgttgacgatgtgcttggcaacgagctcgtcaacgtacttgcagtcggagtaggcggcgttcttggtaccggtggaggcccacagcggacgctgaaccttggcacccttggcagccaggtcggcccaacgcggatcctcggcaaacttcttctcgaagagctcgtaagccaggcgagcgttggccacagcggccttgccctccagagccttggcctcgtcggagccgttggcttccagcagcttgtcgacagcggtgtccacgcgggagacgaagaaggaagcgacggagccgatgtgcttcaggtcgtggccgttggcgtcagcctgggcgatgccctcgatgaaggcgtcgatgacctgctcgtagcgctcgagcgagaagatcagggtgacgttgacggagatacccttggccagggtggcggtgatggccggcaggccttcgagggttgccggaatcttgatcatggcgttcggacggttgaccttctcccagagttccacagcctgcttggcggtgttctcggtgtcgtgggccagacgcgggtcgacctcgatggagacgcggccgtcgacgaagtcggtagcctcagcgatctcgcggaagatgtcggtggcgttgcgcacgtcggtggtggtgagctcgcggacagcggtctcaacgtcaaccttgccgagctccttgagctgagcgtcgtacgggccg

SEQ ID NO: 3802 - DNA, 3415 bp, Unknown
  R35_2m  MAG No. k141_4036
cgcaactttaccgcaaacttatcgagccgcgcctgaccgaagccggcatcgccatcggtatgacccaactgccctccaccagcccggccaacgcctcaatgcgtttgccggaccttatcaccgcctatcgcgaagcttttcgagaatacaatatagttgttcgccaaactactaatatatgagtaatttcgcctgtatacgcccaaaatcactcatatattagtagttattgcacggcggtgacgcacagctgaaaccgccattcggcacagcggcagcaggtagaggaaggttgcggcggccaagctcaacgtgggggcgttgatggtggcgagcggcactgcaccggcgatcgaccaaggaatcaacggagcgatcaccacggcactgtcttccaaatcgatagcttgcgcggcgcgttcggattcgtcgtcgccgtatagcccgccgcacaactggtgagtgagcatgatggtgagggtttggttgcaggcgagcgccgccgcgcaagtcgcggtaatcatggtggcgccacatgcgccgatgcgatgaccgagcatctcgatgacctgctgcagccgagcaagcatccgcgtctcggcaaaaatgccagcgtaggcggaggagatgcagacagtggccatcacagtgagcatggagaggatgccgccgccgtccaggagtgcggccacctgcggattttgcgcatggtaaccgaaaataagcagccgcaacagttccgcccattccatgtgctgcacgcccacgcatatcgcgaccgaggcggcaatgctggcgagcataagcaggcgaacgtccacacgcagcaacgccaacacgatgaccagtaatgctggaactagggtaagccaatgcaaatcaaaggccgatgagaacaatccgccgatatcggttatgctgcttgtgttggttgaaacagccgctctagccgcaccgaatccggaaccaccgcttgcacacagccactccgccaccgcagccgcaacgtataccacacaactcagcacaaacggcaccgcaccagtgcgcagcatgcaggcaatagtactgaacaggttcgtatgcgtaagctgtttgaccagcaaggcactggtggaaaccggcgaacaacgatcgcccacatagacgcccgcaagaatcgcgccaccgagcatcaccgggttcgcctgcatcgacaatcccagcgacatgcagatggtacccatagtcgccgcactggcgaacgacgacccgaccagcaccgacatcgccgagcacagtagaaacgacagcggaatcaccgtggcggcgtgaattaccgcagtcgaatgggccacgatgaaggcgatggtcccgctggcccgccacagcgaggtcagtacgccgatgagcacgaaggtcaccaccacggtccccgcggaccgtacgctgccggccgcacggctcgccatcgcgcgcagcgagcaccggcgaaccagcccataccccatgaacagcagcacaccaacgaacagcgcgggaataatcgaccagccgagggcgacgctggcaaacagcaccgcacagaacagcaacatcgcgcccgcttccagcatgtgatcctctcctcttccggctacgacctcatctcagatttcatctcatgacccgcagttgcaaacatcaatgctattcgcacgagccatgactcaagataaccccagattctacgacgaacgtatggtactggttattgcgcaatcattatgactggatttagtcaccaccggaaccgcgaacagccaaactaatattgccaacgattccaccatccccaacacgattccagatgaacgcgccattgctccaggcgatctatcttcgttggcgcactgcccgtttttgctgggcaatccgcaggacatcgatggccgcatcggcgagattctgttccgtcgtgccggattcgagccgaaagtcgccgcccgttcggacaacatattgacgctgctggaactatgccattacggcatgggtgcctgcttatgcccggagcggttcctgccagcgctgcttgacggcgaacggctgcgcaccttgcatgtgctggattgcgggccggagaccgaatacgccatccgattcgacgtttcggccacaccataccgctggagcgtcattgatgatttcattcgttgcgcccgcgaagtcaccaccggcgaaggcgtgaacgaccgcggcctgtcccgcaagcatatcttcgagagcattgatcagacactgaagaacatgcagaccgactatctggacatgtacttctgccaccgattcgacgagaccaccgatctgaccgagacgctgcgcgttgtggccaacgagctcggcacgaacctgccggtgctttccatggcgtggatcctgcagcacccggagatcagctgtgtgatcgccggcgcctccaagcccagccagctggagaacaacatgaaggccgcgggctttgtgattccggctgacgcgatggccgaaatcgacaagatcactggcttccaccactttgagcgtcacgtgggctgacggatctgcggcttcctccaaccggagcgattgttaagcgccgaaatcggtatcgccttgggcctcggcctgagcaatagcggtttcggcgttttttgctgtctgctcgatgacttggccgtaaccggtcagagccgcgaacggcatgaattgggcagcccgctggtggcgagacatgtgcggatgcttgcgcgactggtgatggggcaggttgatgatgtcgtcgtatgcatgggtttcttgtagagtcatgcgcgatgacctccaatctgacggttgcggccctgaccggtggcaccgtcttccatatccatggctttgatgacggcgttgcggccgaatttacgtttcacatccagcaacgcacgctggatatcatgctcaccatctctgtcatcagcgggctcggacccatacgattgagcctcgtcatcaccgaacaggtcgagctgctcatagcgtttgccggcggcaagctcctccggcgtagccacatcatcggcgatgacggtcaggcgtctcacgagcaggcgtgaatccacaatgcgctcgtacagcatcgtcatggcctcacggatacgcgccgaagatgacgtgaaatcacccaaaccaatcgacccgaccgcgctcttgggcactttacgcccaaaccggtcgacggccaccggcccctgataacttttcgccgcacgctcagcggcacgtttcatcgcataatcggcgcatgaatcgagcttcgacgcgtccaaactgccgatgtcatagccgacggcaagcgtgagtcgattcgtcagcacgcctttatcaaccaaatcgagggccagtgcatcagccatctccttggtaatcaggcgggccg

SEQ ID NO: 3803 - DNA, 26975 bp, Unknown
  R35_2m  MAG No. k141_4233
cgaccttcttgggcgggtcgagcgggttgacgtaccgcgcctggaaactggtcgggttgccgtccgcgtccctgcggacgatcaccgatccccatttcctgcgttttctcggttgcggcctgttctccgtgtccttcattgactttccccttttaggaaattgtttgggttgactgcgactcggcggttgatgcctagcttcgcggcctcttcatatagctctttgctatcaatcatgccaagtgcaacgtagctgatgtcattatcgccagccccatagtattcgggcgaatgaatatgataagttgtatgaacaaattacgtgatataggtaaatacaggcttattaccaacggggattttgatctctgtgaggctgatgtgtttctattagactcattggttttgattgatattaggaatttttattttgatgggctgaatccgaattcggcgtcggggctccatcagcttcttgtaactatgtcgcccaataagcaagtgcgtccagacgttgtatttggttttgctttagcagagacttgttttcggcaagaggggttcgaccgtttacgttgtcggcgtatctaccgtgcggtacaaacagttgtgaattggaatcaggagaagattgataaggctttcgatagcagacatccccctgttaagcgggataaacagtgggagaaaggaaaagtctcaattccttcgccatcaatgttggggatggacgatggagatcctcgttcgttcattatgcctgcatatggcgctttacttcatttgcttaaactggtgcaaggagccaatagacataatggtgtcgaaaagtttcaggagcattgcgaatgggtccgtgaggagcttggatgtgtttctgcatacgcaagagtgatagcggctgctcttctcctaggagatgaagcaagcaaggggaaagcacgctcacttcttaaagtcgatcataagaggaaaagtctaggacaaaaagcatggaatgccgcatgggatgcatggtttattcaggctcttgatggatatcgacttggtatgttagtccctccagctagactcgagcatcagagcaattatgttggagcgaacgcagttttagtgacggcaaaagaccaagtatggctggattccattacagatttctctgttgctttcagtccctccgcccagaaggaaatcagttaccccctaatttgttcaacagttacaatgcgtaatcaggaagcggaaaaatgtctcgaggaggaacttcggcgtgataagctcagttttcctgagcatattcgtaatggtgatttgataggcaaaatgagcagggcgattaacaatctagagaatgagctgaacttgcctgttcgctcttttgatgtcgattagtctgtgtgtccttggccttcgtataggtgactgttttggttttgacggtatgtccagttatggctgaccgtcggggtgggaatcagtcgagattatgcttgggtgcctgtaggtgcctcgtggaagacgagggtaatcggcaggtttcccaaaaattgaaagccttggaacaaagccaaaaacagctgaccacgattatcatcggaggtgcgcatgatgatggtagtcatggtttcaagtgtctcatgggcttgagaccgggctgagaccatggggaaagcgttattggcgcaaggcttttgggacgtgatgggaacgatgatgggaccaggtccgtcctcctgaacttgcatgtctcatttcttgtcgcgtatacagccccgttgagcgctcagcgtcctttcatggtcttgacgtgatgagcggattggcaacggtgtgttggacggtttttagaggattggcccttgtctcagatgaaccgcatccgacggcgcaatgtggaatgcgagataccagtgttccgctggatctcacgggccggcgtgcctgcctcatgcaactgcatgatctggcgtttggacacttcctcgtgatgacgcgatgcttcggatcggccgccaccggtcttcaatctaatcggccggttcctcatgaaacagttcggaatattgcagcccatccagccgtttggctggatggttcctgtgcgatgctcccaaagccgggggaatggctgcgtgaatatctccaggaaaacgtttgcggtctcttccgaaagcatttgacaaattgtgtttgcgctggcataattccgcatgtcagttttgggttttgcataggtgggttggaatgccagatttgatgttgagaaagtcgtggggggggggataagctcctagcctttttgttggttgccgccatggcactggtaggaagtgccgctttgccgtcgtccgccgacgcagatgttgtggacggtgttgtgacttcctggcgggggctgcagcgggcggtgaacaatatccccgccagtgatggtaaacgacacatcatcacggtcgatcgaactttgacattctggtccagcgtcaccatcgatcaggggaaagacgttgccctggagttctcgaacaacgcagggctgacgcatgggtatggcggtttcccgctcttttcaatcaccggcggttctcaacttacattgagcgatgccgcatacaacagccaacaggatggccgtcttgcggatgtcggggctggcaagctgaccattgacagtggcacctacagcgacaacaagaatcaatccggtgacgcggccgtcgtatatgtcagtaaagacgggacgctgaaaatcaatggtggtacttttgaccggaacaccagtacggctaacgggaacactacaggtggcgctgttatccattcaagcggtaaagtcaccgtcaatggcggtacctttgacggtaactccaccggcaccaacccggaaagcaatctccactaccatggcggcggcgtaatttggagcgacggcaccctcatcgtcaacaatggatcgtttgccaataacatcagtaatgcggttcaccgctctaacgcttacaggagtcccacgggtggcggcgcgatctgggccagcaatcatctggtgatcaacggcggcgccttccaaggcaattggcagatggacaacaccacattgtatgcgaccggcggcggcgctatttatttcggggacggcatgaaccctgacaacggcaccatggtcatcaatggcggaaagttcgacggcaaccgctccatgcaggatggcggagccatcttcatggcttggaacagcaaggcggtgttccagcagggcacgttcacaaataactggtccaaccgactgggtggcgccgtgtacacggaagaggacaccgtaagctatgtcaccaatgccgccgcatacgagaatcatgccggacacttcggcggcggcctgtggctgtgcccatctggcaagggcgataccagcgaacagggcggcatggcgcttttcgacaacgaagcaaacgtcgacaaatacgatcgcgccgaagatggtaaaccgatttggagcgacaagcaagacggcaaggcatacaactacccactttccaggaattatggcaagacgggagccggcgatgatttcgccatcatgtatccaaacaagggcggtggcatcaccaaccatttcgcgctatccatgaagtggttcaccggggacaagatatcctggcacgacgatgggcaacccgcaaaggaggccaatggcttcaactacggatatggaggttgggtctccaataatactctgaatgtcaaccagatgcctcgaccgtatggtggtgacgcatacacgcatgatgtcgtgctgacgcctggcgggaaggtcgatcatggttatggcctgaaggccactggcatcaccgaacaggcaaagcaaaacgccaaaaaccaggcttttatcactttcaccaacaacacggcacgcctgtccggcggcgcgttcggcagcgatggcaatgtgacgttcaccaaggtgtacggcgtcagttggaacaaggtcagcagcgtagacggcaacaggaaactgtccggctccaaatggctgctggtggcgcagaacgatgacagcgtccggtccggcccgattgaccttgatttcggcaacgttccggaatgcggcagcgacggctcgggatctattacaccaaccaaagatgcatggtgcaaagtcccggattccgttacagacggccgctactccgagttcgcggggaggtacgtgaccgtggtcgccgacaactccgcaaccgataaggatcccttggatggacagttcatggtcaagggcctgcgcaacggaacgtattatctgaaggagtatcagtcccctgacgggtatacgcagtcccagaaaacctacacattcacaatcaacaacgcggatcatccaaccattttggtatccgataacttgggaacctccggtgcggtgctgggcgacggcgtctcaatcaccaacacgccatacggtacggtcaagtggacaaaagtcgattccgcggacggacagatgacgctgtcgggaagcgtatggaagctgcagaacgccgacggcagcgacatccaaggcgccgccgatattaccgactgcagcggcgaatgctcttcgacgcaggatgacccctaccatgacatcgatccccgtgagggctcgtttgccctgacgtatctgccgttaggctcgtacagactcgtagagaccaaggctccggacggctacgatctgcctgatggcacgaagacctactacacattcaccgtgaccgaagacaaccgcgggaatgtgcccgtttgcaggtcggatggcacgccgctgaacggaaacatcgttccgaacgagcatgtgaagggcaacgtcacctggtacaagaccgactccaccaagaaagggaatggggacgacgccagactgaagggctccgaatggtccctcaccgaaatcaagaactggaagggcgacgacatcgacagcggacagcgccagcccataaccgtgaccgactgtgtcagcgatgcggcatgccccgcagactcgcatgaccgtgacaacgcagccggcaaattccgaatggaggacctcgactgggggacatacgagctcgtcgagaccaaggccccggccgggttcaagaagtccgagacggtctacacgttcgtcatcgacaagcagcacaacggcaccaccgagatccagatcatgaacggtaccgactcggtgacgggcaacatcatcacgaatgtcccgatcgccgtcagcagtctgccgtttaccggctcaggcgccttgacgccttacgcgttccttccgtatgtgctgggagccgtcggtgccggactggctgtcggtctgggcctgcacatgatccgtcgtcgcatcgcgcgacagggctgacctgccccggatcctgcttcctgacgccgccgtcctcgccggcggcgtcaggggaatcgaattttctcatggcaatcaaccgagaagaaaggaatgacaaaaccatgaaattgaggaaactattcgcaggagtggccgccgcggccacccttctgtcaggcatggctctaggagccggcagcgccatggccgctgacccggccggtagtgccaccatcactctttccggcgccaccaacgccgtgaaggggcacgcctacaaagtcgtcaagatcggttcgtacgactactcctccatcacgaaggacggcaaggtcgaaggcgtccatgtcgccaccgacgcggccactgcagaagctgccacaacggtgttgacccaggtatcgggcaatagtaattggaataccggcgactacagggacaatccggtcggctatgtcgccgcccacagcgatatgttcgccagcagcaccgcggagccgtggaccggcaagttgcgcgatttcgtgagcagcctggtacggcagtcagatttccaaacagttctgatggccgcgcccaaacacgtcgccgacagcgacacatacactatcaatggtctggcagacggcctgtatatcgtgatcgacaccaccgcaggcaacgctgacggcgtcgaccataagcgcaccaactccatcccgatgctggtcgccaccaagatcaacggccatgatttcgccaatcaggagctcggcagcatcaaggtcaagaaccagccgaccgacatcaacaaggtcatcgtcaaggacaacaaggatatgaccggcacgaccgaaaaggtcggcgacgccgtgaccttcaaactcaccagcaaggtcccgctgaccgtcggctatctgaacactgtggacaagccgtaccagttccagatgaccgataccatgagcaagggcctgaccttcttcagcgtcacctccgtcaagatcggcgacaagacgctgacggccgccaccgccaacgccgccgccgatgccgaccactacaagctgaccacaaccggcaagcagaagtacaatgacgccgccaccgaaagcacggcgacgaccctgctattcgacctgtccaacgccgtgtatgccgccggccagaacgccgccagcagcaaggcagacgccaaggccgccgacaccatcaccatcatctacactgccattctgaacaaggatgcaatccacgcccagaacggcgccaatccgaaccgtgtcgacctggactactcgcacaaccccgccgataactccaagcaccacgtgcccggccctgaagtcaaggtgtacacctacgacttcggattcaccaaggtcaaggccgacggccagaccagccttgacggcgccaagttcaccatcaagaaggagaatggacagtacctcaagttcaacaaggtttccggcctgtgggagaacggcaccgcggatgacaagttcaccagcgtggacggcaagttcgaattcaatggtctgggtgaagggacctatggcatcgaagagaccgacgtcccggtcggatacctgtccaccaccaaggccaagttccaagtggtcatcactgccaccaacaaggacacgaacaacaatgtccttgacaacgcctacacggtcaagttcatgaacggcaataacggcttcaacatgctgaccaacctcaaggcggacaacactgccgacaacggcggggcgaaggtgaagaacatcacctccatcacccagttgccgctcaccggcgccacgggcatcgcaatcttcggcgtgatggccgttatggttatcggcgccggccttgcaatcggcgcgaagcgccgcagcatcgccaaccgacttgcgtgatacggcctgcgtgaccagaacgccgccccatacggcctattcgggcccatggggcggcgttccctatttctcagccgtgcacgccaacatgcgtgggagaggaaactcatggcagaacaggtgacagggcaacgctacgatacgttgtcgttcgacgaggcactggacgtgtcggatgcgatgcgcgaacgacgtgcgctgctgcgcatgtcgcatgcgctggccgcgcttatggcagtgctgatcggaggtggcctgctgattggcgcatacccgttggccatgcaatggaaatcaagccgcgagcttgccgcacaaagcgaacaggtcagccagaaggtcgacggatggccgtttccccaggcgcgcgatcgtataagagccgcacgaaaatacaacgccagactggctgccagcggccaacagatcctgggagaggcggccgacccattcgatatcgccaatggcggtagccaggcttccagccgaattgactccaaagcatctgaagacctcgaatatcgaagccttctgaatacaggtgacgggattatgggatcggtcgtgatcccgaaaatagacgtcaatctgcccatctatcacggtaccggggaagaccagcttgccctgggcgccggtcatttatacggcaccagtctgccggtgggaggaacaaacacccacgctgtcatcaccggccatcgtggccttgtcaaggcgttgatgttcacgcgactcgacgaaatggggaaaggcgatttcatctatctgaaggtcatgggggagacgctggcctatcaggtggacgatatcagcatcatcaaaccggacgatacatcaaaactacgcgtggtcgatgggcaggatcgggttacattgatgacatgcaccccgtatggaatcaacacgcatcgactgcttgtatctggccatagggtggatatcccggagcccgcgcccaatccaaccgatttgcacgactatcgaaccataagcatctggatctgcataggcactcttgtggttggctggtcgatagtctggctgactgggaggctgagatatggcacatggcgccgtatgcgacacgcacgggctgattcaaggaagcgactccgctaaaccgttcgtgccgttttccggttcgccggcgtgcgtctccgaagcagcgtctccatgggacgggaatcagctagctggaacaccgaatgcaattctgccgactgcgcaggtgcttcttcgcagcccctcaccgtgttgccatggatgcgatgcccgaaatgcgagagaccggggctgtctttgccggtgcagaatgccgggcttcgacgggggacggcgaagcgctcccggtttatttttggatgcctgtaggtgcctcggcgaaaacgaggctgatcggcagttttcccaaaattggaaaacattggaataaagccaaaaatgaccatagacgtgcatcatcagaggtattcataatgatggtagtcatacgttccatgttctcattgccccacgtcattgactggcattgccgctatcgctgctatcgagtcggtgattgtcagccaatgaacttgatgccggtttcgctgccgctaccggttgaggagccgctcgaaccgctattaccggagtttgaactggatgatccgcccgtggagctggaagaggaatcggagccattggttgatcctgaacccgatccggttgagctgttgccggaaccggtggagccgccagtggagccggcaccggtggaaccgccagtcgtgcccgaattagtggaggaatcggtgccggtcgaaccatcggtggatccattggcgttggaatcggtggaggagtcggtgccggttgagccggacgtgcttgaatcggtgccgtcgttgggcgagtcggatgtggagtccttggtgttggaatcattcgaaccgtcggtaatgcccggctgcggcagcccgttattctgattggacgtgtcggtctgcgttttggtgtcggtttgcgtgggcgtggtggacggagtgatgatatggtctgtgccacggccctgcgtgaccagcatgacgatgccggcggttactgccacggcgagcaggccagataccagcgtgacgataatggcggtgcgcttcgaattatgggagcgggccttgtgcagttcattgaccgaataggttcgtccgttcgctcgattggacacgacttcacgcggcttgcgcgcggtggaaacggtattgaccatgccggtcatcgtcgtatcggactcggattcggctgccttatcggacttattggccgtagtgtcatcgtcgttgccggaagacgaggccgattgtagtttctcaccggaggcggtgagtacattttgatagattttggtggccaccgcggagacgatgtagctggctgccgcgccgattaccgagccggcgataccgattttcgatgccagtaagaatgaggtgacggcggcaagggtgcccgccacgatggatgagagggaaagaccttcgaaaaacttcttcacaagacacgaccgtaaagtgtcgggctggaaggttgcttaaggctcggtgatagcgagaggatgcctacacgagaccttcaaaacctagccagcggaatgtggaatgactcaaatatatggtgtcgatgagcagtggaaatcagcgcaaagtggcgcaaagtagcgcaaggaacaaccgaaattggttctcttggagcgaaaacgacgttcagcggaacttcatgcagcccaagcgaagctgccgttgccggcacccaactcgaaatgcagtttggcgatgccaagtccgatttccgattgcacgccttcaagagcctcggccttcaccgtatggccatccgccagcagcgtgaatcggaatggttgcttgcctaaagcactgggagccagcatcgccgcctcgataccgttatggaaccaagcaggcgcatcggcatattcgccgttctccacaacgcccaattcctcggccggtttgctacgatgcgggcggccgggtctgttggcgtgcccgagcgcgatggcggcgggcatgcgctcgtcttcaccgagcgtccacgcgccatcatgttcgctggtctcatgcagcaccacccaagaggtgtcgagtcccagcgagaccgcggtcagcgccaggaactgaccggcatggccgattttctcgtccagaaccgctgcgctgtcgtccttgtgatccggtccgataagggcgatgagattacgtacgttcttgaatcgcccataatgggtcgggcaaccgccgaaagcgtcgtccacatcgtgaacgagttggatgtcaagcccgtcatcgctgttgatggtggcgatgacgttgccaagtgcgtcgatctggtcgccggtcaacggctcgtccgtgtaatcgcgcgcggcatggcgcgcttccacggcctcaagcagattcatgattcctcccgacacggcggtacgacatgccgcatctcactagtgtagtaacggttcagagcaatggggggccatgaccatccatggccggaactgaatcgtcagttccggtgcagcgactgtttggtcggcttgattaccgacatcagcacggcgacgaagatcagtgcaaagcccaccagcgaagtccacatgattgtctcgccccagaacagcgcggagaacgtgacggcgaacagactttccgtacacatgatgattgacgcctgcgaggcaggcacgtgagccagaccgatgttctgcatgatctgggcacccatcgtggcgccgaggaacagatagagcacgctggccactactgagggtgccagccagctggcgttcggcatgggttcggtgaacaacgcgccgatgatgaacaatacgccggcaacgccgaactgcacaaaagtgacggcgatagggtcgaagcgtttggtgtagacaccaaggcaggtcagattgaacgagaagatgacggcggttgcgatggtcagccagtcgccggcgctcagagacagcgaaccgcccggcttcagcgagacgaagccgacgccgatcagacatatcacgccggcgaccagattgatggccttcgggcgggttttcgaaatgatccacgtggcgaacggggtgagtacgcagtaggcggccgtcaggaacgcgctgcggcccggttcaatggtctgcaggccgatggtctgggtgaccatcgtgccccagtaggtcagacccaccacgagcgccggcacaatgatcttcggcgtcagatacggcacgatgtgcttatggaacaaggccagcatgcacaggcaggcgcctatcatgcgcagacccatcagccattggggcggaatcgcctccatggcgaatttggcgagcagataactgccaccccataatgcggcgcagcccagcaacatgagtcgggcgagattcgggggaaagccgcgggaccagcggctgcgcagcttgctgaaacgttcgaccaaacccatggtgcacctcaggacagttaggaaaacttgtggctctctcggctcacagattacgggaactaccggccaaaatcgaccggtcgatgggcgtcgggtgtgtgacaggtgtgtggctggtgcgcggccggggcgcggcatcgccaagcaggtaagaaccggatgaaagctgtgcgaaggtgaggttactcacagcgaacatccgggctagtcgcgctcgaaaccggtactctggaaagagtaaaaatacgttgtccatagcaatcatgaaaggattcgacatggcagtcattactccggaaatcaaggaattcatcaagaacaacctcggttggatcaccaccgtctccaaggacggcgaactggacctcggcccgaagatgtccctgttcgtgctggacgacacgcacatcgcttaccacgagcgcaccgccggccagcactacgagaacctcaagaacggctctccgctggtcatcgccttcgccaacctcgagaagaagcagggctaccgcttccgcggcaacgtggtgctgcacgttgacgacgacatctacaacgagcaggtcaagatcgccgaggaaaagggcaccaagaagccggccgtgattccggttctcgaagtcaccgagatccagaaccttgcctccggtccgaccgccggcaagaccatcgccaaggactgattagctgacgtattggtggcttcctcgtcagagggagccactttttcgcttttcagtgcgcagtactaggtgatggcctttgaggtcggtggtggcgaagaggtaggtgttgccgccgtccttgagtttgagttttttgcgcagctgggccacggatagggggaaattgcgtacggcgatgttggcgtgcgtgagaccggccaatagctgcttcagttctttcttgttcatggtgacgatggattcgatgacgaatgatctgcctgggaaatcggcaataggttcggccgccacgaacaggtggctattcgggctgatgtgatgcacgacgaagcgctgttcgagaacatcaaagcacccggccttcatgattgaggcgttgggttcgtaaaggtacttccaatgcgaggaatcgaagccgttcgcgctttcctcagccgggaaatcctcggtattacaggtattgcgtgcaaccaaggcagaatcgctgataggggtgtgattgtcgctgttatcgccggccttgtacgacagcacctgcccgtcattgacgcataccacgagcggtgaggcgcaacggccgcgccccaacaccaataacaattccttgcattcattcccggtggagacgatatgcacctcatgcaccgcgccggcgaaatcggcgacggtcttatgccagtcgagcatgggggagagcttgaccatgaccgtcggtgccttggccagcagcgtatccttcagggtcagcacatccggcgtgcaatcggcaatcgcgtaggtacgcgagccatgatcgtcacggcgggccggatcgaggaagatcatggaggctcggccaagcgtatcaagcactgctgttgaatcatcattgatgatttcggcgtggccaaggccgagtatcgggaaattatggcgagcgatatcacataaagtggattgttgttccacatatatggcacgattgaacactcgggacatgtaagaaaagtcgacgccgaaaccgccggtcagatcgactagggatgtcggggaatcgtcggcgtcgtcgactgcttccccgcccaacaatcgctgtgctaaccgggctttgtattgagccgtgaactggctggaacattgttccattgggacttgcggcgggaaaatcagcccatcatgggacgcccagtcaggtagcttgagtgaagcgcgctgccagccggcaatctgctccagcgcgaacggcacatccacgtcgccatcatgtttggcgtgcaaggccacatcacgcacatcttcacggcggtgtttggcgatgaacgcccaggtcgactcagaaatctccatgccgccattctaggggttgtgctgagatgagtatggcaaaccgcaagagaacgaggtggcgaaaaccgatgatcgatgaagtgatgatgctgcgtcatggccgtacgcaatacaatctcgaacatcgcttgcaaggccagatcgatgtgccgctcgacatcgtaggccaatggcaggtcgaccagaccggattcgcgctcgcttcacggtattactgggccaaggtgaaccggcttgccgagcatcccgaagccatcgcccagcccggtcctgacgccgccgaacgcactgatacgcgacagttcgaggaggcccccgccgccggccggcgcatggtggtgatgacctccgacctgttccgtgcccaacagaccgcacacgccttcgccgatattttgggattgccggtcacctgtgaccaacgactgcgtgaacgcagcttcggcgagtgggaaggcatgacccgcgccgaaatcaaagccgtggcagccgacgactacgcctcttggaaacagcacaccgggggcgaaaccaagcatggtgtggaaagccgtgccgccgtgggccagcgaggtgccgatgccgtgcgcgcactggtcaccgactccgcctattcagacagcacgcccaccacgctgatgctcgtcacccatggctcatggattaccgccaccatctccaacctgctcgaactcgacccggacggcatgaacgcactcggcggcatgcgcaacgcctgctggtgccggctcaaagtgcgccacagcgtcaacggcacccccaccgaacagcccctgtgggagttggaggaatacaacaaggctcccgccatcgccgacagcgccgactgggagaacgggccgaccgatctgcgcggaccgcacatgccaagttggcagccaatcgtctggtgacggtcgctatgcgaaaccccgctcgcaaattcgaacggtgggtctagactaatctcggtttggaaccgtacagcgatagaacagtaagaaagcgcggaaggcgggtgaggcgacatgctgagaatcttcagctcaatcaatggccaagtggagcagatcgagaaaccggaaaacggctcctggttatgtttgagcgaacccactgatgtggagctcgccaccgtcgcatcacagaccggcatcgacctggccgacctgcgcgcccctttggatgacgaggaacgttcacgtgtggacgtcgaagacgattacacgatgatcatcgtcgacatccccaccgtggaggagcgtggcggacgcgactggtacgagaccatcccgctgtcgatcatcgtcaccgaaaacctcatcatcaccgtctgcatgcaggacacgcccgtgctccacccattcatggaaggcacgatacgaggtttcaacaccttcatgcgctcgcggttcatcctgcagatcctgtaccgcaacgccacgatgtacctgcggtatctgcgcatcatcgaccgtgagagcgacaagctcgaactgaaactgcgccattccatgcaaaaccgcgagatcgtgatgctcatggaactgagcaagaccttggtgtacttcaccacatcgctgaaatcgaacgaaatcgtgatggagaagctcaccaccctgcagcgcatcaagcagtatccggacgatgaggacctgctcgacgacgtcatcaccgaaaacaagcaggccatcgagatggccaacatctacagcggcgttcttgcgaacatgaccgacgccttcgcctcgatcgtgtccaacaacctgaacaacgtgatgcgcatcttcaccatcatctccatcaccctgtccatcccgacgctgatcttctcgatgtacggcatgaacttcgacggcggcatgatgggcatgccgttcaccgacaagccttggggcttcctgctcatcatcgtgatctccatggtgctttccggcgtggttgcctggttcctcacacgttcgcgcatgttcaagtaaggcgtttgacggttatgcaccattggtcatcgttcgtcagccgtagcatgctccgcgcccgccgcccgatgcggcgcggatttcgctcccgactgatggcaggattcgccgcggcctttggcgtgatattgccattgtccggtctggccggttgcggccaaattcaagtcaccaccgtctccggagcgccggagggacccaccatcgccattggggtcgcaaccgacgaaccatcggtgggagcatggcatgacggcacataccagggcttcgacatcaccatcgccaaatacgtggccgccaaactcggctatgcgaacaagcagatcgtcttcaagcaggttcgccccgaaaaccggcgctccatgctggacaatggacaggtcgacatggtcgtcgcctcttggcctatcaccgatgggtccagcgcgatcgttgattttgccggaccatacctcacgaccagcgtcggtttgctggtcaggtcggatgagcgtggccgattcaccaatgacgcaggttcggtgggcgacgtaggcgacggcacggtgtgcgcagtgaaaggtgacgagacagtcggcatcttccgcggcaaccacccgcaggctcggattcaggagcgtagcagttatgcgcagtgcgtcacggccgtgcaagtagggtcggcggatgccatagcctccgatatggcggtgctttccggtcttcaagcggccaacgggccccagtatatggacgtgattgcggacaagggcgaggtcagttatggcatcgccgtgagtcaaggcaccagccaattggcgcagaaaatcgcggaagcattggaagacatggttgaggatggcagctggacggccgccaaggatacgttcacaagccaaacaaagctcatggtttcgctgaacggtgaccccaaagccatcgtctcggatgctgaataacgattgacgacgtgtccagttgcgaggctaccttgctgatttatgagtgacaacgagaagagcacgcaaaccgaagagcccaacttccgctacaacgccgcactggcgcaggacatcgaaaacaagtggcagaagatttgggacgagcaaggcaccttctgggccgccaacgtcaacggcgatttgaaggacggcaagggccgtaacgccgaaggccgcgccgcctacttcgccatggacatgttcccctacccgtccggcaagggcctgcacgtcggccacccgctgggctacctggcctccgacgtgacgagccgctaccaccgcatgaagggcgagaacgtcctgcacgccatgggttacgacgccttcggcctgcctgccgaacagtacgcagtccagaccggccagcacccgcgcgtgaccaccgaggcgaacatcgccaacatgagccgccagctgcaccgtatgggcctgagcttcgacaaccgtcgtacgttcgccaccatcgaccccggctacgtgcgctggacccaatggatcttctcgcgcatctacgattcctggtacgacgaggaggccaccaacccgtccggctccaagggatccgcgcgccccatcgccgagctcgtcgccaaattcgagtccggcgaaaaggccattcctggccacgagtccgatggcaagcagtggtccgacctcactgccgccgagcagcaggatatcttgaacgacttccgcctggcgtacatctccaagtccccggtcaattggtgcccgggcctgggcaccgtgctggccaacgaagaggtcaccgccgaaggcaagtccgaacgcggcaacttcccggtcttccagcgcgagctccgtcagtggtccatgcgcatcaccaagtacggccaccgcctcatcgccgacctcgacggcatcgattggcctgagaaggtcaagctcatgcagcgcaactggatcggtgaatcccatggtgcctccgtgcacttcaccgtggccactgccgacggtgacaaggacatggaaatctacaccacccgtcccgacacgctgttcggcaccacgttcgccgttgtttccccggaacatcacctgctggagaacgtacctgccgaatggccggctgatgtgcccgaggattggaagggcggctatgccaacccggtcgaggcagtgaaggcctatcgtttggctgctgaggccaagaccgccaaggaccgcgtggacgagggcggtgagaagacaggtctgttcaccggcctgtacgccaccaacccgatcaccggcgcgaagctcccgctgttcaccgccgactacgtgctgatggactacggcaccggcgccatcatggccgtgcctggtggcgaccagcgcgattacgactttgccgtgaagttcggtctgccggtcatctacaccgttgaaccgctgccggaatccggcgatgacttggccaactacgagggcaaggcgccgttcgtctcccatgacggcatcgtgatcaactcccacgtcgaatccacgtacgctaagggcgacgcgctgtcgctcgacggcttgcgcgtggacgacgccatcgccaaggtcaacgcctggctcgaatccgccggcgtgggcaagggcaccgtaagctaccgtctgcgcgactggctgttctcccgccagcgctactggggcgagcccttcccgatcgtgtacggcgaagacggcaccccgcacctgctgccggattccgcattgccaatcaacctgcccgacgtgcccgactacgagccgcgcaccttcgatccgatggacgccgagtccaatcccgaggcaccgttgagccgcaacgaggactgggtcaaggtcgagctcgacttgggcgacggcaagaagacctactaccgcgacaccaacaccatgccgaactgggccggctcctgctggtactacatgcgttacatcgacccgaccgacaccaagcacatggtggagaaggacgagttcgactactggatgggcccgaaccacaacaagtactcgggtgatgaaggcggtgtggacctgtacatcggcggcgtcgaacacgctgtgctccacctgctctactcccgtttctggcacaaggtgctcttcgatctgggctatgtggattcggccgagccgttccacaagctgttcaaccagggcatgatccaggcctacgcctataccgacgaccgcggccagtacgtgccggccgacgaggtcgtggaaggcccggccgacgcctccggcgagccgacgttcacctggaacggcgaacacgccaaccgcgaattcggcaagatgggcaagtccctcaagaacatcgtgactccggactacatgtacgagaactatggcgccgacaccttccgcctgtacgagatgagcatgggcccgctggacgaatcccgcccgtggaacacccgcaacgtggtcggcggcatgcgcttcctgcagcgtctgtggcgcaacgtggtggacgagaccaccggcgaggcccacgtgaccgaggacgcgcccgatgagaagacactgaaactgctcaacaacacgatcgccgaagtgaccgcggaaatggaaggcatgcgtccgaacaccgccattgccaagctcatcgtgctcaacaaccatctgacaggtctgaaggccgtgccgcgtgccgcagtggagccgttggtcctgatgctcgccccgatcgccccgcacatctgcgaggagatgtggagcaagctgggccaccccgagtccctgtccgccgagccgtggccggtggccgacgagcgttacgtgggccacgacaccgtgaccgccgtggtgcagatcaagggcaaggtgcgcgccaagctcgaagtgccggtcgacatcgacccggccgacctcgaacggcaggcgctggccgccgtcgccgaccgtctcggcggcaaggagccgcgcaaggtgatcgtcaaggccccgaagatcgtctccatcgtccccgcggagtgacttgttgcgggttaggctcccctctttgaggggagccgctcgcgtcgcgagactgaggggagcgtcaaccgccccacctcaattgtggataacttcataagctagaaccacataccccgtttcagctggacaaacgcccatgaatccatcagcgtggatgcatgggcgtttctcataaccatcgcgcagaccatgccgccaaccgtttgcgcgcattcagcaggcagagcgaagccatgccccaaccgcgagtggaacggcccacgacgcctccgccgcctcccggccatgcacggattcgtccggccggccacccgccccaaagggcgcagagcggcctgcggcaggcgacccgtgacaaacgtgcgttatcggatctgattggcgtacgttccgccgatgccgtcggagaatcagccagactcacccgggatcagccgcgattgtcgttcaccattgggcatgccttggccgtgatattgctgctgatcgtcgcccttggcatcagcttggcattgctggtccagcagtcgatgaatatggccatgctgtctcaaccgaccgccatgcagaccacgggcggctccgctggagatcagacgatgccatcgcagaacaccacggacgagaaacgcacggatccgcagcagtcggagcattccgatgccacagcgaaccccgaatcggataccacgcaatctccgcacatgcagacggacggcagcgatgccggcgcttccacgcatggtctcatcaacctcaacacggccaccgttgaggaattgcaatccatcaaaggtattgggccggttaccgctcagcggatcattgatcatcgcacggcgattggcgggtatgcatcagtcgatcagctgctggatgtcaaaggcatcggctccaagacgttggagaccatgcgagggcaggtgacggtcggatgagcagggatcggatactgcgcgagcaggggagccgcgattggaggatgctgccgatcgccatagtgatgtgggcggcgagtctgggagcgcacgcattattcgcatggaggatgtctgatggactcggcaccggtcaggcaaaggccgatgccggagctggcattgacgccaccataatcggcatggaatggcctgtcacacgaatattgcctataacagtggcgtcatgtgctgccgtggcggcgatgatcgtggtgtctttccgcctgcggatcaggtggacgggaacattgaccgtatgcgtcgcggtggcgtgcatcggcagtatgacggcaatcgcgtcggacaccattgcctggcatgatcctgcctccgcacaagctcgccaatccagttcataccacgaagtcatggccacggtgacgacgcccgtgatcgcttcggaccaacgcacatacgattgtcagacggacatacggctgagcggcatcactgtggatggcgcggacgtacgttccacggtcgccgtgcgcgtatacgccgatgaatcgtattgtgggcagttgcgtcgaggcgcggtctatctgttgacgggcgtattgcagcaagcgcgatatggacgcataccgctatggctgctcttggaaggaaaacagccggtagcgcaggtgcgggctccgccgtggcatctcgccgcgatcgcacatatgcaggaggcgtttttcaccgtgaccggacaattgtccgatcaggggcgtgtgttggtgccgggattgacgatgggtgtgcttggccaggattatatcggcggcgatgccggtccgatgccggtcaacagcacgtatgcgcaaacgttggaaaatcagttccgccggtccggcatcatgcacctcatggccgtatccggcggccacttcgtactggtggcaggactggtgcgtcggttatgcatgtggatgctgcttgatcggcggctgacggcgttgctggtctctggagtatatgcgctgctggcattggcgatgttccccagtgattcggtcacccgcgcgttcatcatgggattgataggtgcgttggcgtatgcgatgggacggcgtacgcaagcgttgagcgccctgtgctggacgataatcggtgtattggcggtgaacccggatatgtcggccagctacggattcgccttgtcttcggccgccgtactgggtatcgtgctgtttgcggggcggctggccggtgtctttgagcgagcgatgccgcacagcatcgccgaaatgatggcgatgaccgtggccgcgcaattgttcaccctgccgattcaggtgttgatggaaccggaattgccgttgctgtccgtgccggcgaacctgctggtgtcaccgttcgtgggattggccacgatggcgggattgatggcactgacgtgcgcatggtgcacgccatggctggccggcgtattcgcgtggatatcgtcatggggcacgctggtgatggaacgggtggcgttgtggctgggcggcagcacgatggccgtcatcccatggaaagacggcgttacgggcgccgtgctgattgtgacggcggaaatcggtatcggcatgctactggtgttcgtcagccgttgcctccagcatgtccgtcgttatgaggccggaatgtctggcgtgcgcttcggttccgcttggcgcgtccgcctcagtctctggtgtgaggagacgagacgcctctttacgcggcggcaagccgaatagccaatgcggtattcggtgcagcaaccatcgcaatcccagccgaataccactatctcgacggcaccggcaaaatcgtgatgccggcaggtcattgtccaacctgtgtggcgagatggtggcatggcgaaaacagcagcgaatgcaccggtaaccgtggtgcccggaggcgactcgtatttgaacgacgcgcgcaccaaggcactgtgcgcgcaggcgttgaaggcgcggcccgacgccgacctcatcgaactcgacgccacatcggccgaccagtatgccttcgatgaagccgtcagcccatcgttgctttccgacgttgccgtggtcaaactcgtcaacctgcagaatgccgacgacaagctcgccgaagctctggtggcgtacaccaagcaggccgccaaggatccgaacggctccagcgtggtgatctgccagcacgagggcggcgtcaaagggcgcaaaatcatcgaccaactggtgaaagccggcgctcgcaaagaggacgtgccggatttgaagaaaccggatgcacagctcaatttcgtgctcggagaattcgagaaacgtggtcgtagagtcgaaccgatggccgcacagcagctggtatccgtgctcggcggcaaaaccggcgaactcgccgccatgtgcgagcaactgtgtttcgactttgacgataatccgatgggcctcgaccgtgtcaaccagtatttgaccgccaatccgcaggtcaccggttttgccgtggcagacaaggccgtggaaggcaaaaccgcagaagccatcgtcatgatgcgtgcagctgtggaacaagggaccgatcccatcgcgctgatcggcgcgttggccatgaagctccgtaccattgccaaagcctcggcggtacgggccggcacgatttcccaggccgaagcgaaaaccaatccgtgggtgctgaagaatgcgatgcgccaacttggcggctggacttcggcaggactcgcgcattgcatccgtatgctcgcctgggcggatgagcaaagcaaaacaaacggtggcgacccggtatatgcgctggaacgctgcattgaagacatcagtcataaaggtcggtaaaagtcgataaaggggtatttatgagcgaacacactattgtggctcccaccagcgaggccatgcaggagctcggccgtcgtgtggccggaatggtacacggcggcgatgtattgctgctctcaggccctcttggtgccggtaaaaccacattcgcccagggcttcggggcggggctgggcattaccgaacccatcgtgtctcctacattcaccattgcccgcgaactcgacgggcatttcgccgacggcactccgtctcatctggtgcatgtggatgcctaccgtctgggcggctcagcctatgcgccggggcaggacgccatcgggcgtttgttggacgagctggaatcgctgggattggacgaagaacttgaagaccccggcgagaacacggtggtgcttatggagtggggcgaacaaatggccaccgccttggcgccagaacgacttgaaatccatatcgatcgacctctcgattcctccgatgccgcatccgctggatcagacggcgaactcaccagcaacggcactcgtaccgtcgcattcgtcccagtcggcaagcgatgggccgcgttcgatctgcagtaagccatgcgcctatagactcctcgatgtacactctctagaggctttacgactaggaggattcatgggttgcacgttggtgattgacacctcattcggctcgacggtcggcattgtggggcgcgagcccattgtagagaccgattcgcgcacccatgtggagaaactgcaggtcaatatcgcgcgcgcggtcgaggaagccgggttcccagcatctgacattgcgacagtcattgtgggtaccggtccagccccctttactggtctgcgtgccggtatcgttacggccaaggcactggctttcgcaacgggagcgacgcttatcggccataatgttcttgagtctcaggtgcaatggaatctcattcgccgtggcaaagccggcactctcggcgatactcataaatgccatgtgctcactcttgccgtaaacgacgcacgccgcaagcaactctattttgcgttgtactcggacccgctcgttggcgatcccgatggcgaaaccgtggcgacggctctgattgacatggatatcgattaccctgcatccatcgcgcagcgcgtgaatgatgccgttcatacgtaccgcgacggacttatgccagaagacagcaatgtggatgtggtcgtggatgttgtgggtcatggggcccgcaaatatgcggatgcgctgggtgcaatcgagcagcttggcgacatcaccgatgaatccgtattggaccaaggggagcaaggtctcgctatctttgccactgatgcggaactggttgccaaccgtaatcccgatacgccggtcgaaccgttgtacctgcgccgtccggacgccgaagtgccgaatccgctgaagcacgtgctcggccatgccggcgccgataaggcgtgagacgggttgattcgatgattgttgacatcactgccgtaagtcgtgatcttgcggttcgctccatcgcacagttggaaggcgaactgttcggccgcggcgcatggaatgcgaacatggtgcgagaggaactggacgcaccggcccgcacgtatctgctggatgtgctgggagaggtggaacaggcggttgtccgcggctacgccggcttctggtatgacggcgaggacgccgagctcatgaccatcggcgtgggcaaggcataccagcggcaaggcatcgccgttgcgttgcttcaggcactggtcgacgaggcgaagcgtcagggcgcctcgcgcatgctgctcgaagtgcgtgtggataacgaccctgcgctggccctgtatcaccggttcggattcgaacgcatgggattgcgcaaacgctactaccagcctgaaggcatcgacgcatacaccatgagcttggacctgaaacctagggtcgtgggctttgccgccccgcagacggcatcggcggacactgaagacatcactggcaagcaaacggagaagaacggagaagcacgatgagcgaaccggttgtactgggcattgaatccacctgcgacgaaaccgcggctgccatcgtacgcggccgcgaactgctctccaacgtcgtggcctcatccatggaggaacacgcgcgatacggcggcgtgatccccgaaatcgcctcccgtgcgcacgctgaggccttcgtgccatgcgtgtccaaggcgctcgccgacgcgaacatgacgttggcggatgtggacgccatcgccgtgtccgccggtcctggactggccggttgcctggccgtgggcgtgtccggcgccaaggcgctggcctgggctgcgaacaagccgatttacggcatcaaccatgtgatcgggcacatcgccgtcactcagctgcagttcggcccgttccccaaggacacgctggctctgattgtctccggcggccacacctcgctgctgcatgtggaggacatgccgcgcaagatcgatgtggtgggcaccacgctggatgacgcggcgggggagtgcttcgacaaagtcgcccgtctgctcggcttcccgtatccgggcggcccgcacatcgaccgccacggacagaacggcgacccgcacgccatcaaggtgccgatgggtctgacccaaggcaaggccggtgccgcgcacccgtatgatttcagtttctccggtgtcaagaccgccgtggcccgttgggtggaaagcgagcaggccgccggccatgagattccggtggacgacgtgtgcgcatccctggccgactccgtggccaccgtgctagcccgtaaggccatgcgcggctgccggcagtacgattccaacacgctgatcgtgggcggcggcttctccgccaactcgcagctgcgcgccaaactgctcgaattcggcgagaactacggcgtcgacgtccgtatcccgcaaatcaagctctgcaccgacaacggtgccatggtcgccatgctcggcgtgaacctggtcgaagccggcgtggcccccagcgcccccgacttcccgatcgactccgccatgcccctgaccaaggtctcgatgtaagatttgcacggtattcccaaactgatactgggaatactgtgcctctcatcggtgaattgacagtgacctgtctgcctgatgtgagtagtggtgaggtcttcgccatggatttcccggttgatgatggggtgtcgtgtctggtcaccaatgcgatgaaaataaaaaagcctcggagaaccgaggctttcgatggctcctgcgactgggcttgaaccagtgaccgtccgattaacagtcggatgctctgccaactgagctacgcaggaatattcaattttcatcccgtccggagttacccgttcaggtgagctcctgcgactgggcttgaaccagtgaccgtccgattaacagtcggatgctctgccaactgagctacgcaggaatattcaattttcatcccgtccggagttacccgttcaggtgagctcctgc

SEQ ID NO: 3804 - DNA, 8091 bp, Unknown
  R35_2m  MAG No. k141_4341
gcccaccagcgggcgctcggattcgatcagcggcactgcctgacgctgcatgttggtacccatcagtgcacggtggccctcatcatgctccaggaacggaatcagggaggcaccgagggagaccatctgacgcggggagacgtccatgtaatccacggagctcaccggcacatcgaccgcctcttcctcgccgactcgggcaagggcggacttggagacgaagttgccgttctcgtcaagttcctggttggcctgggcgatgacgtggtcgagatcgcggtcagcggtcatgtactcgacctcgtcggtcacatggccgttgacgaccttgcggtacggggtctcgatgaagccgaacgggttgacgcggccgaaggtcgccagggagccgatcagaccgatgttcgggccttcaggagactcgatcgggcacatacggccgaagtgggacgggtgcacgtcgcgcacttccatggaggcgcggtcgcgggacagaccgccggggcccagtgcggaaagacgacgcttgttcgtcacaccggacagtgggttgttctgatccatgaactgggagagctgggaagtgccgaagaactccttgatggtggcgttcaccgggcggatgttgatcagggactgcggggtgatggcctcggcgtcctgagtggtcatgcgctcgcgcaccacgcgctccatacggctcagaccggtacgcagctggttctggatcagctcgccgacttggcggatacgacggttgccgaagtgatcgatatcgtcgacgtccacgcgcaggtcaacgtcttcgccgttgcgcttgcccgggaaggtcgccgcaccatcgtgcagggccaccagatacttgatcgtggcgatgatgtcttcctggtggagggaacggtcgttgaaatcggcctcgacacccagcttgcggttgatcttgtagcggccgacgcgggccagatcgtagcgcttggtgttgaagtagaaggagtccagcaggttcttgccggcctcgggggtcggggtgtcggccggacgaatcttgcggtagaggtcgacgagggcctcgtcctgggtctcgagggtttccttctccagggcgtcgagcaccagcgggtagtccttgaaggcctgggcgatctcggacttggtcatgccgatggccatgaggaacacgatggcggactgcttgcgcttgcggtccacgcgcacctgcggctggtccttcttgtcgatctcgaactcgagccatgcaccgcggctcgggatgatcttcgcgccgaagacttccttatcggaggtgcggtcctgctggcggtcgaagtagacgcccggggaacgcacgagctgggagacgatgactcgctcggtaccgccgatgatgaaggtgccgtgcggggtctgcagcgggaagtcgcccatgaacacggtctgggacttgatctcgccggtgtcgccgttctcgaattcggcgttcacgtacagcggagcggagtaggtgtaatccttctccttgcactcctgcacggtgtggcgcggctcctcgaagtacgggtccgagaaggtcagggacatggtctgtgcaaagttctcgatcggggagatctcgttgaagacctcgtcgagaccggaggtgtgggccacggtgttggtgccgttagcctcatcctcttcgacacgcttcttccagcggtcggaaccgatcagccaatcgaagctgtcggtctgtacgcccagcaggtagggcacatcgatgggttccttgatggaaccgaagttcacgcgatccgacgccttgtgcagatcaatgtcatgctggtcggcgcgtgcgatgatggtggtggtgttcgtcgtagactcagtagccaatggacgttccttatcgctcgctaatatgtggtaattcccctgggagcgccggcatggccaccatatgcctatgcggacgcttcattgtcgacggcatgcccgcaatatgacacacctcatgcaaagtcaaaagaatactgatatgcgaggacatttttagctcccgctgacgagggagctgtcgagcggagcgagactgaggaagggacccagcgtccaaacaccaaccgcaggtcctaccccaccgtaaacgtcaccggatcgctcttcaccttcggatgatccttcaaactcagctgcgccacgtacgttcccgcattgaccttggcccaacccgactcatccgtgcattcggtgagcgtggcgttcgcatcggtattccacgtgaccttctgaacgtccttatcacccttggacatcagcagcagacgtgaatccgccggacacacatcggacttgtaaatcgtttcctgaccggaagtaatggtgagcacacggccggaatcggccccgtccaccaaacagttgcctgacccctcgtgcacgatggtcgcggtgaaatcaagcgatcctcctaccggcacggattgggaggccgcggaaagctgcaatgtcacatcactggccgagcaatccttgacgttgctgactttcttcggagccggcgtggcgtcgcgggaaatcgcatacacctcgtcatggtgaatcatcgtgttcacggcaccgataccccggccaaggctgtacacgcagaatacaatcagcgcgattatcagcagcaacaccgtgccggccacgatacgccgacgacgatagatggcctgctgctttttgctgatcctgcgcttgcgcggcttgccggaacggtcgtttcgggcgggcccgccggatggcccattggccccggtgccggctccgcgtgccgttctcgcgcctgatgtgttcctctgcactgccataacccttccagtctacggtcaccacacccatacacgcttggggagcccaccattttcacaatgtcagctgggtaatcgcaggccgccgtccagaatctcgatcaggccgtcatcgtcaaggctggcgatgcaggcggcaagctgaatctggtccttccaaagcttgtcggcatcttccctgggcaacgtgactccagcgggaagctcgcgcagcgcggcgagcaccagaccgcgcacctgtcgatccgtgccttggaatcgttggcgtgggcgggtgcgacgctcccccagtccggggcggccggccttgaggaacgcgcaatcgtcggcaatcgggcaggtgtcgcataacggcgatttggccgtgcagatcaccgcccccagttccattaccgactggttccatgtgaccgatgggcgttcgccacgatgcagtcgggagcgtttgccgccacggatagtgctgttcacggtatgttcggcgctaccggcattatcggcgacgtcagcatcgcgcccgagaatctcgtctttgggcagcatgcggttcgccagcgcgcgttcggccgggctggccgctcccccgcgcgattcgacgccaaggaacacacggctcagcacgcggcggatgttggtatcgatcacggcgattcgttcgccgaacgcaaagctcagcaccgcggaggcggtgtaatcgccgatgccgggcaatgcagtgagttcgtcatacgtacgcggcagtttgtcggcgtactgctcggccaccacgcgggcacattcctgcaatcgcagcgcacggcgaggatagccaagccggccccatgcggtgatcacctcggccttgggggcctcggcgagtgagcgggcgtcgggccaacgttccatccagtcggtccagtacggcaccacacggctcatctgcgtctgctggctcatcacctcactgaccagcacgccccacggcgtggcccgtccgaagcgccatggcaagtcacgcgcattggcctcccaccatgctcccaatcgcaaagaaattgctgtgtcgttcatcgttcttattcttagcagctatgacgaacgaggcaaaacacaacccccagagcacaccgaatccagccaatcccgaaacaaaagtcgagaagatgttcgagtacgggtaccgtaaatcgaattacgggccggacgagctggtgaccgacgcacacggcaaccccatctccgtggtggacgcgatgctttccgccgagaaggccgccgccaccgaaaccgtgacgccgcacctgtgctattactcgccgcgtattcccggcaacaccggttcggccatccgcctgtgcgcagtgaccggcacgattctgcatttggtggagccgttgggcttcaacctgcgcgacaccaagctgcgccgagcaggcctcgactaccacgacatggcccacgtggtgctgcacccgaatttcgacaatctggtggagtcgatgcccaattcgcgcatcatcgcgttcaccgcacatgccaccaagctgtacaccgaagtggaatacaagccgaccgacatcctgctgttcggccccgaacccggcgacatccccgacccgatggacatcatggaaggccctcatgtggccgaacaagtgcggctgcccatgcgcccgtccctgcgttccctgaacctcaccaactgcgcatccatcgccatctacgaagcctggcgccagctcaattttgcgggcggagcgtgaggagaaggcccggtgggccttcgagtagcgacgccgaacgaacgccgacaggcgcgagagcggaaacactgagcttcgcgcagtgatgaacgctgaatataaggctacttgcgtttcgaggggcggatttggcatccgccggaggtctactgccgcttcaaggggctgtcaaaggacgagaccccgagtatggccgttgaaatatcaatgcttgtactcggggtcttcatatataccagcccctcgaaacggaagtagacctccagaaaggtcggaatcagcccctcgaaacgggaatagacctccagaaaggtaattcgagctggtatctgccttcaaagaggtacattcgagcgtttgcagaatgctatctgccttcaaagaggtaccgcaatcgagaaaccccgggtatgagtgttgatattccaacgctcatacccggggtttccgtatataggtacctctttgaaagcagatagctctccgcgaggggccaaatgtacctctctgaaagcagataccctaccgaatcaattcttgaagctgtgaatcggcgcagggattcggccgccgcgggtcacgaaggcctcgcagctggtctggttcaccggaatgatcggcgcatagcccatcaggccgccgaagttggccatctcccctacgcctttgccttccaccggaatcacgcgcacggcggtggtcttctggttgaccatgccgatggcggcctcgtcggcgatgatgccggaaatggtggctgcggtggtgtctcccggaatggcgatcatgtcgaggccgacggagcacacgcaggtcatggcctcaagcttttcgatcttcaggcagccattggttgccgcgtcgatcatgttcttgtcttcggagaccgggatgaacgcgccggacaagccgcccacgtaggaggacgccatgatgccgcccttcttgacctggtcgttgagcatggcgagcgccgcggtagtgcccggtgcgccaacctgttcgaggccgatcttctcaagcacttcgccgacggagtcgcccacggccggggtcggcgcgagggaaaggtcgatgatgccgaatggaatgccaaggcgacgggatgcctcctgtgccaccagctggccgacgcgcgtgatcttgaacgcggtgcgcttgatggtttcgcacaggaactcgaaatccttgcccttggcctcgtccaatgcacgggagaccacacccgggccggaaacgccgacattaatcaccgcgtcgccttcggtcacgccatggaagccgcctgccatgaacgggttgtcgtcaggcacgttgcagaaggccacgaacttgacgcagccgtaggagtcgttgtcggcggtgcgctcggcaacgtccttgatgatgtggccgagcagttcgaccgcgttcatgtcgatgccggtcttggtggaaccgacgttcacggacgagcagacgatgtcggtctcggaaagggcttgcggcagggagcggatgagcaactcctcggccggggtcatggacttggagacgagtgcggagtagccgccgatcaggtcgacgccgacctccttggccgccttgtcaagcgcgtgggcgatcttgacgaagtcctcgctcgtcttgcaggagctggcaccgaccagcgagatcggggtgacggtgatgcgcttgttgacgatcgggatgccgtagtcgcgttcgatggccttgccggtggaaacgaggtccttggcataggtagtgatcttgcggtagatgttgtcgcaggtcttgtcgacatcgtccgaggcgcagtcgagcaacgagatgcccatggtgatggtgcggacgtcgagcttctcctgctcgatcatctgattggtctcgtggacctccatgatgttcagcatggtttgttccttacaggatatttaaagactagtttggcggtcaccctcatcagagggataaggatggctccgtcagcggaaagcccaccgggctttccgcctcctcgcgtgcggcggcctgctgagcgggccgcctcaaatacggtgcatcttggtgaagatttcctcacgctggcagcggatgcgcacaccgatgtcgtcgccgaggtcctcaaggttgccgaccatcgcgccgaagtccttgtccgcgttggcgtagtcgacaatcatcatcatgttgaagtaaccgtcgatgatggtctgggaaatgtcaagcacgttgacgttgtgctgggacaggtaggtgcagactcgcgcgatgatgccgacggtgtcctgaccgacgacggtgatgattgccttgttcatggctctccctggtcgtatacaaaaagcgggtgactacccaattatagggaagacacccgccattatgttcattaccgattcatgtatcgtttgccgcccttgaacatgaaggagaacaccagcacaacgcccgagttgacgccgatggtaaagaactgtgcgctgccgatcgcggtcatcaccacgccaatggccagtatgcagccgacgaccatccactgggcggtaccggaggatacggagaactcgtccatcaaatcgggcagggcgatgttcatggatgtctcggacagcatgccgaggaatgcgccgatgtacaggccgagcatcaccttatgcggatggtcgaaatgcctggtttcaggagcgttatgggggttatgggaataagtggtgccggattcgccggcgggcatggtggtggtgcgggataaaacgaagctccctcgtcagagggagcttgcaatggctcaggcctcgcgcaaagcgctcggcgctgcgcacgcggtcctgcaattacggacgacctacggccgacccagcattacctcggcctcgcctattggctcgacctcgaccgcatccgccggacaacccaccgggttgtcctaggcctcgcgcgaagcgctcggcgctgcgtacgcggccagggcgcgcggtgcgtggaagccttgattttcgaattcgtcggcgatcttctgagcgacttcctgagaacggcccttatcaaccaacgcgatgatggagccgccgaagccgccgccggtcatacgcgcaccgtaggcgccgttcttgcgggccacgtccacggcgatgtccagctcggggacggtgacctcgtagtcggcggccagcgaatcgtgggaagcgttgaacagacggcccgcagccttgatgtcgccctgagcgaaggcgcgcacgaaggaacgcacgcgctcgatctcggtgaccacatggcgcacgcgcttcttcatggtctcgtcaggcagggcgtcaagcgtttccttgagggcctggaactggtcatcggccttggagatgccgtcggcggtcacacgcaggttggccacaccaagaatcttggcggcttcctcgcaggtggcgcgacgctgagcgtactggccatcgttgagctggtgcggagcctgggtatcgaccacaagcagctcgaggttgtacttgtcgaggtcgaactcctgctgggagacgttctcc

SEQ ID NO: 3805 - DNA, 9978 bp, Unknown
  R35_2m  MAG No. k141_4361
cccggtgccctgaacgaaagagagggaggtagacatgggagcgattgattccggtaacaccgcatggatcctgacatccgcgtccttggttttcctcatgacgcctggtgtggcgttcttctacggcggtatggttcgtgccaaggccgttttgaacatgctgatgcttgaggcggccgcgctgtcggtcaccatgattatttggactttgtggggttggtccatcgcatacgccggttccgacatcggcggtattttcggcgacccggccagcggcttcctgctcaaggattccatggtcgcgcaggacggcgtgttcaccgccaccggtctgaacgacaacaactacccggtttccgtggacgttgccttccaggtcgctttcgcgatgattaccgtcggcctgatctgcggcgccatcgccgagcgtgtgaagtacagcacctggatgatcttcgtggcgctgtgggttaccttcgactacgctcctatggcccacatggtctggaacggtggtctgctgtctgctgacggcgccatctccaaggctatcggcgcggccgcccacgatttcgcaggtggtaccgtggtgcacatcaacgccgcagtcgccgccctgattatcgtgctcatcatcggcaagcgtaagggcttcggcacgcagccgttccgcccgcacaacgtgccgttcgtgatgctcggcgccttcctgctgtggttcggctggttcggcttcaacgctggttccgccttcgccgccaacggcaccgctggctacgcttgggtctccacttccgccgccactgccgctgccatgctctcctggggcttcaccgagaagattcgctccggccactacaccgctatgggtgccgcctcgggtatggtcgccggtctggttgccatcaccccggccgccgatgtggtttccccgctgtgggccatcgtgatgggtgccatcgctggtgttctgacctgcctggcctgcggtctcaagttcaagttcggctacgatgactccctcgacgtcgtcggcgtgcatggcgttggtggtttcaccggtactgtcctcgtcggcttcttcggcgaaggcaccggcctgctggctggcggcgactggaagcagctcgtcgttcagctggtcatcgctctcgtcgccatcctctactccgcggtgatcaccgcgatcatcgccttcgctctggagaagaccatcggttggcgcgtcaccgaagctcaggaagtcggcggcatcgatcttgccgaccagggcgaacgtgcttacgattttgctggtactgccagctctgttctcaaggaggtgaggtgagatgaagctcatcaccgctatcatccagccccataagctcgacgacgtcaaggaggccctcgcggccgccggagtgcacggtctgaccgtgtccgaggccaacggctacggccgtcagcgcggccacaccgaggtctaccgtggcgctgagtacaccgtggacctgattccgaagattcgcgttgaagtgctgtccgatgacgcggatgccgagacgctggtcggtgtgatcatcaagtccgccggcaccggcaccatcggtgacggcaaggtgtgggtcgctccgctggactccgtggcccgcgtgcgtaccggtgagaccggttccgccgcgatctgataacacagacgtccatgcctagaaggggatggactgcatgggaaaggtccccgcacgccgcgaattgacgccgtgcggggacctttttggcaatgaaagatgaagcaatgacttcagcagtagatggcttgaaacaacgattcatggatatgagccagccggatgacgatggtgtctaccggaatggtgcgaccaagcgtaaagcccgcacggaactggccatgcaatgcctcacggagctgtggaatgcggcctgcaaggatgtctctttccccgtgcccgactccggcatcggcttcgccgcggtaggctcgctggcacgtggtcaactgggccccagctccgacctcgacttggtcatcatctacgagcctcgcacgttgaacgaccagcagctcaacgagttggccaacaaactctggtacccgctatgggacagcggtctggacctcgaccactccatccgcacgcgcgcccaatgcgaggaagtcaccgaccatgaccttcccgccgccatgggctggctggacgtgaagcccatcgccggcgacactgctctgattaccaccaccgccacatccatcctcgaacgctggcgcaaggccgcccgcaagcgcctgcccgaactgctcgactccgccaaagcccgactcgacgaattcggccgcctccaatacgtcaatcagcccgacatcaaggagacccgtggaggtttgcgcgattcggtgctcgtctccgcgctcgccgtctcatggctggccgaccgcccgcacggcatctacgacgaagccgtggaacgtctgctcgacgtacgcgactgcatccatctggtggccggcaaggataccaacctgatgctgacgccctatcaggccaaagtggctgccatgcttggccttgccgatccgacttggcccgaaaacgagcgtgccgcctactcgatcgacgatttgcagacgctgcttgcccgtatcggccggcgcatctccttctcgcttgattccaccgcatcccgcgctggacattcgctgacccacgaaaagccgcgattcgcgttcttccagatgttctctcagcgctctggcggcaagcgtgaagccccgcaattcgacgtggtggctcccggcgtggccaagcacgaaggcgaattggtgttggcacccggtgccgagcctgccaaggatgccgagctggcgttgcgtatggccgtggcggccggcgaattcggtttgcccatcaacccgtctaccttggttaatctgaagcactgcccgattcacgacaaccagtgggatgacgaatcgcgcgagctgtttattcgtctgcttgcatgcgggccgaatcttatggaagtgtgggagagcatcgacttcgtggacattccgggtcgatggatgccggaatggctcggcgtccgcaaccgtccgtccgcctcggccgcccaccggtacaccatcgatcggcatatggtggaggtcacgtcgcgtctgggtcgtgagacaccgtccgggggacggtatgatgacgatcatttcaaggcgttgctgttggccggtattacccatgacatcggcaagcgcgcgttcgtggccgatcacgccgccgagggtgcccgccatgtgccggtgattctcaagcgtatgggctacgcgccggacatcgtcgactgggccaccgtgctggtgcgtgagcatttgaccctatccgaatttgccacgggtaaggacccctatgatccggccgtggcggaggagttggccgaccgcttgcaccacgacaagatgctgttggatatgctgttcgacctgacccgggccgacggctcctcgctcggtgccaccgccggtgagaccatcaccaagcaatacggctggtccaagtggcgcgaacaaatcgtgcgcggcatgtattccgccgctcgcgccgcgatgtaaacggaatcgcccagcacttcgcgcggccgatacctacttcatccatgcgtccgagcgcacgcgcagcccgttggacaggccgcgcccgcccatgagcaccacgttgaacgcggcccagagcacggcggtacgcatcaggtcgctcgtcagcgccggcgtcaccatattggccagtatgagtatgagcgtcacatacaccacggcggtcagcgtgcaggtgcctgccagatagcggtagtcgcgcgcgccgataagaatgccgtcgattgccatcatccagccttgcagtgggaagaagatgcccatcgtcaccatgccaacggcaatcaacgtctgaatatttggcgtaggggagaagaagtgcccggcgaacaggccgactaccgcaaaagccgtgccgattaccgcgccggtgaccagccccgcacgcccggtcgcccgcgtcaaccgccgcgcctgctgcacgctgccagcgcccagcgttgtggccaccagcgtctggccggcgatgcccacggaatccagcatgttcatcgcaaaattccaagaggagttcacggcctgaaacccggccaacacggcagtacccatgcgcgcggcacaggcgaccgtagccaccatggccgcacgaatcgccaatgtacgaatgaacaatggcagtccgtcgcccccggctgccgcaataccggccaaacgaggccgcagactcgcaccgtccgcccgggaccacagaatggcggggattaccaggaacagccccatgaaccactgagctatcagcgtcgccactccggagccggcaatgccccaattcagcacaataacgaacaacacatcaagcgccgtgttcaccaccgcgccgcccaccgcagcgatcagcgtgatacgaaccttctgcaatcctcggaaaatgccgttcgccgcatataccatcagcatgcctggcgcacccagcacgattgcgcgcgtataggtcacggcttgttccaatacttcgccctgaccgcccagtgcccggcataatggctcggcagccgcgaacaatcccaatcccagtacggtgccgatgctcaaggccagccacaggccgtcaatgcctgcctgcagtccctcgcgacgacgacccgctcccagcagatgcgccacctgcgcagtggtcgagtaggccaggaatatgcatagtccgactgccgtgaggatgatggtggagccgattgacaggccggccaacgccgcatccccgatatggccgacgatggctgtgtcgataaggatgaaggtcggttcggcgatgagctggccgaaggtcggcagggccagcgccatgatccgacggttggtggagcgggcgtcggtcgggccgttgctggtgtttgtgtttgcgccggcatgcggggttccgaagccatcgcggcgtgtggtatcgccggaactggtggctttggcgtcggaagagtctatgtgcacgctcacacgcatatcacgcctgactacattgcgcaagcacctgttgtggacgcggaatgttatccccagactatccaccaagttatccccagtatgtggataacttagtggattatccccagaattatccccaaaatgtggataacttatttttctatccacattttgctttctgcgtgtcgcggcgctgactcataggtgaatgagaaatgaaccgatgcgggcaaccgtttcgtttccatacgatatcgttcacctgccacgccacctcctatacttgaaggctatggcagaaggaagtgaacactcgtatcagaatgggttcggcagtggctcggatcgtggcgatcgtggcgaccgcgcgggccggggcggcgcgcaggcggcggcagctggcgacccgattttcgaccgcgtgcccccgcacgatgacgacgcggaaatggccgtgctcggcggcatgctgatgagtaaggatgccatcggcgaagtttcgcagaccattgacgtcaccgatttctaccagcccaagcaccagacgatctacaacgcaatcattgatctgttttccgccagccagccggtggacgtggtgctcgtggccaaccagctgttggcggatggcaacctcgacaaggtcggcggcgcggactatctgcacagcctcgtcgcatccgtaccgaccgccgccaatgccatgtactacgcggagatcgtccatcagcgggccattttgcgcaatgtgatcgccgccggcaccaaaatcgcccagctcggttattccgccgagggatcgcaggctgaggatgtggttaacctcgcccagtccgagatctacgagatgtcgatgggcaaggtgcgtcaggactatgccgccatcggcccggtggtccacgacgcgctcgaccagctggacaaactgcagcagggtctcgtcaacaagggcgtgccgaccggattccgcgacatcgacgacgtgacccagggcctgcagcccggacagatggtcgtcgtcgcaggacgtccggccatgggtaagtccacgctcggcatcgacttcgcccgcgccgccgcgttgcaccacaacatgacttccgtggtcttcagcttggagatgagcaaggtggagctcgctcagcgtattatctccgccgaaaccaatattccgatggccgccctgcgccgcgccgacgacatcacccccgaacgctggaacaccctgaaccagttctggaccaagatgcagaatgcgccactgttcattgacgacagcccgaacatgagcctcatggagatccgtgcgaaatgccgtcgtctgaagcagaccaacgatctgaaactcgtagtcatcgactacctgcagctgatgacctcgggcaaggccgtggaatcccgtcagcaagaggtgtccgaattctcccgtgccctgaagctcttggccaaggaactcgaagtgccggtcgtggccctttcccagctgaaccgtggcccggaaatgcgtaacgacaagaagccgcagctctccgacctgcgtgaatccggctcaatcgaacaggacgccgacgtggtgttcctggtccaccgccctgacttctacgacaaggaagaccgccccggcgaggccgatatcatcatggccaagcaccgtaacggcccgaccgaaaccttccacctcgccttcctcggtgccacgtccaaattcaaggacatgccgcaggactacaacagcaatcagggggtgtgatgatggcaagcaacgtttcacgcgatgtttcgcaagaccaatcgtccgtggtgcagacccgcaaaccgtggtatgcgttcgccaccgtggccgcaggccgcttcgtgcggtttgcatcccgcgtcaccaaacatggcggttcggctttgcccggcaaagtcgtagaaaagattgaccccggcttcctgacccgtacgctcgggcagttgccgcttggcgtggtattggtgtccggcacgaacggcaagaccaccaccacccgcatggtcgcctcgatgctctccgatctgggattgaaggtgttcaccaatccgaccggctcgaacttcgtgcgcggcgtggtctccgcactgctcaccgaagtcactttcggcggcaaattggacgcggacatcgccgtactcgagctcgatgaggcgtacgccgtccacttcgtcaagcaggtcaagccccgttatgcgttgctgctgaacgtgatgcgcgatcagcttgaccgattcggtgaaatcgacaccacggccaaactgctcagccatgtggctgcggcgactaccggcactgtggtactgaaccgcgaggacccgcgtatcgccgcgctcgccgcgaaggccccggctggcaccacagtgcgatacttcggcctcgccgacgatttgcgccactatttcccgtccgatgacgacatggccacgaccgtgtcggtggaaggtatggccgggccgctcccttcagtcagtactcccctcagtccgcttcgcggacagctcccctcggagaggggagcttccgcaggcacggcagaactccccgccgacgtgacacttaccgccgtgggcgaccacaaggccaccttccagatggacagccaggactacgccaccgacgtcaaacttgaaggcgtctacaacctgtacaacgcggccgccgcgctcgccgtggtacgtgcggtgatgcaagacaatgccgccgcatccaaggccaccgccgcagccaacgcctgcgccgtgtccgccgacgagctcatcgccgccgtttcccgcgtcacgccggctttcggccgtggcgaggtcatcgacgtcaacggttccccggtcgaactgctgctggtcaagaacccgatgggcttccgcctctcgctcgccagcttcgacccggccaacgcggacaccatgatcgccatcaacgacgaatatgccgacggccgcgacatgagctggctatgggacgtggacttcacctctttgcgcgcgtccggtgtcgccatggtctccggcgtgcgcgcctgggacatggcattgcgcttggggtatgaccaagtgccagtcgccgatacgaacaccgacctcgaacaggcggtcaccgcattcgtcaacgccaatcccggcacacgcaagcacatctactgcacctacaccgccatgctcaaaacccgtgccgtactgggccgcatcaccgaagtacgggacgcgggcgtgggcaagtaaccaccctctagcgcccgcgcgccacctctcgcctgcgggaggacatggtgaggaataagacttccccttagcgggaagacatcgacaaggagaacgcgacatggccagaacaattgatgtggtgtccctgtatcccaaagacatgaacatctacggcgattccggcaacgtgctgactatccgccgccgtctggaactgtacggttacgaaccggtcgtccaccagtacaatcaaggcgacgattggcccgaccaggtggaccttattctgggaggcggcggccaagacaccggccagaagaaaatcatcgacgacttctaccatcgcgccgacctgctgcgctcgcttgccgcagacggtacgccgatgctgatgatctgcggcctgtaccagctgttcggcgagtactttgaaaccgtggacggcacccgtctggatggcatcggcgttatcggtgcttataccgtgggccagaacgtgcgtatgatcggcaatcttgttgagcattccgaccagttcggcgatgtgattggctacgagaaccactccggccagaccttcctgcgcgaaggcgttcagccactcggcaccgtcgatcaggacggccgaggcaacaatggcgaagatcataccgagggcgcgcgcgtgcacaacgtgatcggcacctacatgcacggctcgttgctgcctaaaaaccccgccatcagcgatttccttatcgaaaccgccgtgactcgtcgttacggtacgttcgatacgtccgatcagacccccgaacaagccaaggagctcgcccggatcgatcaagtagccaccaacgcgcgcaaagctgccgccgaacgtcctcggtgaattctcggtgagtcctcggtaagtaccaatcagcgaaaaatcagtcgaaatcagtctgagggtctagtacattgccctgttgtttgcgctaggcttggtggtacgagacatggcaccaggccatgtcggacctcgaaggaggggtatcatggctgattttgatcttctgggtgatggcctgcgcaaggtcctgctggcgggcatcggagccctcgccaccggatatgagaagagcagcgagctcgtcgacgaactcgtcaagaagggtgagattacggtcgagcagggcaaggcgctgaacaccgagctcaagcgcaaggtgagcgagacagtggatgacgccaagaaggccgccgccgaagccggcgacaaagctgctgccgcagccgacaccagtgccgccgacaagcccgccgacgagggcaaggccgagtgaccaagcccacacgcactacgccggaatcagggtcgaccccgctttccagcagggtcgaccctattctgacgcctgcgaaagccgaacgtgaggcggcggcgaaccggtccgtcgacacgccggacacgctcaagcgggccgttaccaaggcgactccgagcgtatccgacgaaacgctggcactgttcggacgcaggaacgatttcgccacgcgctaccatctgacgcgccgtggcaagatcaaacgattggggcagatcaccagaatcgtcgagcaattcgacgtgctgcacggcctgactccggtcaagatgcgcctcatgttcgaggcgctcggtcccacgttcgtcaaagtgggccagattctgtcgatgcgctccgagattctgc

SEQ ID NO: 3806 - DNA, 21193 bp, Unknown
  R35_2m  MAG No. k141_4366
accctctgcggtggaatgaatgcagagggtctcgtggagctgacggtagtcgaaaccgcgacctcttcgatgcgaacgaagcgctctaccaactgagctacagccccttggatgttactttgctccgcaaagcaactcgcaacaatatagtacggagtgcggtcaaacgcaatttgacgccgaagtgtcgcagacggggtaaatcacccacaccgctccgcatggataccgcggtggcacccggcaacgtcatcatgcttccagcacatgcagcactttcttttcgttgtagaacgcgaatacgatgccgcccaagccgcacagcacggccgcgcacacggcggcgatgcgatagcccgcgccggacgccatgccgatggtggagacgccggtgaacagcagcatggccacggactgccccatcttcatcgcaaaggtgcgagccgcgtagaacatgccctgacggtcctggccggtggtcttggagctggcgtcggcgatattcgccacgatggcttgcggcagaatgccgaacgcggccatcggaatcgcgccgaccaccgagagcgccaaaccctgggccatcgccggaatgaagccgagcgcggccgaaccaagggcgccggcaaatgcgaacgcacaggtgaagatcacgaaggcaaccagcagcaggcgcttcttgccgaccttattggccaagatattgaccggcagatagaacagcacggagacgccggtcatgagcacgaagtagatggtcgtggtggtttccggcagcttgagcaggctggtcacgaagaacggcagaccggtctggaaggtggtgatggccacccagtagaccacgtcggaacacacgaacttgcggaattcgccgtcgccgaacgtctgcttcagggattcgatggccgattcggaggtgggctgggagttgacgtagtccttctcgcggatggccagcggcggcaccagcatgcacacgaacgccacggcggccatgatggtgaaggtcacgcggatggcggtgatacggcccatcatcggcacgaacgcgccccaaatcaccggcgccacgtacgcgatggccgtgccggccacccaagtgaaggagatggcggtggagatggtgagttgctgcttggagtcgtggccgagttcggcgatgagcgcgttgtacggcgtgcagtagaacgtgaggacgatgtagtagccgatcacggtgacgaacaggaacgccgcgttcacccagccggtgccgttgatcggactccagaacacgagtacggtgaccaccgcgagcggcagggcggcgaatttcaggaacggcatacggcggccggatttggcgtcgcaacggtcggagagggacgccacggccgggtccacgaacgcgtcgaagaatcgggcgaaggcggtgatgccgcccaccacggtcacgatgccgagaacgaccaggccctgcggcacgaatacggtctgaccttgggagatggtctcctggtcaggttggtagaaatacacgagccagttggagatgatgccggaaagcagcgcccacccgaactggccgaccgcaaacgcccacactttggcgatggggagatctttgatggctgatttcgttgatgcaacttgcgcacccgttacacttgctgtagtcgtattgcccattccccataacctccgaatcaacattgacacagtgtcaaaaaccagtatacaccggggttttacactcgattccctgcagggcaaaaccgcacaccacaatccacaccccgagccgccttcccctcagccatccgcaggctctacgatgagagccatgactggtctggccgaacgactaccgcacgtcgccgctttccccgaagcgctgggcaccgggttgctgctgcataccgatgtcgcgctggatgacgggctcagtaactgcatcgatatgttcatcagcacctatgaagccgcattgtcccggttcaaggatgattcgacggtcggccggatgcgcacggccacgcatggcggcacgttcgattttcctgactgggcattgggtttatttggcctgtacgaccagctgtttgcgtcgactaatgggaccatcgacccatgcgtgggcgaggatttgattcggcttggctatgacgagtcgtattcgtttacgcctgcgccagatgccgctgaacatgcaggcgcgatccacggacgagccatttggtcagccgacgttgagcggcatggcacaacactggtgacgcgcggaccggtcgcgctcgatttcggcgcgtgcggtaaggggtatttggtggatttgcttgcggggatgttgggtgatggcgcgggtcaccctcaacccattcaatacgtcatcgacgccgggggtgatttgctagtgcacacggacgaaccaatcaccatcgcccttgaagatcctgccgatccggccaacgccgtaggtacggtcgaaatcagccacggcgcattctgcgcgagctcccccagccgccgccactggtctgacgccgcaggtcaccaacttcaccatctgctcaacgccatcgacggactaccggttgacgatgtagccgccacatgggtggccgtcacgccgccatcgagcgccataaccacgaagacatcgacgcatggcagcaatgcctcgacaacggcaaaccgcgataccgacgattcgtcgaacaccgttgcggcacacgtccctgtcacactggccgacggcctcgccaccgccctgttcaccaccccggccacccagctgcgcgctcacttccccttcgaatgcgccattctcaacgccaaccgcaccgccgcccaatcccccaattttcccggcggctttttcacacactaatgtacgaaatcatcagtatcacatccctcgggtggaccgatgggttgctcccctcagtcagctacgctgacagctcccctcggagaggggagccgagtatagctaatccgctaatccgctaacgcaggaaacaatccgtcagtcagcgagtgcgaactggctgttgtagaggtcggcgtaaaaaccgcccgccgccagcagctcgtcgtgcgtgccgcgctcgatcacgtcgccgtggttcatgacgagaatcatgtcggcgtcgcgaatcgtggagaggcggtgcgcgatcacaaagctcgtacgccccacggtcagcgcgtccatggccttctggatcagctcttcggtgcgggtatcgaccgaggaggtggcctcgtcgagaatcagaatcggcgcgtcctgcaccatcgcacgggcgatggtcagcagctgcttctggccctgggagagcgacgacttgtcgtcgagcacggtgtcatagccgtccggcagcgagcggatgaagtggtcgaggcccacggccttgcacgcatcctcgatctgcttattggtcacgccgggcttggagtaggcgatgttctcgcgcacagtgccgcggaacacccacgtatcctgcagcaccatggagaactggtcgtgcacgttccagcgcggcacggacttggtgtccacgccgtcaatcgcaatcgagccgccggaaatctcatagaagcgcatgagcaggttgaccatggtggtcttgccggcaccggtcgggccgacgatggcgaccttctgcccggccttgacggaggcggagaagtcgtggatgatcggcttgcccggttcgtaaccgaactgtacgtggctgaattccacgtcgcccttcacttcgtggccgttggtcccaagcagagcggacttgccggattcgtcctccatctccggctcctcaaggaagccgaacacgcgttcggcggccgccgcgcaacgctgcaggttctggaaggcctgggcgaactgcgccaacggctgggtgaacagacggacatacatcatgaacgccacgatcacgccgaactcgatctgcccgtcgagcgcgagcgccgcgcccaccacgcacaccaccacgtagccgaagttgcccacgaaattcatgagcggcatcatcaggccggagaggaactgcgacttccagccggactcgtagaggtccgagttgtacttctcgaagcgacgaatcgaatcggcctcgccgttgtatgccttgacgatgaggtgaccggcgtacatctcctccacgtggccgttgacgtcacccagcgccatctgctgccgggcgaagtacttctgggaggacttcatgatggccatcatgatgatcaggccgatgaggctggcaccgatggcgcacagggtcatgatcacgttgttgtagaacatcatcaccagcgcgcccacgaacagcgtcaccgaggtaatcagcgagccgagcgactggcccagcgtctggccgatggcgtccacatcgttggtgatgcgcgacagcacgtcgccgtagctaaccttgtcgaagtatttgagcggcagtttgttgattttgaccgagatggactcgcgcagtcgctgggcggtgcgctgggtgacgttggccatcatccagctttgcacgtagccgagcacggcgtagcccacgtacagggccaccaaagtccaggcgatgtggcccaccgtgccgaaatctaccgagttcatcaccggtctgccgttgacgatggcgggcagacctttgacgatctcgttggtcatgtccttgagcttgtccgggccgacgatctggcagacggtgccggccgcgcccaggatgagcgcgatgatgatgacgggaagatagttgcggcagtagttcacgagtttgcccatgactttgccgaaatcatggggcttttcgacggcacgcctgccgcccattggtcctcttggcatttgttttactccttaaaagtccgtattgacctccctctgatgagggaggtggcgcgaagcgccggagggagagaagccgtacgcgactacccctcagtcagctgtgctgttttattcgctcgcttatcagctcgtcttcgcctgggaacagcccactgggctgttccctttacggctcagcccctgacatggggagctaccgctgccgccccccctacgccgtaagctccgactggctgagctgggattcggcgatctggcggtatacgtcgcagttgtcgagcagttccttgtgcgtgccctgacccacgaccttgccgtcgtcgagcacgacgatgcggtcggcgttcatgatggtgccgatgcgctgggccacgatgagcttggtggaatccttggcctcgcgggcgagcgcgtcgcgcacttcgcggtcggtcttgaagtcgagcgcggagaacgagtcgtcgaaaatcaggatttccgggtgacggtacaccgcgcgcgcaatcgacaggcgctgcttctggccgccggacacgttcgatccgccttgggcgatcgcggcggaatacccgccgtccatgcgcgccacgaactcgctggcctgcgccacgtcggcggcggccttgacgcgattcagctgctcggccggtatatcggcaccttccgcggcctcgccagcggcgatcaacgcggcctcgcgcttgcgcccggccggggtggaggtatcggccatctcgacctccgccgggtcgcccggctgatcgccgtagctcacgttggaggccacggtgcccttgaacagcacggactgctgcggcacgtagccgatcttgtcgcgcagggccttcaggtcgtagtcgcgcacgtccacgccgtcgaccaacacctggccttggctggtgtcatagaagcgcggcacgagattgataagggacgacttgccggagccggtggagccgatgaacgccaccgtctggccctgctcggcggtgaagttgatgccttccagcatcgcctcgcgcgaatccgggtaggtgaagctgacgttgcggaattccacggtgcccctctggccggttttggccacgtcggcggcggttttggtgccgttctcgacgattggctcagtgtcgagcacctccatgatgcgctgcgcggacacgtcggcgcgcggccagagcacgaacaccatgctcatgagcaggaagctcatgatgacctgcacggagtagttggagaacacgaccatgttggagaacacggtgagcttgtccttgagcccggcggcgtcgatgaggtaagcgccgatccagtagacggcgagcatcaggccgttcaggacggtgttcatcaacggcatcatgaacgccatgacgcggttggtgaacagctgggtctcggtgaggtccttgttggccttggtgaatttggcttcctggtagtcctcggcattgtaggcgcgcaccacgcgcaggccggtgaggttctcgcgggccacgaggttgatgttgtcggtcagggtctgcatgaccttgaacttcggcatgaccatggccatcatgacggtgatggacaccagcaggaccgccacggcgatgccggtggcgagcgtccattcgaagccttcgccggcgatcttgcacacggcccatacggccatgatcggcgacttgacgatgagctgcaggcccatggtgatgaacatctgcacctgcgtgacgtcattggtggaacgggtgatgaggctggcggtggagaacttgctcatctcggccgggccgaaggactcgaccttgcggaattcgagcgagcgcagacgctgggtgaacgaggcggccacgcgcgcagcgatgtagccggtgatgatggcacacgccacggatccgagcgagatgagcagcatcttgccgcccgcgatccagatgtccttcatgtcgctgcccggcgtctcgaccagcgtggtgatgtctgacatatagtcgggcagtttcaggtcgaagtagacctgcccgacgatggtcaccagggcgatgagcatctgaccgatctccgctttggagaggtatttcatgatgcgaaacattggtttccccttgtgttggttgggttggttattggttattggcgattggttcttaagttggctgggttatcggtgattatcggttcacgatgtcttaatagtttccattgtttgattacttacactgtgagatattatacgcacttctgtatgttcgctgtgagcgtcctcaattacctttacccccctctgacgagggaggtgtcaccgcgcagcagtgacggagggagagacccgccagcgggaggaagctagtctcgctcagcctccgcgcgcttagctgccatgtgttcagccacgcgcttgtcccgctccacgaatgcctcacgcacttgttcagccgtcggccgaggccgccccggatggcaaatcgacatatatgtggtgaactcagacaccaggtcaacgaattcgcgcgtgcgccgctcccccatttgcgagaaaatccagcaaattgcggaacgcatttcctctatcatccgatgagactgctcgcgcccggaatcagtgagattcacgcgaataatgcgccgatccttggaatcaatgtcacgcgtgacccagccttttttctccagagacgacagcacagtggagatgcggccggaactggcctgcagcgccgatgccaattgcgacggcgtttgcgtccccttcatggacagctcccggagcacgaactgctcaccatgggctccacgagtgaattccctctgcatcgtcgaacgattgccccacacgctggcatacagttcactaactgcttcctgctcaaatcccataagagcaccatccattcccattcgccacacggcagagcgccgcaaacatccccaagaatatctcacaccataaacaattcattactagaaactatttttggaacgcataatgcacacactccacgctctttgatattctgaaagccgcatagatattcacttcggggcgtcgtctaagaatatttgctgggccaacggtagcgacgttggcattgtgctccatgaggtatctggtcgaaaaggcggacgaagacagaccagttgggcggagcgcgcccatacctcaaaaccattgcaattattggctttgaccattttcgtggagtcacgaaaatggtcatgaaaaacataaggacacacccatgaaccgcgacgaaatcacacgcaaaaccagcgaactcagcactatcgcacacaccaccgaggactccaaagttgagtattggtatgcacgcgagctaatgacctatatggggtacgacagatgggaaaacttcagcaaagctattacacgagccaagcaagcttgcgacaattccggcgtatccgttgaatcccatttccgtgacactacgcgagacgtgactctcggcagcggtgccacccgctccatcgcggacgtcaagctcacccgatacgcctgctatctcattgctcaaaacggtgatccaaagaaagaagaagtggcacttctccagagctattttgccgttcagactcgcaaaacggaaatcattgagcaacgcatgggagaaatcagccggctcgccggccgagaggcccttgccactgcagagaagaaactctatccgtatacccaaatcacacacaacaaaaccgcacaagagcacatgtacacgcccaaccacgccgcagaacgccggcaaggatgtgatacaggccacagaaagcgttgtaccgcctaggcaatgcaacaattgtccgctatgctctgaaggcagatggcggcacggatgccatcccaaagagggggtatgaccatgattcggggtatgaacctatgcagcatcgccggctgcacgcacgaagcagaagaagcgggcatgtgcaacatgcatttcacatcggcgctggttcacggagcgctgcactacactgcggacggacgtccgtcgcactgctgagcgcaacaacaaagcaaaacaaccagtaacgctcaacggcttccacatgttcatgctctaattgcatgtacttgcagacacaatggccggtctgagccagctgccctcgcatggagcagctggctcagaccggccattattgttgctttgtactgtttgcactgtattgcgcctgcattgcgcaagctcgggcgcactcgggtgcactcgctgagtggcgtgaatcgcagattgctcaatagcaacgcaatccacgccactcagcagttgccatggttatgcgcggcgtttgcggatgacgagcaaggcaccagccgcagctgtcagcaccacaaccacgaccgcaatggcagccacggcaacacccgtattcgaaaggggcgcagcgccattagcagccggcttattcgtggcagtgttaccgggcttagcagtgttgccaggattgttggtatcgccgggcttctgctctccagggccgggagtgacctccgtggccgtgaccgtgacttcgaacgtcgcgttcacgccacgataagagacggtgatggtcttcgtgcctgcggtggcagaatcaaagccagtgaacttcagatcaccatcagttggatcaatcagcttgcgcagcgtttcggtatcgccgactttgtaaatggcggataccttcacatcggcagcgttgaacttatcgcctacctgataggaatccttggtcacttccacagcaagctcggccaactgaggcagttcgccgaatgtcactgtgtaggtttccgccgtgccatcctcagcagttacagtcaccgtggccacgccgctgttctcggtcgaagcctgctccacctgcaccgtagccttcgcgtcagcagcagtcgcctccaccgtcgggtaagaagcagcgtctccggccagcgcaccggcatattcggtgatatccgcggagaatccgtcaaccgtcttgccatccacagtcagatcagcaagattggcgttactagacggctgcggctttggcgttgcttcaccttcggcgatgcgtacttcagcgatcttggcatagtcattgccatcggcgtaggtgaagttgaggcgaatgcccttggtggcgggcagagcgctcacatcggcttccgtcacggctccagcagcaccattcacagtgactgccggcagcgtggcatcagtccacgtggcgttgtcttcagctaggtacgatacagtgaagctcttcggagcggcctcgcccttggccttatccaccgcaacgctgagcttgcccagctgatatgccttatcgaaggtgtagctgagccatggcgaggtgtcgccggtgccccagttcgaccagttggtgctcagattgttgtcgcaagtcaggtcggccgtagaagcggaggcccagctgctggccggctcatacttcgaggctgcggcggacgagcagaacaaccgggcaaggttgctttccacagtcacggtgagcgtggcagttactgaagaatcagtgacaaggcgtaccgtcacggtttgctcgcccaatttggtggtgtcgaagccttccaacgtgtattcatctggctccagtacacgcgtcttgccattggtgagcgtagcggtaaccgtcacgtccttatgcgcgagcgtctgcctcttggcgatagtggcttcagggcccttggccgcgatggactccacagcagcagtctgcgaaccgaacgcagtgccgttgaaggccacggtgaatgcgccggcattgctgttcgacgtggcgaaagcaccggcatcgagcccggttacgtccgcaccggtcagcgttaccgtagcgacatcctgccattcatcgttcgcggaagcacgccagtagcctttcagagtatcggttgaggtgcgctccagcttgagctgcacttggtcgccgaagccggtaccaacatgcgatgtttccttatcgatgtagccatcggcattggaatcgtactgcatgtaaacgccgcttgggctggcaagtaacgtggcatatcccttgccgccgttagcgccagtaagaccgttacggaccaccagaccggcgcgcggatcgccattaccgcccaagtcgagcggcttgaccgtggtttccagcgtttcgttcacgtccagagcatcaggctggtacaccgcactgccctcgttgcgatccgtccagacgccacgattggcgttgtccgtaatcgtgaagtcataagcaccgccggacgcagaaacctggcacgcgctgccgcccttccaatgagcttccttccaacttccggaaatcgggttggagcaggaaacatcgatggttctacggaatgtacggcccggattgaagttactgctctcggcaagagtgcccgtaatggtgtaggttcccggcacattgaatgcgtaggtgttaccagcagccttggtcgacttgctgactgccgtaccgccttccacattccatgtcaccttggtagcaatggtatcgtcgccttccttgacgttgacggtgtccggcagagtaacggttccgcccgtgttcacggtcttcgggagatcatcgccggtttccacagtccagttgaccagcttgcccttggcgctaccatggttgccccaatagctcagatcccaaccgtcgggctcgccttcttgagcaggattgtgcatttcgatggtgccgttctcaccgatggtcagcggcagccaaacataggtggaatcggctttaccggaatcccaacggtcaccaaggtagatgaagtgacctttctcctggtctactgcgagcacactagccgactgcgaaccgaatgtggtgccgcgggtatcgcccacggacaacagaccatccgcgccttccggcatgttgttgtaccacgtgttctcgttgacatcgtccttttccacgccacgggtccagcttcccagcatggagtcggcggtgtagtaggtctgcttgttcggggcccagccggttgcaccagatgcgatgatgttgtaacgcccgtcatattggaatacggcaggagcttccagcgaaccattttgtttgacgatttggaaatcttcgccacgcaccggggcatccgtagtagcgtctgcaagaatgtatgggtactgcccgtcagcagagtactgcttttgtccctcggactggtccacattcgtggtcttgactacattggtgtaatcatcgttgagcttggcgatgtacagcgtggcattggcttcggaagaatacagtacataggcactgtcgtccttcgggtccacgaacacagtcatatcgcggctgtcaccgttctcaccccagctggggttacctgcggcttctttccaattgttctggttaggcaaacgataggcacccaccatagtgaacgggcccgccggattgtcggaaacagccacgcccgcaagtgcacgtgcatagttggaaccgcccggcgtggtgcttccatcggaatgccaccacagcacgtattgcttgttcttcttgttgtagatgatcttcggacgctcgaaaatgccctgtacggaatcaaccgcgccatcaccatcctgatcggggttggtgttgaggtacgggaagattgcgtcggccttggcagcgtccacactgccgtcggacttggtcaggttgtaggccttgtcgaagtaggcgtaatcggcattgctcttatccgtcaactgagatttgctggtcaccgcacgcagcgccacaccaagatcggtccagttgtatagatctgtcgacatataagcatgaacaccggggctgttgtcgtaaccgttagaacggtcttcgccataccagtagtaggcgtcgccaaccttgaccacttggccaccgtgcgcttggatgtgtgtgccgccattatcattggcgttcttggcataccaatatggctggaagtaatcgctagcgttcttgcccggatcggctgtgggctggaacttggtgtatgtcggcacttggccgatggtaggcaggtaatccacacctgccgcactggcacttgcagcggccagcccgcatgacaatagcgttgccgcggcggtaattgccgcgataagagcgcccttgcccttattgtttatcttcattgatttggttccttgattgatgataacggttttttgaacaaacagttatgtcgctatccgcgaagccagaaaaggttcgacaaatcaatataccgatactgaaaactcagtattcaacttgtcggaccaattatggtcaaagagcggaggaaccggccggcaatagtcaatattgccggcttgttccttcacccattactgcgcgagggtgctatgcacgcttgcgcagcatgaacagtgcacccgcggcagcggccagcagagcgacagcgccagcgatggcggcaacactggaaccggtgttggccaccgtgttcttgttgccgttgccggtggcaccgggcttgttggtgttgccgggcttctgttcttcagggccaggggcgactgcgttggccttgaccgtgacgttgaaggtcgcggtcacaccacggtaggagacggtaatcgccttcttgcctgcggtggtggagtcgaacgagccaatcgcaagctgcgggtcgtcaagagcgaccggcacttccttggtcttgtcgccactctggtagacggcagtcaccttcagaccggcggtatcgagcttgtcgccgatggcgtactcggtcttcgtgggtccgatcaccttgagcgaagccaaagtgaaggcgttgaaggtcaccgtgtaggtcttcgtctcagactcgtcggctgaggtcaccgtaatggcggccttgccgccaagcttgccgttctcaaccgcgtcgccagtcaccttgacggcggcggcattgtcggtggcgaaggcctgcagcaccgggtttgcctcggcgtcgaccggcagatcaaccgtgtagtcggtcttggccgggtcgaagccttcaacggtttcgccgtcaagacgcaggtcgcccagcgtggcatcggatgctggctgcggggtgagtaccgtgctgtcttgtgcgaacacctggatctcagccacgttgatgtacaccttggtgtcctgcaatgtgttagtcaggcggatggccttggcctttaccggggtgccgagcacgaagtcaacggtcggggtgtcggcggcggtgatgccgtcggagccagagccggcatcgccggcctgtatcttccagccatccttggtaccgactccatgccattcgccagcctcatcctggtattccagcgtctggctcttcggccaagacgcacgaccatcgtagtagaagaaggtcttcacttcggtgatggtctgagcttcgtcgaaggtgaacgtggcgaccgggtccaccgtcgaggcggtggaagcccaagtggaccaaccctttgacgtagtgtcaccatcgatggccttggaagcggaggcaccctcctggaagttcaccgagaagttcgtgccagaggccgcggcgatgttcttcgcagcaccctgaaccggcgtcacgaatgcctgaatttcggtggcgttcatgtagtcgttgttcacggtgttcacaatgcgcaccttcgtggcattcactgtgcccttatcggccttgaacgtcaccgtctggcctgcggcaggcttaacatcgctaccgaattgcatccacgtctcgccatcagtggtgtactcggccttggcggaagccggagccttgtcaccatacgtaatggtcacgctgctaagctcacactcagagccgaagtcaatcgtggcggtcgggctggcggaatagtcaccagcagagttccacgtcacccaggcttcagctgacgtgtcaccatcggtgagcttcttccactgatcgcccttgctgtattccgtctgctggttggtcacggtcaggctggaagcagtgtcggccacattctcaggcgtggcggcggtgacatagatcgcgcccttcagcgcaatcgtggtcgcgtcgtccagctggtaagtaccggtcacggcaatgttgtcgccagccttggcatcggcgagcttggtatcaagcccatcgaagttccacgtaaccttagccgcatcgccctcgaatgcaggcgatgccttgacgtgcagatacaccggcgcagcctcaagcgcggccttcgcctcgctcgcactggtgccggccagcactgtagccgataccggatcggaaacggtgagcgcgccaacgtagaccgtagcggcgacattgaactcgttgccgtacacatcggtggcggtagcggtggcttcgtaggtgccttccttggccacatcgaccttggaagtatcccagttggcaaccgtggccttgccttcgccccaggtgtagtagagcgtgacttcggtcggcagcgcggccttctcgttaacggcggtctgcacgttcacggtcttctggctggtcggcgttacattgcgtagagtccatgtctggttggcggacggcgaagtgccgctcggtgactgccacaagccaaccttcgtgccgactgtggtaccagagttatccacatcgaggttcgtcttagtcgcggcattgagcagctggtaggtcgaaccatcggaagtgttgagaatccacttggcagccgggtcggacttagcggcctcaaccgtttcgttggaaagcgcgttcgtgccatccttggacaccagcaccttgccttcggcgttagtaatcacataagccttgagatcagggcgctcggagtcggcgggctgctcgatctgggtaaaggtccaagtctgcttcttggcgttctcggcatcggaagcgacgttggccagggacagcgcggaatcaccagaagtggtatcagccacggccttgccggactgcttaccaacgagctggtaagtgtcgccggtctcgacggcagcatccttagcgtagccggtcacgccagtgagctggatggaggcgatagaacgggcgggcacagtgaccgtagcggtcttggcagccctgtcaatcatcacagagccttcagcttgcttgacgttgctggtcttggcgaagacttccggagtggcggaatcgacacccgcgttcttgtcttcggcagaggtttcggtggtcaggtagagctcaccgtaagcgttgtcggcaatctcgccgtacttcgacaggtcgatgacgaaggtctggtcagaggtgccggagttgcggtggatgacggtctgcgtcttgccatcgccggaggtggcagtcatgttgttgtcttcatcgttgttggcgatgaccttgtcgcccgcgtggatgaagtgggtgatggccttgacgccgttgtacttggcgtttgcaataaccgtgcacggttcaagtccatcggtggtaccgccgttgttgttcacgcggcgctcggagtagagcttgccgtccatgccagccacggtgcagtcgaagtcgatgagcacggtgccccagttggtgttctcaccggccggattcacattcgagcccatctgcatgttgtagaggtcctcgaccacctgccagaaggtgaagtccttggactgcaggcgggtgacattggagctgatcttgctcatcatgcccagcgcgttgtcgaaaccgtacgggttgtaggagccagactgccaggagccgtccacctcgctcatcgacagcttcttgccgtctgcctgagcgatatcgcgcgactgcatctggttgctgtcggagtaggcgtgaacgttgtactggccgataaggtccttgatcgcctgcgggtactggttgtacgacttgacgaagtcggcggagttcgtggcatcggtggctgcgatgatggtgtcatcattgtccttgagcgcctcagcgagtgcggtaatcgtctgctgctgctgggcgttgctgacatgcatgccctcctgcggcttcttcagcgcgttggagtatggggtgacggacttatctttgtcggagtagtacttatcccagtagttgttaatgagcttggtgttgtcatcgctctcatcggtgtacttcgaagccatgtcgcccggagtgccccagtaactggtctcggactcgttgaacggctcgaccgtgtcaacgtttgcgccaaggctttcgaggtgctcgacgttcttggccatgtactgagcgaatttctcagggtttgcaagattattgctaccggagttgcgtccaccagtggcgtaaccgctgttggtcaggaaccacggagcggagttggcgaaggcctctacgtcggtgatgtcagggttatcgccggtggcaccgcgctcaatccaccagtcttgggcggcggacttggagaagtcatactggttgtcgtcagtcgggtcgaatgccgcagccatcttgtctttgtcggcctgcttggtggttacgccattgccatacgtgccggagccggtggcgtcatctttccacgtgccaggcacggcagcgccttggcgcatgaatgggtagccgtaggcaacatcggaggcattgccgccgcccacgttgtagcgggccatgttcaggtccagtccttcatcaccgaagatggactggtagaactgttcgcgcagctgtttgccgtattccacagccttagccttggaagcgtcatcgccgagattggtggtgatggccgattcctcgccgaggctgccggtggcgttggcgaaccaagccagcgaggtgccccagccatcgaaactgttggcataccacgggttcggggtcacggtaatggcatcgttatcagccgcatacgcagtgccggcaaccgcaaacgcccctcctcccactagtgttgccgccgcaaccattgcagcaagcgatttgctcagtaccttcattggtctccttagtgttcctgctatccgccttataccggaaaaatcggcctttgcttcactgcgccggcctctttgcctgatacatgacctacgtcgactccttctttcggcgcagccaaaatgtttacgcaaacattttgatatgagcgattttatcacaaaaccgtcacccagcaaacaacttcagagaccacaaacgacgcacaaagtcatgagccattcgaattgcgctggcccaatcgctacgaatcatatttgccgtagcccttaagtgaatcccactgcatcgagatatcgcgcccgctatcccttccgataacgccgaccacgcgtgttgccttcagcaatcagctttccttgcgcaactaaaccgtttaggaatttgcggactgttctgttatcgagctctgttatcttggcgagttcaggtacagtcacatagtcaacctctgtcaagcgtcgattcatcgccgacagcatcgctgcccgcgaatcaatttcacccgatgcggttgcatctgctttcttaccatccacacgttccccgccaatgagcctcgcaccctcttcggcatctttctcaactacagatctcacgctagcaaaaccagaaccatccacggtcttcagcgcaggaacaataggaatcgtcgcctcgaatatgtcaccatcgcggaactcaggctctcgctcagtatattgccgggacgctcttatcagattccgcagtccgctacccagctgctcggctatgccggtctgcacaaacacattagcgataatcggattctttggcattggcgtgaactcgcccagcttcattcgaccttcaaagaatgagcgcgaagcattaaccgtccggatggattcattatcaatggtgacacgcgccaccaccggactgaaatactcccgatgcatgaggctgtttgccaccaattcacgggcgatcatcgtacgcgggctcactcgcttatcgccctttaacacaaagcggtcaggcagattccgctcagtaaattcacggagttgctcgtacgaatcgaacaagttggtccgcaccataagtcggtcatcgtatcggtcaatattgtctcgccgaaccacggcatcagtaatatacgctgggcaaaccgaggaaatgacttcatccttgcccaagagcagcactgcagcaagattaaagccctcttcgccggtcgtgtaatcacgatcgtatagcttggcgctgcggaacagttcttcgtcagacatagttccccaagggtgcccagctcgctgagcgaccgccagctgccgcattcgcgcaatcagctcaggacgcaaatcaaacggagtcacgtaacggaaaattcgccgttcggaatagtagttctgcttgcgaatatacatttgactaatctggatatcgctttcgatgtgtgtatccacatcagcaatgcgatcaaacactgcgcccttgaaccgcacaaccgaagaactcggagctacccaaatacgaacaataatccgttcgtcgtactcgatatgttccgtttccaccattggagccggttcgaacatcttacgattagacactacgttgacaacgttgcgctctatctcactaacgcgcttagaatcgacgccgagcacttgaccgtcatcgtcaacgccaagataaatgctgccaccagaacgattggcgaatgagcatacagtctcaaaagtatccgtatgaggcaattcgctgcagcgcttgaactcgaccatagatgattcaccggcctgcagcacttgcataagttcatcctgcgtcatcgcattccgcccttcatagcgataattcatacattaggacatggcacttatcgtattttagcatctaattagtacattaggacattgttttatgtcctaatgtactaattaggcggctaattgtactaataattgcacactgatgtactaatccgatgatcgaatgcactaattgtccgcgcaaatgcactaatcggatgaccgaatgtatcaatgagacctataggcagccgattggctgacgatcagcccagtcattggctatcggccgctaaccagtcagccgccaacagccaacagccacccaactaatagccgccagccaatcagcccgtccaatcactccttgtgttccagtgcggccttcaaatcgcggctacggtagcgttcgcgcagtatagagaatccaccgaagcccacaagccacaccaggccggcaatcgcggaattgcgcgtatcgtccgcaaggaacaacgtcaggtagatgaacacgaagaacacgattgccaccgtattgagcaccttccacgcgggcatgacgaacccgtccgcgatgaaatcggcggaacggcgatacctgcgatgcgccagcagcgtcaggatgtagatgaacaggaacaccgcggaactggcggacgagaacagcacgaacgcccccgagatgccggggatggcgttgacgatcggcgacagcagtatcagcgccgcggacaccaggatggcgcgggccggcaccttgcggtcggacaccttgccgagcttgttcagcatcgggttcggcgacacctcggacagctgatacaggtggcggccggcggaatacaacagcgaattgagcgacgaggacgcggcggtgatcaccacgaagaacaccagggcggacgcccagttcaaaccggcatactggaacaccatgatgaacggggaggcgaaggagccgtcctcgttcggcttgaacgaggtccacggcacgatgcacatgatggccacgagcgcgcccacgtagaagatgagcacgcgcacgatgatctcgttgacggctttgggcagcacctcacgaggattcttggtctcggagacggtgacgcccacgaactcgagcagctcataggcgaagaacaccatctggaagctcatgaggaaggccatccagccgttcggggcgaacgagaagccggagaacaggttgtcgagtccggcgtggcccgccgggctcacatgatccacgccatgaatccgcgcggccgggtaatggtagccgatcacgatcatgaccacggcggtgacgatcatcgcgccgatcagcgtgatcttgatcatcgagaaccagaattccacctcgccgaacaccttgacggcgatcaggttgacggacaccagcgacaccaggaaacacagttcgatcagccatttccaatgggtcaggtcgatgccgaacgtgtcgaagaaggtgatgaagtacgtggagacggccgtgatctcggtcatgcccaacagcacgagcgcggcccaatacgtccagccggcgaaatgcccccatccgttgcccaggtagcgggtgatgaaattgatgaaggtgtgctggctggggtcgcggtacatcatctcgccgatggcgcgcatcaggaagaacatgatgacgccgaccaggatatacacgaagacgatcgaggg

SEQ ID NO: 3807 - DNA, 11528 bp, Unknown
  R35_2m  MAG No. k141_4727
ctcaacgacaagctcgccaagcagaccgtcgaaggcgtgcttaagggcgaaggcactccggatgaagtcgtcaagaagcacgactacaagatcgtcgaagacaacggtgccatcgaggcggccgtcgacgcggcgttcgaatccaacccggatgtcgtcgagaagctcaagagcggcaacatgaagccgatgggcgtgatcatcggtgccgtgatgaaggccacgcgcggtcaggccgacgccaaggccgtcaccaaggtcgtcatgggcaagatcaagggctgattagattcactggctcccgctggcgggagctgtcgaacggagtgagactgagggtggtcgccatgtacggatgaccaccctcagtccgcttcgcggacagctcccgccagcgggagcacttatttgtagggaaatcctccagttcaaattcgttggacagctcccgccagcgggagcctttattgattctgtaagaaagtcgccgcagagcatttccagcgttcacccagtcgagtaagatatgttcggcactggaccgtgagccgaaacaagccgaaccgggggatgtataccgatgaccgcaaccaacgagacgctgagcatggctaccgaagcgcaactgaagcgcgatctgccgcagagcatcgtcattccgccaatccgtggcgaaatggtgcacctgcgccccgccaccgtcgaggacctggctcgtttggatgaacttgatgccttctatggcgcatccaagatcaccggcaaggatgcggtcaccgaacgcgccatcgtacacacatgggtccgccgctcccaagcctgggaagccggtcaggcacccgccgaatccggcgtgggcgacccggaatcccgccgcaccatcgcatgggccgtattgactgacgccgaccatgacgatgacggtcagctcgatgcggccagcaccgataatgtcatcggcatgattttcctcatcgacatcgacggctggtccaagtccgcccgcatccagatcatcttgggccgtgagtaccgtggccgcggctactcccgtgacgccatgccgcgtgtgatgacttacggctttgcgcccgaaccggccggcctgggcatgcaccgcatctgggtgagcgtgccggaaaagaacagccgttcgatttcggtctaccagtcgctcggcttcgtgccgtccggcacctcgcgcgacgcgttgtgggatgtcgaaaacaacaaataccaggaccttatcgtcatggacacgttggtcgacgagtacgatccgattcgttcgcttgacgcttttggtatgcacttgattgaggacaacccgggtgtcaaggaagcgctgtccgcgcgtgagcattccatcgccatccagcagaacaagccggaacccgagccggcacagcgtggtgaggcagccgccgtcacgacgagtgacgtgcagtcccaggcccagacgccggcggccgcacagccagtcgagccacaggccgggcaccacgatgatacgcagaagaacacgcgccacagtctcgaagaggaaagcaactggccgtacggccaggcggaacgcaagccctcaaaggaagcatggtggcgtacgctgggccgcggccgcaaacgcgatacggaaagtgagtgagtaaacaagcatgagtgccgaggatctcgacaattacgaaaccgacgccgaactcgcgctgtatagggaatatcgtgacgtcatcaagctgttcacctatgtggtggagactgagcgtcgcttctacttggcgaataaggtcgatttcaacgtgcgttccgctggccaggacgtgtatttcgatgtgcagctgactgacgcatgggtatgggatgtctaccgttccagccgtttcgtcaagtccgtgcgcatcgtgaccttcaaggacgtgaacgtcgaagaagtccagaaaaccgatatcgacattcccgacgatattcactgacaggcaatcgtctgatacagcctgtattgacaatgcgcggcattccgtcatcttacggcggggcgtcgcgcattgttcatacaacgcatagcaaaagttcagattcgtaaccttgccatcgtgtgtcttgtttgcttgcggttgatagaagatgatgctgtttgcacttgcaggaatctcgctgaatctatggaaggttcgtcgctgacgaattagcccaagaccaaaccgattcgccgcgctgtgcgtgacgcagcgttgccgaatacccctacctcacgattggatgcgtcgcctttctgctgatggaagacggcgcatcggtcgtatatcgggagaattctgtaagcattcgctcatctttcggtgtgcgattccggggcttctagtaaactgtctctgattttgcgtttataaggagcataatgaccgacaagcaatccgtagtgattatcggcggcggtccggctggacttaccgccgcatgggaactcgtcaaggatggcggcgcggaaaactatgacgtgaccgtgctggaggggacccgcgaattcggcggtatctcgcgcaccgtgaagcacaacggcaaccgcatggatatcggcggccaccgtttcttctccaaagacgaacgcatcatggattggtggaagaccgttctgccgttgcagggcgcaccctcctatgatgacaagaagctcggccgcgaccacgacatggagccgggcggccccgatccggagacggaggacaaggtgatgctcaagcgccaccgcgtgtcccgtatcttctggaaccgccacttcttcgattacccgatttcgctgagccccaacacgttgaaggccatgggcttcaagctcaccatggtggccggcttcagctacctgaagtccatgttccacaagctgccggaagacaacctggagaacttctacatcaatcgtttcggccgcaagctgtattcgatgttcttcgagggctacacggagaagctgtggggccgccacccctcccagatctccgccgactggggcgcccagcgcgtcaagggcctgtccatcatgggcgtgctcaagaacgccttccagaagcttagccccaggaagcgctccaacgcggaggtcgagacctcgctgatcgaggagttctggtatccgaagtacggtcccggccagctgtgggagaccgtcgagtccaattgcgaggccgccggcgtcaaggtgctgaccgacgccagggtggtcgaggtccgccagaccgatggcgccgtgtcttccgtggtgtacgaggattccgagggcaaccgcaccgagctttccggcgaccagttcatctcctcgatgccggtcaaggacctggtcaacgccatcgacgcggccggcgacgatcccgaggccgctgattccaagcccgccccggccgatatgaccgaggtggccaacggcctgccgtaccgcgacttcgtgaccgtgggcctgctggtcaagcacctgaagctcaagaacaccaccaacatccccaccctcggcaatccgccgatcgtgccggactgctggatctacgtgcaggacccgggctacaaggtcggccgtctgcagatcttcaacaactggagcccgtacctggtcaagaacgtggacgacaccgtgtgggtcggcctcgagtacttctgcgaggagggcgactcgttctggaacatgagcgaggaggacgtcaccaagttcgcgatctccgagctcacccgcatgcgtgtgatcaacggcccggacgaggtcatcgactcccatcgtgagcgcgtcaagaaggcgtaccccgcctacttcgacacctacgagcacatggacgagctcatcgagtacctcgacggcttcggcaacctctactgcgtgggccgcaacggccagcaccgctacaacaacatggaccactccatggccaccgccatggaggccgtcggcaacatcaagaccggcaagacgtccaagaagaacgtgtggtccgtcaacaccgaaaagtcctaccacgaagaaaagtgaataaaccttgttgagctccctcgtcacagagggagcttttttggttttcggcgggccgttttgcgttggtcgagttggcgttgtacagtgaacgaagttcgcgaagactcagagacgcagcgaacattcatgagcggtgcaaccgcaataatcactcttaacgcctggataggcatgggtctgttcggtatggaaagggcaaccagtggcaaatagccagaatcttgaggatatgaagctgcctgagctcaaagagctcgctaaacagatgggcctgcgcggcacgtcgaccatgcgcaagcccgagctgctcgccaccctgcaggcggcgcgcaatggtggagagccgccggccggtgtgaccgtgcgcgctcccaaggccgccaaaaccgccaagctcgtcaaggctccgcagtccgatgccgctgaggccaataccacagacaatgctgacgtggccacccagtcgccggctccggctccggccgccacggaaccgcagctcgatttgccgcttcccgtggccgacgatgccaagaaggacgagaccgaaccgcgacgcacccgtcgtaaggccgccgatgatgccgcatccgaaccgcgtgcggcccgccatcgtcgcgatgacgaccagtccgatttcgctcgccgcaagccgcgcaagaaggccgatgaggccggcgatctgctggccacgctcgatttgggagatgcagcgcctaccgagcgtcgccgcgagcgccatgaggacgtggaagttccgctgattcgccgagtccgtgatgatgaggacgagcagcctcgccgccgtcgtcgcactgcggaaaacagcgaagaaaccgtgcgtgacctcgacgatatcctggccacgctgcccacgcagaagcacgaggaaacgtccgaagacggcgagcagaacgacgatcacgagtttgtgcgtcgtaaccgccgcgaccgtagcgatcgcaacgatcgcgataaccgtaatgatcgcaacgatcgccgtaaccgccgcatgcgtggccgtgatcgcgacaacgccgatgatgatcgtcgctatgatgatcgcgataatcgtagcgatcgcaatgaccgtgatagccgccgcgaagagccgcaggaggatctggtgccggtggccggcatcgtcgacgtgctcgactcctacgcttttgtgcgcacttccggctacctgcccggcccgaacgacgtgtacgtttccatgggccaggtcaagaagtacggcctgcgcaagggcgatgccgtccatggttcgattcgcgccccgcgcgaaggcgatcgtcgcaaccaacgccagaagttcgtgccactgcaggccatcgattccatcaacggccaaagcgttgaagaagcgctcaaccgtccgcagttctccaagctcacgccgctgtacccgcaggagcgtttgaagcaggaaaccgccccgaacaagctcaccggccgtatcatggacatcgtttccccgatcggcaagggccagcgtggtctgattgtctccccgccgaaggccggtaagaccatcaccctgcagaacatcgccaactccatcgccgccaacaaccccgaggtccaccttatggtggtgctcgtggacgagcgccccgaagaggtcaccgatatggagcgcacggtccagggcgaggtcatctcctccaccttcgaccgtccggcctccgatcacaccacggttgccgaactggccatcgaacgcgccaagcgtcttgtggagctcggccaggacgtggtcgtactgctcgattccatgacccgactggctcgcgcttacaacatcgccgcccccgcctccggccgcatcctgtccggtggtgtggacgcgcaggccctctacccgccgaagaagttcttcggcgcggcccgcaacatcgaaaacggcggctccctgaccatcatctcctctgcgctggtggaaaccggctccaagatggacgaggtgattttcgaggagttcaagggcaccggcaacatggaactgcgcctgtcccgcgagctggcggacaagcgactgttcccggccatcgacatcaacgcttccggcacccgccgcgaggagctcatcaccaatccgcaggaactgccggtcatctaccgtctgcgtcgactgctgggcggcatggagcccgagcaggcctaccagacgttggtgccgcgcctcaagaagaccgccaccaaccgcgacttcctcgccgccatcgtgcagcaggccaacaccggcaacgcggtcaacggcaactgaccagaccgctgaacaatagtgtaagggctgcaccccgattgatacggggcgcagcccttgccgtatatgatgcaaatacatcaactatcacattgcagttgtagtattgccgtcaacgttcacatgcacgctgacgatatatgagatgaaagatgtatcaatgggttcgattgttttgggagtgggcaatggtgcggccatgttcggcgatgcggatgccagccatatcccctacggcgactatgacatctgagatatctgactttgcgcatcgtgcaaagccgcaatcgggagtatcctcgaatctatgagcgaaacgagcagcggctggcaaaggaccaccatcgactccgcccaggcggcggcccacccggaaaccgcacaagcggtggcgcgcatcaaagcgctgcgccaaaccatcgataacatcgattcggcggccatcgcattactggccgagcggttcaaggccacctcgcaggtcggcgtgctcaaagccaacgccggattcgcgcccgaagacaccaagcgtgaggactatcagatcgaacgcctccaccgcatcgccatcgatgccgggcttgatccggaaattgccgaaatgtaccgtgaattcgtggttaccgaagccaagaagcgccaccagcgcatcgccgatgccggtggcgacccgggcgtactcgacgtattcgcctgattcgcccgcagcgaatgggcacctttcggatattcgtctatagggcaagttgccggcagcgactacattaatacgggaatggaatgcccatagtggccgactgtatgaatgggatacgtagatgagatgtggtgccgcactggtcagttgcgcattgtgcgtggcttcgattctcggcggtgcttggatgtctcgtccgactccggttgattacggtccggtgctcgctacggcaagtgatatgtacgccgtcgccgatgccgaaggggagccggtccgttggtatgtggtagggaagggcggcgccggcaatggcgccagtgccgattccggcaatagcggttccactgataccgattccgccaatagtaattccggcacgtccaaggtttctcgtatccccgcttccgccgccaccctgccatggaaagtcagcgtcacctactcgcttgacggtccaaacgtcgaggcaaacgaggttgccggcgcatctggactgatcggcgtgtatatcgatattaagccgcaaaccaaggaggccaaccgtacgatcccggttgtcgcctttaccgtgcctacgcaggtagccgatgatgtttccgctgacaactccattacggtaaccacgcaaggttccaataccgtagtcgccgcagctggaaaagccgcaaccggcttggaattcagctgctatatgaacgccaaagacttctccatgagttccgtggcgctcgccgtattgccttccaattccagcagtccggtagttggtgctaatcccgatgccgcgaatgccgccgcacagcctgctgccgatacggatgtcgcccaactcgtcgcctctgccgccatactggtcgatgcactgaccgacgccggttccggggagcatcaacagctcatcgagcagcttcaaaccctgcgcgataatgagcgtgcgctggacaagtccgtagtggccgaacgcgaaaccgcccataagcggacgtttgaagactatatggccgcgtatgtgggctcatataccacgcacctgtctggatcgattggtacctccacccagttgccggcgttgatgggcacggccggcgaactgtccggggatacgcctttggcacaagccgtactcgacttggccaacgcggtgaacaacgtcagtgccgcacatcagcatgccggtgcggtcgatgcgttggatgaggtgattcgccgcatccagcagcaaggcaccaccggactggtggatgatctgaccgccgaggcttcggaggaagccactcgaggctccaagcaatacgccgatggccagagccagctctccgccgcaatgattccgtattcgatgaaatacacggacgtctacacggccaatttgagcgccctgactggcggcacgtcttcgggcgccaccgcttacgagagccaagccatcgccgaaaccaacggtagcgatgaactcgccgacgctcaatccaaggtcgatgccgcgatgagcacgcttgccaccgcctccgagcatacgggcaaagccacggccttgcgccagattgtattgcgattctccgatcagttcgaaggagtcgcgtcctcggcttccggcagcgatggcgatggctcgtccggtgatgtctcttccggtccggtgaccgaggctcaggcactgactggcctggtcgattcgcaatcgcaatcgttctacggcaagacccgggccgcccaagccaagcgtaaggccgatgccgcccgtaagcaggccaaagccgcgcaacagcagcagtcgcagcattccaaggcctcactggtcgatgacaccatgtccatgtctgctggcgatgtgatgaactatgcgggtggtcttacttcggccatcggtggtggaggtaagttcgattcgtccaagagcgatggttcgggaacgaacgactcagccaagtcgagcgatactggcgattccggcaacaatcttgacaccgctccagtactgtttggctttggcactggcggcacgctgctcaagcatgacatgagcgcgctgatcaatgagaccgtggagatcagcgatgctggcacgctcttggcgcaggccgtcgcgcagctcgatagccccaatacgcaacaaaaaaccaccgaaacccgatacctcatcgtgattccgacggtgtgatggtgtatgcgggaaaatccgcatgcgacaggtgcccaatacgcgtaaagtgcgttatcggtgtgggacgccgcatcaaaaactggctttttcgatgcggcgtcccacaccctcttgtaagtcagagctaactatagtttgaagaatggctaaattccaaggatctgttgattcggtctgtgggacgccgcgtatataaaacgtttgacacgcgtggtggcccacgctattgtgggccaccagcttacaatgcgggatatttgcgtgccgtcccacagtcgtgtcatccgaacgtcaaaaaacaaaagaggggaacctcaataggaggttcccctcttttgttgttgtgcgcaacgctcagtgctttggcttcttggctggccgagccgttaagcgggaagcccggtgggcttcccgtaggctcggaacgagcggcattgccgtgagacctactgttgttgtgcgcaacgctcagtgctttggcttcttggctggcggctcaccgagctcgctggcttcgacggcgacctcggtttcgggcgcgtcttcggcggcggattcctcggcgtgcttggccaccaagtcgaacttgccgaccacgcgaccggcctgcgcgatatcgcccaaggcggcgtgaatcgcgttcacaccttccgaagcagcggacagtgccacagacaggattggggtcttcatggagaccttggcctcggacttgatcttacgcagctgctccacggccttgccggcccaagtcagcagctcgggggaagcaccggtggcggcctcgacatacgggtccacgaccggccaggcggcgcgatgcacggaaccggaaccggcgtgcatccagctccacacttcctcggtggcgtacggcaggtacggggccagcagacgtgcgaaggcgtccaagcccagacccagagcggtgcgggcggacttcacagccttctcggacggcacattgccgtgctcgtccggagtgccataggcgcggttcttgaccagctcgatgtagtcgtcgcagaactgccagaagtaggattcgatggtctccagcgccttggaatgctcgtaggattccagcgcctcggtggcctgacgcaccaccaaagccagcttggccatagcggcgcgatccagcggttcggtcacatcggccgggttccacgaggtctcggcggcagcgcccacgtgatggttctcgtcctcacgaccgatggccagcgcgaacttggtggcgttcagcagcttgatggccagtcgacggccaatcttcatctggccgatgtcgtacgtggcatcgaggcccaggcgagcggcggcggcccagtaacgcacggcgtccgcgccgaacttctcgatcggctcgttcggcaccacgacgttgcccttggacttcgacatcttcttgtggtcggggtccagaatccagccggacagcgtggcatgggcccacggcagacacttgttctccaagtgcgcgcggtccacagtcgagaacagccaggtgcggatgatgtcctgaccctgcgggcgaaggtccatcgggaaggtggaagcgaacagggccttggaggcctcatccggctcagcccagtgggtcacgatctgcggggtcaccgaagaggtggcccaggtatccatgatgtccttttcggcggtgaagccgccgggcacatcacgctgggactcgtcgtagccttccggcacgtcgatggtcgggtcgatcggcagacgatcctcgctcggggtgatcgggcgatcgtaatccggctcgccggaagcgttcaccgggtaccacagcgggaacggtacaccgaagaagcgctggcgggaaatcagccagtcgccgttcaggccgtgcacccagttctcgtagcgcacgcgcatgaagtcggggtggaactcgagttccttgccgcgctcgataagctcggcgttcagcttggcgtcggtaccgccgttcttcaaataccactggcgggaggtgacgatctcgagcggcttgtcgcccttctcgtagaagttcgtcatacgcttggtcggggtcggctcgccgtccagatcgccggactcgcgcagcttgtcgacgatgatcttgcgggcggagaacgtggtcttgccagcggtttcggcaaagacctcacggccggccgggtcggtgatccaatccggggtgtccatcacgatacggccgttgcgctgaatgatcgggcgggtgggcagcttcagatcgcgccaccactcaacgtcggtcacatcaccgaacgtacagcacatggcgatgccggcacccttgtccatttcggcggccgggtgagccagaatcggcaccttgaccttgaacagcggggagtagacttcctggccgaagtac

SEQ ID NO: 3808 - DNA, 21166 bp, Unknown
  R35_2m  MAG No. k141_4937
catttctgagacgatacggcggcatagaataacgaacgttgcgcatcacggcaagccccgcgtgcgccaaacccaagaaatgtgagagaagagcacaatgagtactactgatgcgcctaagaagccgcgcgaaaccgacgacgtgccggtgccggccacgctgcgcaagtcattgaaaaaccgccacatccagctgattgcgctgggcggcgccatcggaaccggcctgttctatggttccagtgaatccatcgcgctggccggaccctcgattctgctcgcctacttggttggcggcctcgcgattttcgcgattgtgcgtgcactgtctgaaatgtccgttgaggatccgaaggcgggcgcgttcagctactatgccacccgctactggtccaagcgcgccggctttatttccggctggaactactggttcaactacatcctcgtctcgatggtggagctatcagtggtgggttcgtttgtgaactactggttcccggcgattccgacatgggtgtcggcggccgtgttcttggtgatcatctgcgccgccaacctgctgggcgtctctaaattcggtgagttcgagttctggttcgccatcatcaagattgtggccgtgatcgccatgattatcggcggcctggccgtcatcatctttgtcctgcccaccgcatccggcgtgcgcgcaagcttcgcgaactggttcaccgtgggtaacggcttcttcccgaacggcctgatggggcagaattccgacggttcctggaccggcctgctgatggcactggttgtggtgatgttcagcttcggcggcaccgagctcatcggcatcaccgccggcgaaaccgaggatccgaagaccacgattccgcgcgccaccaatgatattatttggcgaatcctcgtgttctacatcggcgctctgggtgtgatcatggccgtagtgccgtggaacaccatcgatggcaagtccagcccattcgtgcagatcttcgattccgtgggcattcacgcggctgccggtattttgaacttcgtgtgcctgaccgctgtgatgagcgtctacaactccggcctgtacgccaactcccgcatgttgtactcgctggccaagcagggcaatgcgcccgcttacttgggcaagctcaactcgcgcggcgtgccagtggccggcgtgctgacgtccgccgcgatcaccgccatcgccgtggtcgtggtgttcgtgtggcctgagttcgcgttcaactacctgatgtcgattgccaccattgccggcatcatcaactggacgatgatcatgctcaccgaaatgaagttccgtaaggtggtcgccgcgggcggcgctcccgaggattccgagctggccggtctgagcggccaggaggcactggacgcgattcacttcaaactgccgtttgccaaggtgaccccgtgggtggtgctggcgttcctggcgctggtcgtggtgctgatgtgcttctccaccagctaccgcatcgccgtcatcgccggcgtgatctggctggccatcctcttcgccgcctaccagctcactcaggcgaagaagtaaggctccatttgcgaatagctctcactgatgggcactcagtgagagctattcgcaaatgggatttattcatgaaacagctcatcgatgccgacgagctgaacgtcggattgagacgccgcagcatcgtcgaccagtgattgatcgaaaccgccgagcgaaaacagcaggtatgttcgctggccgataccggttcgcgcagcacggtctcgcagtagattcagcacggaacggtccaccggcgcattgcggaatttgcactcgcccacaatggcagcatcagacgcattgtcaacggccatcacgtctatctcatcctgacgatcccaccaacggccaaccgcacgcgcacggaagggcaaccgtccagcagcactctcacgccacatccattcacggcacagaccctcgaacggtttgccggcaaaatcatgtaataccggcttgatatgacgctcgtatacgccttccacatcgccccgctccaattccgaacgatacggaaagacaaacgaataccagaatcggaagaaattgtcgctcagctgatacagcccacgcgaacctttcgcccgctccttaggcttcgccgtgactgggaactcacgttccacaatccccagttccataagattggcgagatacgacgatactgttgcgtttgccatcatcgtgtgtgtcgcgatctcattcagcgaagttgcgccgagcgcgatcgcccgtatcacgctgttatatttcgcagtttcccgcagttcttcgtgcaacaaaaattcaacctcgctgtatagcggagcaatgcgtctcagaatatgccgcttgacatttgcgtctatggtctcatctgggtcaaattcctctaggtaacgcgggataccgcccagtattgcgtaggccagcgccttatcctcgctactatagttggggaagaattgcgctgcatcccaatatggcatcggcagcatcttcaggatgccggtcgcacgaccatatagcggcgatttttctcccaacagctccttttcgatgaagctcatggcactgccgcaaatcacaatcatcagatttgcatgacgcaacgtgtggtcccaaagattctgtagcactgacggcaatgacggatcagatttgaccagataaggaaactcatcgaatatcacaagcctgcggccgccatcgctcggctctggcagccgggttaactcggttaacgccctttcccaagaaggatattgactcagataatccttgcccggggcacccgcctcgaacatgagacgggagaacgatgccagctgttcatctttagtggcattctgcgccgcgaagaataaggtttccttgtcttttgcaagttgaataagcgtctctgtttttcccacgcgcctgcggccgtagacgaacacaagctgtgccctacgctcagtgaaacattcctgcagttgcttgaggtcatcgtctcgtccgatgaatgccatgctgcccgcctcctttatgccatacgccggcgtatttctatcgcatcacgatttattgtatcacgattagtataatcgtgattatacaagctgtgacgaggtgcgggtacgggccaatttgcaaaaaactctcactgagggggaggtggtgacggcgttgaggtcgagcttgccgcaggtcaggtagactcgacctcaaagccgtcaccaccacttgaccatcacccaccacaaacagcgaatagccaaaaaaatgacgcatgtgctgttatacattaaaacgcacagaaaatcacacatatactgtgcgattttctgtgcgttgcagtgagcagctactcagttatgcgcggcgcttgcgccagatggacagcgcagtgccggcagcggcgagcagcaccatggcaccgctcacgccatatacggcggcaccggtggccggcaacttgccgtcagacttggtgtcatcggtcttgttgtcggtcttgtcgcctgcgttatcgcccttgttgtcaccatcgccggtatccggcttggtgggcgtttccgccttctgcaatgctgcgatggcggcgctcagatcagcggcggccttgtcaaccacagcctggtcggaggaagcgagcgcagccttggcggcctgcagtgccttggcgagcgcagcccaggaatcagccgtgtaatcggattccttgagcgcttcggcagcggcgatctgcttgttgagctcagccaaatcgaccttgccctgctcgatgccggccacctcggtcgaggaggggtttaccaagccatcggtgtagccgtcgtaggcgaccgcaacagtgccagagatggtgaccgggagagtcaccgtggccttgccttcggcgtcgagcttcacggtcttggaccagtcgccagcagagaatttcaccgagccggcgagcgtgcccttgtcagcggcggtcaccgtggcggtgagttcgcgggtttcggcgttgtactcggccttggtagcggagtcaacagcgggcagcgtggtcggggtggaggtattccacttgtgcatgttctccgcgatggcagcggacacgttcacgaacgcgccgtggcgggtcggggtcggcatgttggtcggggtcaccttacccgtgacattcggcccccactgcttctcggtaccccagccgtcggtggaggacagacggttggtccagctggacgccgcgatggcggactcggaggtcatgtacggcttgtatccgccggagtcggccatgatgatcatcacatcgccagcctcattctggttcgggtcgccagcattgagtttgatggactccgggccttcgaacggcaggatgttctggtcaacgagctgccaggtcttggtcgtatcggcgttcggatcagcggcggcggtggtgcaagtcaggcactgggaacgctcaaggaacgtggacttgccgttggtgatgtaatcgccggccttgccgctttcctcgttcttggtcaggcgatagtacatatcgccaatcttgaacacggtggaatcaatgcgggagtactgggtatcctgccacttctcggccggagtgaacgtcttgaagtcgcgggtggtggccatcacaaggatgttgtatgcgccgttggtcttcgagctcttcactgcggtggcacgggtgtcatcggtgtattcacgcgaggaccagaacaccacataggagttcagcgcgtcatcccagaaagcttccggtgcccaagtcatgcccatgttgtcggcgttgaccttgataccggtatcgccgtcctcggcgttggtgcgagtccagttcaccatatcggtggactcccatgcttcaagcttcagagagccatactgctggttctggccccagccctgcgaggagaccttgaggtcggtggcgatcatgtagaacttgtcgccatccttggacttgagcacatacgggtcacgcaggcccttggtatcggtgttggagacgataaccgggttgccgctgttaatctcgctgaacgagaagaagttgttgccgtcggtggcggactcgtacagcgcctcaccgatcttgccgttggtggtggcctcatcggaaaggaaggtcacggccgcataagcgccgtccggaacggagcgggtttgctccttgacagtgacttccacggtcttggtcacgacctcgccaccgttgtaggaggcagtggcggtcagtgtgacaggcttggaatcaccgtcgccgtaagccgggcgagtcaccacgccggcacccttatacggatcggccacaccgttcttcggagcctcgtacttggcgtcagtgccggtaatgagcttttcatcagaggacttccacgtaatcgcagaaccattcttggtgccttcggcaactagcggcaggttctcgatggtggtggtcttcagcgcggaaatcgcggcgttgaggtcggcttcggcagcgttcttggcgttcatcggctcaacggtgacgggcagttcggccttcacaccacccagctcagcggtggcggtgatggtggcagtaccagccttaacgccggttacagtaccgtctgcggcgaccttggccacggactcatcggaggaggaccaggtgacgttcttgctcacggcgtcgtccggggtgacggtggcggtgagcttggtggagtccttctcaatcagggtgagcttgttgttcaccacaccggtgccggaaatcgcaacggcggtcggcatggtcaggtcagcgcccctgtagaccttgatgtcatccattgcaccattccagtactcatcgacggagtagaacgacttgccgatgtaggcggtggtcgcgccgagatcgctcatcttgatgccggtgttggccttgaaaataatcagggcattgttgcggaacacggcaaggttggtgccgtccacgacaatcttgtaatcggcccagctgttgtcgttgccggaaacggtgaccttggatccctgttcgttaccccagttgttgttggagataacgcccttgatggcggtcttgctgttgtagaacatcaggtacttgttggcgttggactgatcggtggtgttggcgtcgttcgagccgtccttgccgacgatgaacgagaagaacttgccgctgtcgtcgtgacgagtcttggacgcgaactccagagtgaaggagtcgccggcgtccttgaacagctggtcatcgatctgggcgtactggccatcgccgcgcagtgagagcgcctcgttgttgctgcggtcaccgtactgttcgatcttggcgttgtctttcagcgtcaggttgtacttgccggtcgaatcggcaatcgcgctgttcgtggtgccgtttttgcccgtgaagtcccagctggcgagcagcgtcggttcagcagccttagcagtctgcactgtcgcggtatcggttgtctgtggttgggaatcttccgactccatggcatacgtcgtcggaactactgccatcatcgttgatattgcaaccaacgatgctgccatcttcttccaatgcttcaccgcatctctccttgccctttgcctcgacccacttgtcgggtgtctcgttcgcctctacgtgaacgcaaacattatttgcgatgataccattacggcactgagactcagtgtgccagattccttatgtatataagcacttacagggggcaaccgcccagcccgaacactccccgtatgccaaaagcccccttccaagccaatcactaatacccctcaatcggcaccccgctccgccagccgccccaaactgttatcaatttgttatctttaccgcgcttgcgtggacagagaacgctcagacctcgaagatcgccgcatattcgcgagagaacccgcctagtcaatgagatatggattgaaaacacgctcggtgacggggatatggagcatcagcatggtgccgtaaccaagaatcaccagcaggaacagtccaccgggcatgtagaaccagctggccaccagcagcgccacgaacacggcatccacgatgaccagggccacggtcatcgcgatgtgggagatgccgaagatgaaggcgttcttcaaggtgccggccacggtgttctcgaagcgtgcctgaagcgcgaacacccattcgaagccgataagccagaggatggtcagcgcgaatttgatgatgagcagcggcgtgatctgcaggacgatccatgaccagaccagtgcaatcagcaccaccaagaacggcagccacagcagtgtggctttgatgaagttggctttgaatgacttgaagtagttggcggttacgcctttgccctcgccctcgatggagcggcggcaagcatcatggccggcggtcagggccgcaccgatggtgatgagcggaatcgaagtgaccagcatcagaatgttgatccatacgccgtcaacaagattgctccacgcgcgcatgaatttcgagtccggtgccagccagttcatcaactactccttgtgtcgcctgtggctcccctctctgaggggagctgtcatcgcagatgactgaggggagacttgatggagctcagggtactcccctcagtcggcttccgccgacggctcccctcaaagaggggagccggattggtggagctcagcccttgaccgctccgccttcggccctgcaattacggactcgcctacgacgaggctcatcattagcttcgccgctgtcgcggctcagcctggagcctgctggaagcccactgggcttccagccatgggctgacgacgcgagtcgtcagcccttgacggctcccgccatgacaccagagactatatacttctggcataccaagtagaagacgatgatggggatgattgccagcaccaggcaggccatcatggcgcccatatccacggaaccgtagccgcccttgaggtattgcacggcgaccgagatggtcttgtacttgccgaggtcgagcgtcaggtacggcagcaggtaatcgttccagatccacatggcttcgaggatggccaccgagacgatcgacggcttcataatcggcaccacgatctggaagaagatgcgcggcactgacgcgccgtcgatcatggcggactcctcaagctcctgcgggatgcccttgatcacgccggtgaagatgaacacggccagaccggccccgaaaccgaggtacacgatgcacaggccccacggggtattgagcttcagcatgtcggcgatcttggagagggtgaacatcaccatctggaacggcacgatcatgttgaacaggaacagggtgtagagcagcttcgcggcccagttgttcacgcgcacgatccaccatgcgcacatcgaggtgcacaccagaatcagcaccaccgagccgacggtgataagcagcgtccagccgaaggaggcgaaaaactgcgtggtctcgatgccgcgcacatagttctcaagtcccacgaacgccttgccggcaggcagggagaaggcgttcttggagatgtacgccttctgcttgaaggagttgatcagcaccaggacgatcgggaaaacccagaacagggagacgacggcaaacagcacagtccataatgcgccatgcttcacaggcttgttctcgttcatcaggctgccacctccttgctcgtggtgagcttgttctgaatcagggcgatgaccgcgaccaggatgaagaacagcacggccttcgcctggccgacgccttcccagcccatacggccgtagaaggtgcgggtgatgttcagcgccagaccttcagacatgttgctcggcgcaccgttggtcaatgcgaggttctggtcgtagagcttgaaaccgttggtcacggtcaggaaggagcacacggtgatggacggcatcatcagcgggatgatgatgcggaacatggtctgccgtccgttggcgccgtccacggccgcggcctccagcacatcggtgggcagggcttgcaggccggcgatgtagatgatcatcatgtagccgatctgctgccagcacaccaggatgaccaagccccagaacccgtaggacgccttataggtcagggcgcggccccagtgggccagtacgccgttcaggagcagcagccagatgtagcccaggatgatgccgccgataaggttcggcatgaagaataccgagcggaacagcgtggagcccttgatcgccttggtcagcatgtaggcgatggcgaaggcgatcacgttgatcacgatggtggtcacgatggtaaacgcggtggagaagccgagcgcgtgcaggaattccttgtctttcaacgctttgccatagttcttaagccccacccattcaccgtcggtaacggtggtgaattcgcaaaagcttaagtagacgcccatgatgaagggcaccaggaacccgatgatgaatgcggcgaatgtggggagcgcgaacagcgcccaccatctgcgtatcgccttgccagccatgctgatcatgacttttcctcctccttgagtccgctgcgttgcgacactgcatcgtgcgccggctgcggagttcaactcaatgcgagcctgccgatcgagaaccgcatgcacggcctgttctcgttcaagcctatgttcatagtaaacgtcgaatcattatatgtcaaacgttgtcattttaggcgtttcaagttcgagcacactccggctccagcaatcttttttcacctaagataatggctatataaagccaatctaacgccgtcatagacactttgcaaacgtttgtaatacaatcgttgtcatcgccgcagatcaatcaatcagcatgtacactgtagtcagttgtgcatgtgtattgcgattttccattcaacgcaagggggctgcaatggctacgagcattcaggatgtcgcccgcgaggccggcgtctccatctccaccgtctcacgttccttcaccaggccggatctggtgtcggccaagacccgcgagcgcgtgctcgccatcgccgacaaactcaatttctcactctcccgctcggctgcggccctgaaatccggccgcgccctgcgcatcgcagtactgatgagcggccatatccgcctgtggttcaccgcctcggtcatcgaggggctcaacgaggtgctgcacacgcagggctacgatatttcggtattccagatttccagcatcgaggagcgcaaggaattcttcgagatgttgccggtacgccgtaacgccgatgccgtgattgtggcgtctttcgatatcgacaacaacgaaatcgcgcaactggcttcggtcggcgtaccgatcgtcggcatcaattcagtcgagcccgaagcccgcggctttaccgccgccgtcaatatcgacgatgtgcagggctccacgctggccgcccgccatcttatcaatctcggacatcgccgcatcacctacatcagcaccaatcgcgaggtgtcgctgagcttctccgtgcaaagccgattcgactcattcaccgcctgctgccgcagggaaggcatcgagccgcaggtcatcgtctgcaaggtcgatgacgatgggcgttatgaaatcagcgacgtggtcgaccaactcatgagccaagacgagatgcccaccgccatcgcatgccaggaggatggcatcgctttgccgcttatgttccagctggagcgcaatggattctccgtgcccggcgacgtctcgctggtcggctacgacgatagtttctacaccggcgatatcggcctgaccaccatccgccaggatccggtggaaatggcccgcgtggcagcccgcatgacgctcgatctcattgacgaaaagccgattgagcaaccctacatcgtgttcccggcccagctgaaggtccgctcctccacctcccgcgttaagtaggctcacacaacaaagcccaccatagaaaaagcgtgaggcaaccgcacaataacgctcaatcgcacattgtgggaaatggcgaaaaatcgccgattcatggccccacagcgtgcgattggccgggtgtgtgcctcacacttttctgcggcggacgattttgtgcgagactcagcaatacaaagcagcgcccctggagaaggaaaggcagggacgccgcggattgttacttatcggctatgggactctatgagactcagtgcgaggcctcgtattcggaagcccaaccgtccacgaaggcggtcttgacggcatcccacttgccggtgccctgcgcgtactcgagcagcgcctggccgaccttgttcttccattcctcggacggcatcatggtgaagttccaagaaacctgggtcttgccggactcctggtcttccacggcggcctcggtcagcgggttgtcgcttttgacgtcatcgaaggtcttgaacggggtggtgaagcccatgtcctgagagagggccttcttgccggtatcagaggtgatcacccacttgaggaagtcctcggtggccttcttgtcggcgtcggaggccttgtcattgatgcaccagtagttctcggaaccggtggtcagaccctgcttctcctcgcccttgacgccgatgtagatcggcatcatgcctacctgatcgtcggtcatgccggccttctgcaggtcggtccaggcccaggtaccgttctggtagaaggcggcctcgccgagcgcgaactcggagttcgcatcatctccggtcttggcgctcagctgggtgggttcggtggtggagtcggtgatgtacaggtcgaagatcttcttgtagttcggcaggtaggtgcccttgatcttggccggctgctcggtgacgttgtcgtccttgaactcgtagtaaagcggcagattggccaggtgggtcttgaagcgccagtcggagctggagtcgaagccggcggaggtgaacgcgcccttgatgccgagctcgtccttgcgggcctgcatgtcgtcggccacggccttcagggtgtcgaagttgtcgatttcgtccatggacgtggccttggcgccatccagcgcgaagtacttgttgaggatgtccttgttgtagatcaggccgtaggtttccatcacgtacggcacgccgaccaccttgtcgccatccttcagggccacatcttggttggtgagctccttgtacacatccgtattggacatatcggcggtgtacttcttccagttctggtagccgaccgggccgttgacctggaacaaggtcggggcttcggttttggcgatttcggacttcagggtctgctcgtaggtaccggaggccgcggtctgcaccttgacctcaacgcccttttccttggtgtattccttggccagagcggtccactgatcagccgcttccggcttgaaattcaggtagtagaccttgcccttggcgtcatcgccggaggtcgagcttccgcaggccgccaaagcgccgagggacatcgcagcgacagccgccatcgcgactgctgacttgactgtacgattcatcatcgaacctttctctttcatcgtcgacccggccgtccccggtcgggacaggtacgctagcacgcacctttacgactatcgacatgcactattgtgcaacggtttgcttctttttgcaaacgatagcaatatcggcgcgtcataaatcatcattttcaggccattgtcaacaaatatcccattaattcagtcatttttgcctcattatcgcaatgcaagcgttcgcaatcatgagagcgctaacatatctttcatggcaatcgattgccacttatacccatcaaaaaacaacacgccgacgctatcgtttgcaaatcatttatcgacataccgcaattcccgccacaaacaataaaggcccgcccgcagtagcgggcaggccagcgcaatcgcagcgcaaccggggctaggcgttccaccgttcgatgacgttatctcccttatagacgctgagcaccgagtagtgcgccgtatccaaacgcagcaaccgtgcgaaatgcgggtccacgcccagccattgcgaggtgaggatgcgcaggatgtgcgcatgagccaccaacagcacattatggccgtctttcagcagcggcgtaatctcgtcgatggcgctcttggcgcgtgccgccgcttcttccagcgtctcgccaggcccggcatggaccggcacctgttcgcccgaaggcaaggtctcgacccagtcgccctccagcgtgggcgtcagcgagcgcggcccgtcacgccacacatcccattcaaaaccgctggcctcactcacctgctggcgcgtacgcccctcggctcggccgtaatcccattcagcgatgccgtccaacacaccgtggtccgcaaaaccagccaattcagcggtttggcacgcccgcttcagcggactggaaaacacacagctctggctgaatccttcggggaaggcctcgcgcaggcgccttccggcatccgctgcctgctgctcgccgaccgcggtcaacgggatgtccgtgcgcccggtatgctgcccggattcgctccacacggtctggccgtggcgcagcaacaccaaaaatccattgccgccacgagagttctcgacggcaacggtgccgttcacgttctgttcgctcatgcctccactctagtctgcgctcgttcatgactccaccattaacgcccatcttttgcgctgagatgattgagatgctattagactgagagtcatgagcgacgaaacgaacaccgacttcccctccagcgccgaccgcgcggtcgacagcctgcaccgcatcgacgagaaggtcaacaggctgcgcgaggaccggctcaacgaccctgattctctgggcgacaagctcatcaagtcggcagtcccagcgctggcaggcttggttgccggcaaagcattccagatgatatgggacaagggcacaagcaaacgcaatctgcgcaagggactggcggcagacgcgccgcaaagtctggcaatgagtctggcattcgccgccgtttcggccgcactcggcgcagtggtttcgcagctgtcggatcggggctccaaggcgttcgtcgaccaccgccatcgcaagcccagccgctaatcccccggttggatgatggtttctgttggctgactgatgactcatcgctggaatttcgtcaaggaaccatcagtcaatcgacaggaaccatcagtccagcacagttccgccacacaatatcggcatttcactgtgaggtaatccaccgtggcgtccggcgtctgccgtgcgacaataaagccatggttaccaacgcaacaatcgaggctcttctgggccgccgctccatccgtaagttcaaggacgaggccatcgacgacgatacccgcgccacgctcgaaaccgtcgcccaacatgccgcgcccagccagttccttaacgactggtccgccatccgtatcaccgacccggccaccaaagccaagctcgccgaattcggccatcagccgtatatcgccaccgcgccgttgctgtacgtgttcgtcatcgacgagcaccgcaacgcacgcatcgccgaacgcaagggtatcgatcccgcttccgacgaattccatctcaagtacagctatcgcttcacccaagctcagaacgacgcagtgctggccctgcacgccatggagaccgccgcctattcgctgggactgggctgcgtgattctcggctctctgctcaacaacatccccggccttatcgacgtgctgaatctgccggaatacacgtatccggtgctgggtctggccatcggcaagcccgatcagaacccgaccgtcaagccgcgcatgccgcgcacgatgcagttcttcgagaacacctacccggctgacgccgatggcgtactcgaccagctgcccgccttcgacgaggaagttcaccggtactacgatctgcgccaagccgaccgtccagtggacgctttcagcgatcaggtcgccacgatcagtcggcaggatgtcagccatcagacactgctcgacaaggccgccgctcagggcttccgtctggatcagtgagaccagaaccaacgagatagcctcggataggctcgtcactgagtcgtctcggtctcagcactgcgacgactcagttccaacacctcaacatttcatcaccggataccggcaaaattgcacaaccatcccgccggtgtcgcaccatcaacaaacgttcacatatcagtcccattatgcggacaaccaacggccagttttgcaagaaaacccgccaaaccagcagtatccgcaccagtggtgggaatagactgcatgtggccgcaatgactacgaaccggaaaagagggactggatgcggacggtttggcaagtctttctacgcgattgcagacgtatcttacgcaatcccgttgccgttgtggtgacgctcggcgtagcaatgctgccctcgctgtacgcatggttcaacattctcgccaactgggatccctattcagccaccggcaatctgcaagtggccgtagccaatgaagaccaaggcaccaccaacgatctggtcggccatctcgatgcgggccggcaggtcgtcaagaaactcaagcagaacgacgaactcggctggcgcttcgtagacaatgaggaacaggccgtccacggcgtggagaccggcggatactatgcagccatcgtgctgcccaaggatttcagcgccagcttggtcgaatcggtgaccggaacctccaaacagccgaaaatcaagtattacgtcaacgagaagaagaacgcgatcgcgccgaaaatcaccgacaccggcgccaccaccatcgatgagcagatcaactccgccttcgtcaccacggtagccaccaccgttgcctcggccatttccgaaaccggagacgatctcggccaagccactggcaaagtccagcacgatacgatcgatgatctcaatacggtgatgtccacgctgaacaccgttcaggattcactcaccgacttacaggacacgctggcccaatcagacacgattctcgccgacgccaaacagaccaccgcctcactcaagcagaccgtcgcggccgcgcagaatgcctcccgccagtccggcacactgttggcggaaacacaggccgggtcacaagccttctccaccacactggtcggcgcgctcgacagcagttcagcacaactctccggactggccgtccacgtcaacaacgccgccggcagcatcaccggctccttcaacagcgcgcagaactccgtcgacaccatcaccaacacactttcggccccactgaacgccacccaaacgtcaatcagcgatctgaaagacgcgctgaccaaagccggcatcggcaaagacaccaccgacccggtcggccagaacatctggaaacaaatcgatgcgctcgactcattgatcagcaaacagcagacacagctcaacaccttccataccgacaccacacagttcatcaactccggcaaagacgccaccacgaacctttccggagccatgaccaacaccaccaccggcggcatcgcggcgctgaataccgcgcgcggctcgctgaccggcaccgtaatgccgtcgctcacctcatcattgaacagtttcgccgccctgaacggcacgctggatggcacgttgacttcgttgtccggcaccttggatcaggccgacgggctgttcgaccagcttgtcgataccctgaaccaaacgaaaaccaccatcagcagcacgcaggattcgctgcgccaggcggccagcgatgtcgccaccgtacgcaccgatatcgccacgctcgatagttccgccgcttaccagaaaatccgggatacgctgcatctggatgacaagggattcggcgagttcatgggcaatcccgtcaccctgaccacgaaagtcgtgtacgccaccgacaattacgggtccgcagtcaccccgttctacacgaatctggcactgtgggtaggcggtttcgtgctgattgccatctacaagcttgaggtcgaccgcaaaggcattcgccgtatcaccgctacgcaagcatatcttggccgctggctgctgctggtcaccatcggattcctgcaagccatcatcgccaccattggcgatctggtgctcggcatccaatgcgagcatccgctgctgttcatcttggccggaatcttctgttcgttcgtctacatcaacattatttacgcgctggccgtggcgttccgccatatcggcaaagccatcgccgtaattctggtcattgtgcagatacccggtgcctccggcctgtatccgattgaaatgatgccgaacttcttccgcgaactgcacccatggctgccctttacctacggcatcaacgcgatgcgcggcccgatcgccggcctgtacgcgaaccattactggctcgacatgctgcacctgttctggtatctgccggcggcgcttttcgtgggacttgtcgtacgccggtatgcgatgaacctgaacgcgctgttcgaccatcgtttgggagataccgacctgatgatcaccgagcacaacagcatggtgaacgaacaggtgagcttgaactccgtattccgcacggtgtccgacagcaaggaactgcgcgatatcatcgctcatcgcgcgcaccggttcttcgcgcggtacccaaagatgatcgttgccggtctgacattgctgaccgtactcccgttcgtattcctggtactgctgttcgtcacccaagagaaaatcgccatgctgacctcctggattctgtcgattattcttatcgacgcctatctcattgtggttgaatacgcacgcgaaacctacgccatgcagcttggcgtcagtgccatgagtgccgacgagttccgcaatgtgatgctcaacggatatgtgtggcggcgtttccacggccacggacgtcacgaagcggcgatgggcagcaatccggatatcggcgaaaccactgaacgactcacactgttcggcgatcaggccgccgagccgactgcgcacaccgcacagttcgagcagtccggtcagtccggtcagtctgggcagtctgggcagtctgggcagtctgggcaaggaggcgcacgatgaagcttatctggaaaatattcgtacgtgacgtgcgccaagccacccgcaatgtgatcgccgtaatcgtggctatgggattggtgattgtgccggcactgtacgcctggtacaacatcgccgccagctgggacccgtacggcaacaccaaggccttgaaggtcgccgtggcaaacgtggataagggctataagtccgatctgatgccgatcaccatcaacgtcggcgaaaccgtgaccaatacgctcagggccaatcatgaccttgactggcagtttgtggatcgtgctaaggccatcgatggcgtgaactcaggcgaatactatgccgcgctgattattccaaagagcttcagctccgatatgatgacgctgttttcaccgaagatcaagcacgccaagctcgaatactatctcaatgagaaaatcaatccgatcgctccgcatatcaccgaccagggtgctaccaccgtggccacgaccatcgaccagacatttgtgaagaccttggcgagcgtggcgctggatttggtttccaacgtggccgattacgcgcaaagcccgcaaatggagcagtacgtcaacaacgcctccagtcatattgccaccatgtcatctcgtttgaccggcactgcgtcgcagatggattcctatgccaatctgctcggggccgccaacagcatcattgattccaccgataagctgctgggatcaacaggctcagctgcggccacaaccaaaaaggcgttgaaacagacccgcaacggcgtctccagcctcgacaaggcattgtccggagccaccgatggcgtcggtacggcattgcagcaggccggttcatcctacgacaccattgccaagcagatcgatgccgcttttgccgatgtgggctcacaatcctcgcagatatcaaacaagctgaccgatatgcaatccaaagtggaggctcaggccgacagctttggaaagtatgccgccgctttacgagatctcgccaaacaagcggcttcactgcccgtgggcggagataccgttgccgctcaactgaacgcggctgcagaccaagccacaaaggcgcagcagagcatgcagcaagccgccaccgcgttgggcgatgcggccacgcacatagcaaatggtactgccgatgccgatacagcgcgtcgagatctgaaatcacaaatcgccgccgccaaacaatcgattactcaggcttcagacacgtacaagagcacgctgaaaccgcaactgaacaatctgacctcgtccatggacgaagtggccacgcaggcaagttccgtaatcgacgggcttgcgtcgaccgtcagcagcgtgtcaggtctttctggcggcgtttcagacagcctgacggatatccagtcggccttgactgacgcagctagcgctttgacccgttcggcgaagaaactcgacaacttgtcttcccaactcgcctctatcaccagtggcggcaccaacgacctgtctgtgatttcctctgcgaagcccgatgccattgcttccatgctggcggcacccgtagcggtcgaccgcatcgcgctctatcccgttgccaactatggttccgcgatggctccgttctacacgattctgtctatctgggtcggtgcgatcattctggtcgccatgttgaaagtatcgatttccgaccatgagaaggcccgtatcttagggttgggcaatgatctgccgctcggttcgggagtgggtcttcgcgaggccatgattgccgggcggattgccggaccggccgccgcgttggatgtgctgaagaagccgcgtgccgagtcttccggcaatgcgcggcagttcggtttacgcttgcaccacgaatatttcggccgatacatgattttcggtttccttgctttgctgcaaggtacgctggtgtgcctgggcgatatgttctatctcggcgtgcagtgtgagcatccgattcagtttttgatggtcgggtggttgtctgcactggtgttctcgaatattgtgtatacgctggccctatcgttcggtgatatcggcaaagccattgccgtagtactgctggttatgcaggtagccggttccggcggcacattccccattgaaacactgccgacgttcttccaggtcgtttctaaatggctactgttcccctatgcggtggatgcgatgcattcggccatggcgggctcattcggcatggaatactgggtttccatgggcaaactggcactgttccttgttccctcattgctgttgggacttatgttgcgcaagccggtaattcgcttcaacgattgggttatccgcaaccttgaaagcaccaaggtgatgtgagtgttggacggagtgtgtccgagcgccctgaacgcttaacagcctacgacctggcgtgtttggaccgtaacctgcctcagatacggcgttggcgaggcctgtggagcttctgacgctaacgtctacgtggcttgtagccctttttacgactgtgtggcttgagttgctggttcagcggtacatgccggtaactggattgtggatcgcgatgtgtgaggtgccagcatccgcaatattcgcaacggtacacccatagctcggctccacgctcgatcaggctttgatcagcggcacgctgagcctgcgccttatcgtggtacatgattttattcgacgtggcgcaacgtttaggggtgaagtaatgcatagcagaagccagtgtagagcgaccccataaccaagccagtttctggctcccctctggaggggagctgtctgcgcggcggaccgtgggggcctgggcgttgggctcccacggtcgcggacgcgccgcgccgttcggcatcgccgtcggggctggccgggaatggtcccgggcgtgggtctcatgggtatgcggggaggtcccggtgcccgtgcgggttcgggccggggccggttccggatatgcgggaagccccggtacctttgaggggtatcggggcttcctgtacgtgtggtgcggcggcgtgctactctcccacaccctgtcgggtgcagtaccatcgccgtgccaggccttagcttccgggttcggaatgggac

SEQ ID NO: 3809 - DNA, 6032 bp, Unknown
  R35_2m  MAG No. k141_5516
caacatcaaccaccccgaggccgagccgatgattatcggatccgccttcctgaccaagctcaacgccaacatgggcaactcggccgtcacctcctccatcgacgaggaagtggagaagctgacgtgggccaccaagtggggcgccgataccgtgatggacctgtccaccggtaacgacatccacaccacccgtgagtggattcttcgcaactcccccgtgccgatcggcaccgtgccgatgtaccaggccctcgaaaaggtcgaggatgatgcctccaagctgagctgggagctgttccgcgacaccgtgatcgaacagtgcgagcagggtgtggattacatgaccatccacgccggtgtgctgctgcgttacgtgccgctgaccgccaaccgcgtgaccggcatcgtctcccgcggtggctccatcatggccgactggtgcctgcgccaccaccaggagagcttcctgtacacgcacttcgacgagctgtgcgacatcttcgccaagtacgacgtggcgttctctctgggcgatggcctgcgccccggctccctggccgacgcgaacgacgccgcgcagctttccgagctcatgactctgggcgagctgaccgagcgcgcctgggccaaggacgtgcaggtgatgatcgagggcccgggccacgtgccgttcgacaccgtgcgtatgaacatcgagctggagaaggccgtgtgcaagggcgccccgttctacaccctcggaccgctgaccaccgataccgctccgggatacgaccacatcacctccgccatcggcgccaccgagatcggtcgttacggcaccgctatgctgtgctacgtgaccccgaaggaacacctcggcctgccgaacaaggatgatgtgaagcagggcgtgatcgcctacaagatcgcctgccacgccgcagacatcgccaaacaccacccgcacgcgatggatcgtgacaatgcgatttccaaggctcgcttcgagttccgttggctcgaccagttcaatctgtcctacgatccggacaccgccatcgccttccacgatgacaccctgcccgccgagccggccaagatggcgcacttctgctcgatgtgcggcccgaagttctgctcgatggccatctctcagaacatccgcaaggcattcggtggcgaggccgctcagcagcaaatcgtgaaggaggctgctgctggcatcgactccgaggcactggctaaggccaaggccaatgtcgataacgacgtggtgtccgccaacgtgctcagccccgaagaaatcctcgccggcatggatgcgatgagcgaaaagtacaccgcccaaggcggcaagctctactccaccgcccaggagtaaacctctctggctcccctctctgaggggagccaattattatgcccggtggtgtcttaattcgggacgacgctcgactcgctcgaaggcggtgacgaggtcggcagcacggatcgcgccgcggcggtccttggcggccaccagagcggcctcggtccagatggcgcacacttcggcgccgctccagccttcggtccgctgtgcgatatccaccaacggcagttcgccctcgattgacaacgaacgggcctgcacctgcagaatgcccaaacggtcgcgctcagacggcatcgggaaaggaatctgccagtcgaaacggcccggacgcaacaaagcgggatccacgtcctcaatacgattggtcgcagcgaccaccacaacattgcccttggactcgaaaccatccatcaacgtcagcaactgcgccaccaagcgcttgccgacgccattggtatcgttctcgcgcgaggacgcaatcgaatcgatctcatcaaagaagatgatggcgcgcttgtccgcctgcgcggcggcgaaaatcatgcgcagcgtttcctcactatcgcccacatacttgctcacgatggtcgggccggacaccagatagaactgcgcgtccgccacattggcgatgatgcgggccagatgcgttttgccggtgcccggagcaccggtgaagatcacgcccttgatgggcttggcaccgatcgcacgcatctgcgcactgttgcccagctgcgtttcgataagctccttggcgcgcgtgatcacctgctcataaccgccgaacgaatcgaaggtaagcgacggatcgctgcccggcgtgatgcggtactgcttgatgtcgtcatcgtgatcggattcgcctgggcggatggccgtgggccacagcactcgttcgatgccgaacaggtcggtgaactgcacggtgttgccgggcatgatcgaattcgggtaatcgccttcaagcagttcgaggccgtcggaagtctccaggaccacgccttcgttgagcgcacggcgcacgatgcccacacggggcttcaacggccacacatcatgcggcactttacgatagaaatccgtgccgacgagcaacacgtcgcccacatcgaacacctcctgacgcggaaatgtgagctgtgtggtgtgcccattaggcattacgccaaaatatgcggtgcgttcatcgtcaaaaccggtgatgcgtaccaagacgccgtcacggcgcagtacatcgttatcagccatgtcccctcccgaacatttcatgaatcaatcgcaatcagcaaaccctcccatctcaccacaggagcggcaaaacatcaaggaaaaccgctccgaaaaacatcatgggccccacttagaatgaacactatggcacagattgcaacatctacacttcccgctgttctcgcgatctccggctccgactcgtccggtggtgccggcatgcaggccgatctgaagaccatgctggcttgcggcgtgttcggcatgagcgccatcaccgcgctcaccgcacagaacaccaccggcgtgcgttccattcaggacaccaaaccggacattctcgccgaccagatcaacatggtgtttgaggatattccgccggtcgcggtgaaaatcggcatggtgtctgccactgacatcatcgacgtcattgctgaacgactcaccttccatcacgccacgaacatcgtgctcgacccggttatggtggccacttccggtgccaagctcatcagtgacgatgccattgcggccttgaccggcaagctgttcccgatggctacggtcgtgactccgaacattcccgaggccgaagtactgaccgatacgctgattcgcgatcaggaggatatggaggccgccgcccaccgcatcgtggagcgttacggctgtgccgcgctggtcaagggtggtcatggcaccgaggatgccaacgatgtgcttgccgagacggatggaaccgtgacctggtttgatggcgcgcgtatcaagaatccgaacacgcacggcaccggatgcacgctgagctccgccatcgcctcgtatctggcgcttggcgacacgctgtccaaagccatcaagcatgcgaagaagtatctgaccggtgcgctgaagacccagctgaatctcggccacggctccggcccgatggatcatttctggaagtatcgctgacataagtgtggctgttaagctccccttgccaggggagcttaacactactgaaaaaggagaatcatggttcttgaccgtaatgccgttactcaggaagtgccgatcgacccggaaaccggcaaaccgtacctcaacaccgtggcagccatccaggtgtcggccaatggcgtgggctccgaggtttcaccatacgtggctcaggccgtcgaagtgattcgcgaatccgccctgccgcaggaaaccaacgccctgttcaccaacgtggaaggcaatctggacgacgtgctcaaggtggccggtgaggccgccaagaagctcgccgagcagggctaccgcacttctctggtgctgcacatggatatccgtcccggcttcaccggccagctgaccgaaaagcccaagctggtggatgagatcctcgccgacaagcaggcgaaatagcaaagcatcgcttccaccagcaagggcatgctttgttattacacgtttcatggggcggtaactcacccatagggcggtaaatatctcatggggcggtaaaaccctcatggggcggtaggcgaaaacggctctattctgcggaaaggcaaaatccgctaaccgccccatgggccaaataccgccccatgagtgttttaccgccccatgggaatcacggttctgccttctttcaacggggtaagagcgtaagtggggcatatataggagcgttacaaactctgttatcgttcataatgtgaccgcaacgcggcgtgccacaagatcgaacctatagttaagccccatgtagtgagctatctcacaacgattggctcgctacgtggaattcaagacttggactgcaaacgtcgttcatcccacacaatgggagggcgaacggaacacgcagtccaatcaagagttcgctcgccgcaacatcattgagcagttgcacgcgggcaggtttgcaagaagagggctcaaatatgactgctgctgaacagcagatttccggcaatcccgcggctatggaaagcgcacaagcacgtaccaccgtgacggatcaagccaaggttcaggatattatctcgcgcgtggatcgcgcacatgaaaccccgatgttccatcgcatcgtggcgctggtcgccgctggcatgctgatggacagcatcgacgtatatattggcagcgccgttgcctccagcgcgttggccacacactggtccaccgttgcacaaaattccacctttatgtccgcaggcttcctgggtctgctggtcggttcgctgctggccggcttcgtcggtgacctgaagggccgccgcgtggcttaccaaatcaacctgctgctgtttggcggcttcaccttcctcggcgcattcgccccgaacatggccgtgctgtccctgtgccgtctgggtgccggcctgggcctcggcgctgaaatcgtcaccggcttcgccatggtcaacgagttcgcaccgatgaaccgccgtggccactggtgcgcgattgtctcgctcgtggccaactgcggtgtgccgatcgctatgctgctgtgtgcatggatcatcccccgctggtcctggcgtccgctgttcgtggccatcggtctgggggccgccatcatctggtggctgcgccgcgacatccccgaatccccgcgttggctcgccgtgcacggccgttacgatgaggccgacgccatcgtcaagcagcttgaggccaacggctccgaactgatcgacgcagccgccaaggccgacaccagcgacacccacaacgccggcggccgttcgctcggcatctgcctgcttgtagctgtggttgctgtggccgccacgaacgtgtgctcctacgccttcacttcttgggttccgacgattctggtcaagcgtggtattaacctgtccagctcgctgctcacctccacggcgatgatgctcggtgccccggtcggctgtctgattggctctctgcttatcgaccgcatcggccgcaagcgcacgattgtgccggccttcctgttcactggcgtgttcggtttaacgtatgccttccagacctctaccgtgagcgcaattatcgttggcttcctgctcatgatgtgcctgtacgtgcttatggcttccgtggtggctgtgtacgctccggaactgttcgccaccaaggttcgcttccgttgcgtcggcttcgcgaacgccgtggccaagctgctcaatgtgttgatgcctatggtggtgggttggatgcttacctcgcttggtgccacgtccatctttgtggccatcagcgcaattgctattgcatcgatgctgattgtcggcttctttggcgcggagactgcgcagaagtcggttgggtgatcggtttcctcacagtggaataactgctgataatgtccattcggcgtcttgcgtggtgatatgcagggcgccgttttgttgttctagtaattgtcggtaacggttgagaccggtaccggtggataggtccgcactgccatccg

SEQ ID NO: 3810 - DNA, 54573 bp, Unknown
  R35_2m  MAG No. k141_5627
agcagttgcatcgccttggcgtaatcgccgccttcttcgttcgggtcgcccacaccgtccaccgcgacgaaccgcatcgccggtaccatgacgatggccggcatggtcttcggctgatacaggtccttatactccttcttataatcgaacgccatcgctcattccccttccgccaccgcatcgatctcgtcctgacgccgccaccgcttgaggtttggcagcagcgccgacatgcagtcctcggcctgttcgacgctgatatggcaggattccgccatcatcggcgcacacgcggcgaccaattcatcgctattggcatagtcctgaagaaaaacgccgtcgtcatagcagtagttgcaataatctccgtttcgcgttccatccggttcggtgccgtgatcttccgggcggtaaaacggcatggcacaactttggcaaaaaccattgtccggcatttccataagcctcgccatcggcacctcaaaacgggtgctgatcagccgaatcatgtcgatgctcggctctgccgttcccttctcccagcgggaaagcgcttgttgggtgacgaacagctcgtgcgcgaactgcgactgcgtaagacctcgctcctcgcgcacgactttgataacctgaccgatcgacatgactacctcccgacatcggaaaacgattcgcgcgtctcgctgtgcgcttgctgattccagtctaagggcatgtcccgttcgccaagcgcgggtacaacaaaccgttgttcgcgcttgtatcccggaggaagaaacagctcggtcgaacctatttcctctccacccccttcaatgctcccggttcctctgactcctttgcgagcgccgcggatgggatgagcacgcttacgtatggggttgcgccagacaggacgtcgtcgtagaagcgctgtttggcgtcgatgaagtcgatggaatcctggatttccgcgagctgctcgaccagccgcgcccgcttgccggcgagcatctacttgcgttcgaggatgctcggctcgtggaggagcgtaaggggcgcgagtaggggttcgcggctttgctgcggtctctccctcacccggctatactgggagctccctcgtcagagggagcttaaattcggtctggttataggcccatgggcttcttgggctttttgtcgctcatgagcatgaggaagctgcgggactgggcggtgatcatgaagcccgcctcatagctcagttccggcccattcgggttgtgcgtatccacgaccagctgccatttgcggccgtatcgctcatccggcagggtgaacataatcggctcgtaatgcgcgttgaagatcaggatgaagtcattgtcgaccatccggttgccgtaccagtctacctccggaatatccgaaccgttcagatagatcatcatggagaacgcatgcgtgttctgccagtcgtccatatccatgatcgaaccggtgtggtcgaaccattcgacctgcggaatcatgttcgaatcgtcgccgggctcacggcctgtgaagaagcgacggcggtgcaacaccggatgatccaaacgcagatgaatgagtttggaaacgaaggcgagcagttccttgcgtcccttgtcaagatgccagttggtccaggagatctcgttgtcctgacagtaggcgttgttgttgccctgctgggtgcgggccacttcgtcgccaccgcaaatcatcgggataccctggctgaacagcaacgtggcgaacatgttgcgcatctgacgctgacgcaagtcgttgacgtccggaatattggtcgggccttcaacgccgcaattccaagagcgattgttgctctcgccgtcgcgattgccctcgccattggcttcgttgtgcttttcgttgtagctgaccaggtcgttcattgtgaaaccgtcatgcgcggtgatgaagttcacggacgccaccggtcgacggccgttgacctgatacagatcggaactgcccatcaggcgcgaggcgaattcgggcagcgtggagggctgcgagcgccagaagtcgcgcaccgtgtcgcggtagcggccattccattcggaccagctggacgggaagccgcccacctgatagccgccggagcccagatcccacggttcggcaatcagcttcacgcgcgagatgatcgggtcctgctccacgatgtcgaagaacgcagacagcttgtcgacctcctggaactggcgtgccagcgtggcggccagatcgaagcggaagccgtcgacgtgcatttcggtaacccagtagcgcagcgaatcggtaatcaactgcagcgcgtgcggcgagcgcataagcagcgagttgccggtaccggtggtgtcgaagtagtgctgctggtcgccttccaccagtcggtagtaggaggcgttgtcgatgcccttgaagctcagggtggggcccatatggttgccttcggcggtgtggttgtacaccacgtcgaggatgacctccatgccggcgtgatggtaggccttgaccatggacttgaattcgttgacctgctcgccgcgttccccggaggaggagtaggcgttgtgcggcgcgaagaagccgatggtgttgtagccccagtagttcgacaggcccttctcctgcaggaaggagtcgttgacgaactggtggatcggcatgagttcgatggcggtgacgccgagcttcttcaggtattcgatgacgctcggataggccaggccggcgtaggtgccgcggatgtccggcggcacgtccatgttgaggttggtcatgccgcgcacatgcgcctcgtagatcaccgaatcgtggtacgagatgtaggggtgctggtcgttgccccagtcgaaatacggattgatgacggccgacttcatggtgtgggcggccgagtcaaggtcgttcatcgccgaggtgtcgtccgggcttttgaaccagtaggagaacaggctttcgtcgccgtcgatgttgccttcgatggccttggcatacgggtcaagcagcagtttgttggggttgcatctgaggccgtgcatcgggtcatagggaccgtagacgcggtagccgtagcgttggccgggctggaggccggggatgtagttatgccatacgtatgagttctgttcggtcatttcgatgcgcgtttccgcatcgtgctcgtcgaacaggcatagctcgactttctgcgcaacctgtgagtacagcgcgaagttcacaccggcgccgtcatagctggcgcccagcggatacattgatccaggtctgatctgcatagttttcagtatcccactttcttgtgtcactgatgtgccggggagttgaacgtcaggagaacagcgacggcttgtctttgtcggagttcctggcgatgagtctgcgtaacgcctcatgctggatggcgatcatcgaattggatgaggtgatgcgcgtggcggcaaggtcgctccacggaatccacgcggattccacgtgctcgtccgcgtcgaaatggcgctgctcccgtctgaacgggcccaaatgcaacaccatgatgtgggccagttcgtcggtcatgccttcggacgagtagaaatcgcccacgaagtcaacacccatggtgtcacggtccggcaccacgccggtttcctcggccagttccctcagggccgcgtccatgatgtcctcgccctcgtccatgagaccggcgggaagcccgtaggcgaacatgtccgatccggcacggtattcgcgttcgatgaggtaacggtcggtggacatgtcgtgcacgagcatgaccacacagggggcgtgacgcagcacctggcggccgatctcgtgttccttgccctgcttgtcggtcagagcgatgcgcatgtcgtccacgtggaagatgcgcccggtataaacggtttcgctactgatcactttggcgggcacgtccatgtcgatgccgtccgaggaggcgttcagcttatggtcgagccgatgctccagttgttcctgcttgcttcccccaaacatgtcatctcctcggaaaaaacgttttcgccacgtcactatagcgccttaatcccgatgcgcggtaatggacagcgtccatggatcggtcgtgtcgtggaaccactcgacttcaagccttgctccggtcgcttgttcgatggcggccggcacatcatcgatcgcgtagttgaaccacatggattcgatggcggcatgaggggtgttgatgaagcagggacgcacatggctctcccccgccattccatggccgagcatgatgccttgggccctcatacgggcttcataccgggcttgttcgatggcgtcggtcaccgggtggtgacgcaaatcgctggttacgtacacgtccgcaccggtggcacgcacctcgttgaacagggagtcaccggagccaggcagaatggccacatactgaacaaaagtgtccgaatcgccgcatacctggatgccgagcgcggtggtcatgccatgatcggacacttcgtcgaatacacgctgagcgaaatccttcagggcaacaggcttcggcaaacgacccacacgccccaagccgaccggatgagaggcgttggcatcgtcaatcggcacgagtggtttctggtcgatgagtccgaagtagtcggccgccgcctgccccacgccgcgatacgcagcgtcggcattggtgtgccctacccacagcccgcagccgtgctggtagagcctgcggacgatgtcgccccggaaaccgagtccgctcgtctcgtgtacggaacggaagaacaacgggtgatgggtgatgagcaggtccgcgccggtggcgatggccttgtcaatgatggcggaggtcgggtcggcggcgaacacgatgcggtgcacgtcgtggctcagatcgccgacgatgagacccggctcatcccattcctcggcgtagcgcaatgggtacagggtctcgagaacgtcgatgacttgcttgagattcggcatatgtcccattgtagtgggctattgcggcaagggactcattctgcaattgcggacaagccatgctcgtgctcttcattgctcgactatcggctcgctttcgcctacaaacaatccactggactgtttgctcaacggctcagccccctcacccgaggggagctagaaattgtcagtgtgcagcgagttgccagtcggaaccgatgccgcacgatacgtccagcggcacggcaaggtcgacggcgtgttccatggcgttgcgcaccagttcggtgacctggtcgccttctcccggcgcgatttccactaccagttcatcgtgaatctgcagaatgatacggctcttgacgtgggcctctgccaaggtctgctcggcgcgaatcatcgcgatcttcatgatgtcggcggcagatccctgaatcggtgcgttgagtgccgcacgttcggcggcctcacgcgcaacacgattggtcgaatgcagggccgggaagtagcgacgccgtccgaaaatggtttccgtataccccttctctcgggcattggccaccagcgattcaaggtaatcgtgcaccttgccgaaggtatcgaaataccggtttttcaacgcttccgcttcacgtggcgcgatcttgagctgctgggcgagaccatacgtgctcagaccataggccaatccgtagctcatggcttttacgtggctgcgctggtcgccggtgatctggtcgaccggcagcttgtagaccatcgaggccacgtatttgtggaagtcggctccggagcggaacgcttcgatcagcgcctcatcaccggacagatcggccatgatgcgcagctcgacctgtgagtaatcgcagctcatcagggcctcgtacccctcccccggcacgaacacgccgcgaatctcacggccggcggcgttccgattggggatgttctgcaggttcgggtccacggagctcaatcggccggtggccgcgacggtttgctcgaaagtggtgtggatgcgctcatctgatgtattggtggcatcgatcagcgtttgaacgatctgcttgagcttgttgatctctcggtggcgcagcaacgccccgaggaaaccgttggcccgctcattgtccactgatttgacatacagatcctgcaatgcggccgcattcgtggtgtatgagccggacttggtgcgtttggtgggcttcaaacccatatcttcgaacagcaccttctgcaactgcttgggactttgcaggttgatttcggtgccggcatactcccaagccatttcctgcgcctgacgagcctcggcggcaaactggtcacgcatggaaacgagtcgaacgctatcgactttggctcctgtgtgctccatgccgtgcagcacgcgggaaacaggaagttcaatcgcgcgcatcagccagcattgttcacgctcgtcgataatcggcccaagcgtgacggcgaggctgcggataatggccaaatcgcgcagacgatgttcgttcggatcttcttcgacctgatcgtcatcgaagtccaacgtgccttgcgaaggctgttcggtttcggtgaagtggatgtcgaggaagtgctcggccgcctgcttgaggctatcggcgtggaaatccggttgggccagatacccggcaagcttggtgtcgaacatcggcaggtccatgtcaagatctaccgcgcccagaagatgcagcaactctttatacccatgcacgatggtgcgggagtgctcgctttccaggaaccgcgcaagctgtgctcgcagggtatcggtgattggaaggggcactatggccgctgatgttgccgtggccacggcaatggtttgtgccgtggcacgccccggcctttcgtcgccccatgcggccacggtccaagcgcggccgaccgcgtcgccgcagacggtatgccgctgcgatccatcgccatagtcggaaaccgtgaaatcggcgatttcaccgggaacattgatctcgacgcgatgggccttgacccattcgtcgaactgctccgaagaggtgatgctcgtgggttccggcaggttcagatcgagactgttatcctgctcgtcctgttcattattcgtagactcgccggctccgtatgtgttggaaaccttggcaccggtattgaaggttttcagcacgcgactcctggtacgcggtccgaattcaagctccttgaacagggcgtcgatttgtgccacgtccacggtgccgaatgtcagatcctcaatatcgacgccaagatcgacatctcgtaccagtgcgttgactttgcgattgagcttgacctggtcgatattggcccgcagtgattcgccttttttgccgccgatttcatcggcgtgctcgcaaatgccgtcgagggaaccgaattggttgatccacttggccgcaaagccatcgcctacaccgggcacaccgggaatattgtcggcggtttcgccgcggagcgccgccagatccggatattgtgcgggagtgactttgtatttgtcgatgatggactgcggcgtcatatgcttcaggtctttgaagtgatgacccgggtacaacacggtgacgttgtcatccaccagctggaaggcgtctcggtctccggacaataccagtgtgtggtagccggccttgtctcccatggtggcgagggtggcgatcacgtcgtcgccttcgaatcccggcttctcgatgtaggtgacgccgagggccgtgagcatgcgttgaatcaatggcagctgggtgagcagctcttcgggagccgcctcacgggtgcctttgtattgcggaagcatctcattgcggaatgtgccgcccttcacatcgaaggcgacgcccagatggtcggggttctccgcatcgatcacctgcgcgagcatggtggcaaaaccccagacggcgttggtggcctggccgctggaagtactgaagttgtcgaccggcagggcgaaaaatgcacggaaggccagcgagtggccgtccaccaccagcaatgtttcattggtgggtacggtcacgctggcctctcccatagtgtgtttgtgttgctttacgactcagcacggtgatgccgataatcagcgttcgcccgaatcagaaggcttcggatcgccgtacttggcgatgatggcctgagccaggcgcttcttggggatgcgctggtccatggaggtcttctgaatccaacggaaggcaccctgctcggagaagtcagccttgtccatcagcagacccttggcgcggtcgacgagcttgcgctcctcaagcgtgtcttcggccttcttgagcttctcttcggtttccttgagctggtcggtggtttccttgagtttgcgttcgctgcgctccacgttgtccagcagatcgttgatctcggcgaaacggcccatggccacctcgagggtcggcagcaacttggattcctcgtacggcttggtgacgtatgccatggcgccggcaccggtggccttcttcaccagatcggtctgggagaatgcggtgagcatgacgacaggggcgatgttctcatcgcagataatgccggcagcggcgatgccgtccatacgcggcatcttgacatccatgcacaccacatcagggcgatacttgcgggtcagttccacggcttcctcgccgttggcggcctgaccaacgacctcataaccgttgtcttccagcatggcgaccagatccatgcggttcacggcttcatcctcggccacgacgacggtacgcggaccatcctcggccacggccttgcgctcagcaggttcgctttcatcggctacggccttgagttcttcgtcggtcagcacctcatcgacgttgatactcggttcttcggacttcttccttgcagccatgccaacctctttcttgaattacccaacaatggggttcgtaataatttcagcgaactcctagctaaagtgccctcggtgggactcgaacccacactgcgcagattttgaggctgcttcctctaccaattgggatacgagggcgtgcctaagcactctgaagagagtagcataccgattcgactcctgcgacacaagacacgcgccagtcctccattcccccggtaaaacaggcgaaacacgtcgatatcgtggacggcgtacccgtgtgttgcccgttcttctgcgtggtttcaccgcttacaatgggctgtagtttcgatgtatcgcttttgttaggagggcttatgagcaacgaaacttaccgtcagttcgatccctggcgcccctctccggtcaaggagatttcccgtagacagattgtggagacgcattatttcaatgtcgatcacgtctcctatgagtcgaatcagatcggttcgtttgaacgctactttgttcaggagaacaatggcgacactgtggctgtgctggccgtcaccgatgacggcatgattccgctggtcgagcagtatcgcatcgccaaccatcgttggacgttggagattccggcaggccacgccaacaacccgtccgaacgcccgaccgatgtggctaagcgcaagctggccgaagaggctggtttcgatgcctccaagcttacgcagttcacccgttttatgaacacgccgagctattccacccagcacaccgcaatcttcttcgccaccggacttaccccggcttcccgtcaggaaatcggcccggagactccgcgttccgacgtgcgtatggtgtcggtggacgatgcctatgagatggtggtcaatggcacgattgtggatgccaagaccatggtcgccattctgcgtctgaagagcggcacgctcgatcatctcaacgactagtcaccacgctcgatcatcgcggtgactacgtgccattgcaatcaccgcacaatcgcaacataacggataacgaaagcccccatccactttctggatgggggggctttcgcgtgctatgtgctagctgtcagcagctaccagcggcctgaaatcagtcgcaagcgccaacggtgtgcacgtagatggagtcggtgcggcccggctggtgatcgccctgagcagagctcaggatgacgatcttgtcgccgtcagcaaccttgccggcgtccttgaggatcttgtccgtgtagatcatcagatccttgcgggacttgtcgtggtagtcctccttgagcaggaaggcttcggtgccccaggacagagccagccagtggtaggtgtgctcgttgctggtcaggccgtagatcggggcggccggacgctcacgggagacgcggtgcacggtggcgccggtctgggtgtaagcaacgatagccttggcgttgagcttgtcggccaggtccacggcggcggaggagacggcgccggtggaggacatgtcgaggttcttgagctccgggatgcggtcgaagccgtggtcggtggcgtagccggagatgcgcgacatggtggccacggtcacatccgggtacttgccgacggcggtctcgttggaggtcatggtggcgtcggagccgtcgaggacggcgttggcgcagtcggaggcctctgcacgggtcgggaccggggagttcaccatggagccgaggacttcggtggccacgatgaccggcttggcatactggcgggccagctcgatgatgcgcttggtggccagcgggacctcttccagcgggcactcaacggccatgtcgccacgggcggccatgacaccgtcgaaggtcttgacgatctcttcgaggttctccagagcctgcggcttctcgatcttggcaacgatcgggatgcgacggccttcctcgtccatgatctcgtgggcgcggtcgatgtcggtggcgaaacgcacgaaggacatggcgatgatgtcggcaccggtgcggatggcccaacgcaggtcagcctcatccttctcggtcagagccggcagggagacggcgacgcccggcaggttgatgcccttgtgggaggacacaggaccggccacgacgaccttggtgtacacgttgttgccctcgaccttggtgacctcaagacgaaccttaccgtcatcgatcaggatcgggtcgcccgggtggcaatcgcccggcaggcccttgaaggtggtggaggtgatgtgctcgtcgccctcgacgtcatcagtggtgatgacgaattcctggccgagctgcagctgaaccttgtcttcgccatcggcgttcttcttgaaccaaccgcagcgaatcttcgggccctgcaaatcaacaagcgcggcaacgttgcgaccagtggcttcgctggccttgcgcacgttgttgtagaccttgaggtgatcctcgggggtgccgtgggagcggttcagacgagcaacgtccataccagcttcaacgagcttcaggaggttgtcgtaatcctcggtggaagggccgatggtgtctacgatcttggctttacgcaggaatgcctgcctattcttgttcaatttggttcgaggcacgattgccccatttgccgaaacccagtctactagcgcgagccgactcatgacaagttttcttcacggtgtgttgtgagcgctcacattgttgtgttgactgggtttaagggttgtattctctaacgatttcaggccttctcggcgctttccatgctcttcatcttgatcacggaagccacggatgcgccgccaattgcgaccacaatcacagccagcgacagccatgtgggcacttccggcacccaatggatgccttcgccgccgttgatgaacggcaaggtattgccgtgcagggcctccatgatgagcttgacgccgatgaagcccagcaccacggacaggccggcaggcaggtagacgagcttgtcgagcagagcacccagcaggaagtacagctgctgcaggccgagcagggcgaacacgttggaggtgaacaccaggaacggatccttggtcaggccgaagatcgcgggaatcgagtcgaaggcaaacatgacgtcggtggtgccgatggtcaggaacacgatgagcatcggggtccagtaacgcacgccgttcttggtggtgcgcagcttctcgccgtcgtagtcgtcggtgatcttgatgatcttgcgcagattacggatgatgccgttttcgtgatattcctcgtcctcatcgccgccgagcaccagtttgacggcggtgtagatcaggaaggcgccgaacaggaagaacacccatgtgaagcgggtgatcagggccgcgccgatcagaatgaaaatgccacggaagatcaaagcaatggtgatgccgatggacagcacatacttctgaatctgcttgggcaccgcgaagttcgacatgataatgacgaacacgaacagattgtcgatggacaacgagtattcggtgagccagccggaatagaactcgatggcgggcttggagccggcgaagaaccagatgcatccgccgaagatcagcgccatgaccacgaagaaggcgatatgctgcacgcattccttggtggagggcacatgcggtcggcgcccgatgacgaacaggtcgacgatgaagaacagcgcgagcaccacgaaggtgatgatttcaaatgcgagtggggtttctgccatgattccctacactaacccatgtatgtgacgggtcatcgccccgcctcggtcatctgccggagctccttcttgagatcacggatctcgtcgcgcagacgggccgcaagctcgaactggagttgttcggcggcggtgtgcatctgttcggacagctggcgaatcaggtcggcgaggtcctgcgcgggcaggccggccttcaggatctcctcgtggcgtttgtctgcctcgttgggatcaagtaccggcacgcccaggtgtgtgttgccggccttgcccacgttgcggtagccaccttcaagcaaggtctgggtgtccacatcctccttggcgagcatgtcgttgacgtcgctgatcttcttgatcaggggcttgggatcgatgccgtgttcctggttgtaggcaatctgcttggcgcggcggcggtcggtctcgtcgatcgcctgcctcatggcctcggtggtctcgtcggcgtacatgatcaccacgccggacacgtttcgcgcggcacggccgatggtctggatgagcgaacgataggagcgcaggaatccttccttgtcggcgtcgaggatcgccaccagcgatacttccggcaaatcgaggccctcacgcagcaggttgatgccgacaatcacatcgatcttgccttcgcgcaacatgcgcagcagttcgacgcggcgcaacgtatccacatcggaatgcaggtattcgaccttgatgccgcgttccagcagatagtcggtcaaatcctcggccatcttcttggtcagggtggtcaccagcgcacgctcgttcctggccacacgggccttgatctcggcgagcagatcgtcgatctgccccttgaccgggcgcacgtcgatcttcggatcgagcaggccggtcggacggatgatctgttcgaccaccccgtcggacaagcccaactcgtagtcgccgggcgtggcggacagatacacggtctggccgacgcgctgcaggaactccggccatttgagcggtcggttatccatcgcggagggcagacggaagccgtgttcgaccagcgtgcgcttgcgggaggcatcgccctcgtacatggcaccgatctgcggcacggtgacgtgtgattcgtcaatgaccagcaggaagtcatcggggaagaagtcgagcagcgtgtgcggtggggtgccggcggcgcggccgtcgaagtggcgcgaatagttttcgacgcccgagcacacgcccacctgggtgagcatttccagatcgtaggtggtgcgcatgttgaggcgctgcgcttccagctccttgccttgcttacgcagttctgccaggcgttcgtcgagttcctcgcgaatggttttgagcgcgcgttccatgcgttcggggccggccacgtaatgggaggccgggaagatgtggatttcgttttcctcgtcgatctcgtcgccggtcagcgggtgcagcgtggagatgcggtcgatctcgtcgccgaagaattcgatgcgcacggccagttcctcgtagacggggatgatttcgaccgtatcgccgcgcacgcggaaggtgccgcgcgtgaaggcgatgtcgttgcgcttgtactgcatggccacgaaccggcgcagcaggtcgtcgcgattgatctgctggccttccttgagaaacagcatacgcccggcgtattcctcaggagtgcccaggccgtagatgcaggagacggtggccacgaccacgcagtcgcgtctggtcagcaggttggccgtggcctgatggcgcaaacgttccacatcgtcgttgatgttggagtctttctcgatataggtgtcggtctgcggtatgtaggcctccggctgatagtagtcgtagtaggaaacgaaatagctcaccgcgttgtcgggcatgagctcgcggaattcggcgcacagctgcgcggcgagcgtcttgttcggctcgatgatgagcgtgggacgttgcagccgttcgatcagccatgcggtggtggcggttttgccggtgccggtggcgcccatgagcaccacgtcgttctcgccgttctcgatgcgcgtggccagttcctcgatggccttcggctggtctccggatggttggtacggcgatttgaccacaaacggcttgtccacacgttcgatgttgaatcccatgcgctgtttcctcccgattcacgctgtatcccgatgatatatcggaatatacgctaggcaactccaatacccgtcttcctcttggacgcgcagccaaccaccgctccgcgtaattgattgacgcagatgagacattccaaatcccatgcccaatgttctcggagattccgccaatgctccatccgccatcttggcgggaacgtcagccaccgatacgtacagtccgtcttgccgcacttgtatggcgagcacatacccttgttcgcgatccgcgtgcttggcgatattggcaaacgtctcttccagcaacgaccgcgtcaactggatagtcttctcgtcaaaccgactcaggagatcgaagggatcggacataaccacctcgcctcggaaaccaagcgctgcgagttcccgccggtgtcgttcgatctcggcctcgaatcgacctgcaccgatcggaacgatggcttctccggagcgacgcgcatggcatcgcgggattcgcgcagtaccgacattgtgctttgcgagaaccgctatgacatcatgcgtctgatcgagcgcccgttgagccacttcgcgcaacagcggcaagtccatcgactctccttgcgaagggtgttccgacatgatcctgtcgatgctcatgatgagatatgagagatcattggtcgtcgcatcatgcagccttgccgccaaatccaacgattcggccctgccacgcgcttccgactccctctccccctcacgatgatgccaattcagcagcagaccgattccaacgcacgccaacgccggcatgacggtccaaggcacaacggacaccaacgccccggcatcccaatccatcggcaacccatactgccatatcagctgcgccacgcgagatacggtcacagccaccgccaacaccacgccgcaccatatgcgttgataggagaggacgattaatggctcggctatcaccacgctcaccgacatggacagatccaccggcaagggaaacaccacgcaccatgagatcgccaacgcgatattgccgccgaacgggaatgccacgcagagcaacgacaggatgacgaacaacagacccacccacagggcccacgcatcccaaaccggattgatacacgattcgatgaccgtatcagcggctatgcacaaggcgcaggctagcgccgcgatcttttcgccatgccaagacttcccgaaatcgcggaagcgacgtctaagaaaacggctgccgtcacagaacatggtatcgctcacagtaatcaaggagttcgccgcgcctcgtcaccccgaccttgcgcatggctcgtttcacatagctgtacacagtttcgacaccgattcccaagcggcgcgcaatttcaacggtcggtacatgatgtgcatagagacgcaacaccgccagctctcgatcggagaagagcctggcaccatccgcttccggctgtgcggcatccaccgtatgcaatgtctcttcaaggctatgcaaaccccaaccatgagggtatgttcccccgtcaaacaccgatttgaccgcctcgcgtatggtcgctgcgaaatctcttttcgaaatcaacgcttgggctccgcaacacgcgatatcctcaccataggttgccaggtcatacgaagtgactacaatgacgccaacctgcacgttccgctgtcgaatacgttccgtcagctgcactccgttcagcccgtccatcatgagatcgcaaataaggatgtccggcttccgcggatcgaacagacaacgttccaaggcaagactgggattatccgtaacccatagcatatgcgcctcgggaatcgtcctgccaataagcaaagccatcatctccgcagagcaacgatcgttgtccaccaaggcaagccgaatcaggcgcccgttcttcataagtacccctccccaaatcgcctccgtcaaacgaaatcgtaacactgtgacgattcccgtcacacagacttcgttcgctcctcattggcgtcttaccgtgttatatgcggcaaaacagccgcgcaataatgtgcggcgagcgaacttcctatcgtccgccgcacaaacacattgttaccgggaataaggtgtatcatgcactggacttataaaatcgccagtatattggccgtggctctcatcactctcgcagcaggattctatgcgcagaataacgaagaaacctatccctccggccctagctacgatattggaatttccgacgcgcacgggcagcctctatcgacattgaccggtctcgcagcgacccatcatgtcgtactcgcgagagtctcctatgagccggacggtcacggtaccaacagacgcgtaatttctattttcggcgcattagacggcaacggcatgcatgcgaattcgccatacccggattatgggttcgggccgcgcacacgtgtgcaacgcggagacagattcaccgacccattgggaagatggcttctctatggatcaccacgggataccgcttcagtagccaaatccatacggcgccaaggattcgaacttaacagagcaacccccatcggcatcacacaaatcaccaaacaattcttctccaattccatcgcccaagtcatattcgccggacttgctgtagtatttgtgtccggcgcgctttccgtgtcggcagcttcacgcgtttgcgcgatacaagccttgcatggcatgagaacaaccggcattattatgaggcaattcctgcggcatgcgttctttttcatcatctgcgtctgcatcggatggatgacttggatttccattggtgcgatcttctggcctttcgcttctcccttaggattcgccggtcaggtattcctctccatcatcatcgccacaacgtgcatggcattggttgccttgtcattgtcgattgctctagtaagggttctggtgccgaacgcactcaaattaatccaaggaaagcgccctttacgttttctcatggcttccggctgcatcatggcaatcatcgttctcgctctcagctctgccagtttgaacgttacgaacttcaaatggcggcaatcccaaacactgaaaacaacattggagcatcaattgtcatccaacgacggattccaattgcaactgtggtatagcagcgatcaaaaccgagcccgttccatgccctcatggaacgacttcgtcgaacaaacttcccaatcagaacatacgcgattcgcctcattccgggtaggatgcacgtgggtggatagctcgcaagacccacagccctgcatcctcatggattcccgtacggcaaggcttcatcatcttatacgaaacaacacgacacttgcacgaatcagtgtgattatgcccgagaatgaacaatggaacagcgaatccattacgaacaatgtgcttcgcgcatactcattcgagcaaagtttggcggcagaagagggaaagagtctgcccgccatcaatcgcacgagcatctccattgaatccagaccaagagatgctgtcttatcggcatttgacaccccttccaacaccgatggcctttcctctgttcctgttgttgtcattgacccgtcactgctctctggcgataccactacatcgatggtgtccaccggcggcatgaccttcgattacagctcccgccatcagctgctcgaaatcctacgggaaaagggcgtggactctttggtggcttcggtcgtcaatcggcacgacgagatacaaactcgtttggcacgaacaactcaggaaatgaactatttttccatcacagcttgcatatccataacatgtctgctgggcggcgcaatcatggtggctttgacactatgcacactccgacgtcaaattatgttcgtggaatatatgcatggagcgccgtcatatctccgttttcaatcgatactgttcctagcagcggcgttatgcagtgcatctcttccgatccagttgctcataggaggttacaacgccgtttccacgacctcggtttccttactattcatcgtcgtttctctggcaaccacaatgctttacgattcgcggctgcgcgccgacagtatcaaacatccctgatcgccatccacaaacctgtatcagcaaccgcttaccacgtaaggaacatcaatcatgagcgccttattgatcacgcataatctgacatatcgaatcgacgaccgcaccttatgggaaggactgaacctaacgttcagtcccggtgacatggttgccctgaccggagaaagcggatgtggcaaaaccactttgttgaatgtcctaggtcttttggaagagccaagttcaggaacaattacctatgatgggcaaacaattgcctccagaaagggccgacggctcatgcaccgcaacgtcatgggattcatgttccagaattacgccctggtggagcaatggacggtgaacagaaatctgattctggctctgcgcagcgtcggaataccatcggcagatagaagtcggctcatcagacgcgcattgcgggccgtgaatctgacgggctacggcaatagacctatctacacactcagtggaggcgaacaacaacgagtcgcaatcgcgaggcttctcatccgtcaatcgctgcgcgtcatactggcggacgagccaacagcggccctcgatgccgacaaccgcgccatggtcatgcgtcacctgcgtgatttcgccgacaacggagcgatcgtgatctacacgacgcacaacgaggagaccgcggccctcgccgaccgcatcatcgcattatgattccgccagccactgttcgtacagcgcatcgacggcttcgagcattcgacccatcggctgcgtggaatcgatcaccgcgtcggctatgacacggcgttgttccgggctggactggtggcgaatgcgcgcaagcgcatcatctcgcgtcatgccgcgggtcgacaccattctgtcgacccgcacttgttcgggcgcttcgacggtgacgatatggtcgaatcgcatgggcatggcgtccaggacttccgccaacagcggaacatcatgcacgaccatggcatccggattgtccgcgaccgcctgccgctcccgcgacagcgcaagatcatagatcaacggatgctcgatatcgtccagtttcctccgcatccgttccgagtcgggcccggcgaacacgtgctcggcgatccatcgccggttgagccgcccctgatcggtcagcgcgtcggggccgaaacattccgctatacgacgaagaccgacgccgcccggttccaccactcggcgcgcgagctcgtcatagtcgataagcgccgcgccgagctcccgcagtcttgcggacaccgtgcttttgcccgccgcaataccaccggtcaatcctattcgaatcatgctcccccatcatggccatgtttcgaggttcatgcacacaacggcaaaacccggcccgccgaagcgagaccgggttttgactatacgccaggcgtcaatcgcccgatggcgaactcacttgccgagcagctggtcgcgcagggcggcgagctgatcggagtcggcgagggtaccggtagccggagcagcggaagagtagttggaggtctcctcgaccggcttctcttccttcgggccctggccgtcggcggctgcggattcggcagcgttctccagctccttggccacgaactccttgtgctcctcccacagctcgtgggcggcggcgtactgggactcccactcctcgcgctgcttctcgtaaccagcgatccactcgttggtgttcgggtcgaagccttcggggtacttgtagttgccctgctcgtcgtactcggccggcatgccgtagatggccggatcgaagtcctcggaagccgggtcgacggagtcgttggcctgcttgagggacagggagatgcggcgacgatcgaggtcgacgtcgatcaccttgacgaacacggcctcgcccggcttgaccacggtctccgggttctcgacgtgacggttggcgagctcggagatgtgcaccaggccctcgatgccgtcctcgacggagatgaagacaccgaactggacgatcttggtgaccttgcccttgacgatctggccgggaacgtgggtgcgagcgaagcgctgccacggatcctcctgagtcgccttcagggacagggagatacgctcacggtcgagatcgacgtcgagcacctcgacggtgaccttgtcgccgaccttgacgacctcagacgggtggtcgatgtgcttccaggacagctcggaaacgtggatcaggccgtcaacaccgccgagatcgacgaaagcgccgaagttgacgatggaggacaccacgccctcacggatctggccctttttgagctgggacaggaaggtctcgcggacctcggactgggtctcctcgaggtactggcggcgggacaggaccacgttgttgcggttcttgtcgagctcaaggatcttggccttgatcttctggccgatgtacggggagaggtcgcggacgcgacgcatctcgacgagggaggcaggcaggaagccacgcagaccgatgtcgacgatgaggccgcccttgacggcttcgatgacggtgccctcaacgacgccgtcagcttccttgatcttttcgatgtcgccccaggcgcgctcgtactgggcacgcttcttggacagaatcagacggccttccttgtcttccttggtgacgacaagggcctcgatggcgtcgccgacctcgacgacttcgtcaggatcaacgtccttcttgatggaaagctcgcgggaggggatgacaccctcggtcttgtagccgatgtccaggaggacttcgtcgtgatcgatcttgacgacggtgccctcaaccagatcaccatcatcgaagttcttgatggtggaatcgactgccttgatgaagtcctcttcggtgccgatgtcgttgatggcaaccttggcgacttcagtgttgttctctgccatgtaaatatatggtttctaatagtggatggataatttctcgatattcagttatacgcacacccttacaggcatacagatattcacaatacaagcaactctgcccaaatttcctaggaaactctaggcgtgtcgttcggccatttccacgacgttggccaggagcatggctcgggtcatggggcccacgcctccggggttgggggtgtaggcggaggccttgtcgtagcaggccttgtccacgtcgcccttgatgcggtagcgaccggcttcttcgtcgtagacgcggctgacgcccacgtcgaccagcacggcgccgtccttgatcttgtcgggcgtcacgaatccggccgaacccattgcggcgacgatcacgtcggcgcggcgcatgtggtcggccacatcccgggtaccggtgtggcacagggtgacggtggcgttgacggcgttgcgcgtgagcatcaggccaatcgtgcggccaatggtgatgccgcggccaagcacgcacacttccttgccgttcagatcaatgtcataggcgtcgagcagctcgagcaccccgcgcggagtgcaaggcagcggtgtcgaaatgtcgccgcgcacatgcagcaccagttcgccgaggttgtacgggtgcatgccgtcggcatccttggccgggtcgatcatgtcgatgatcgcgttctcgttgatgcccttgggcaacggcaactggacgatgaacccggtgcaggccggatcttcgttgagttcgcgtacggcagcggcgatgtcgtcgaagctggcgtccgccggcagttccttcttgactgaggtaatgcccacttcctgacaatcggcgtgcttgccggccacgtacttcatcgacccggggtcctcgcccaccagcagcgtgcccagccctggttggatgccctgcgccttgagcttgttcactcgctcggcaaggttggtcttgatttcggccgcaatccgcttaccgtcgatttttgtggacatcaacgccctcccccgtagtttcggtgcattctatcgaaacgataggctatcgttggaacaagtcaggattatatatcgttcgctctcacgaagaaggcgtgccatggggactcaaatcacacgacttacgcgactcgccgcagccggcctgagcgccgtcctgttgttcgcgaccgccgcatgcgcagccacctcccccactgaaaccgagccggacaacaagaccagtgttcccgcaccgaccgggccgatcaatgtggtcgcctccctcaatcaatggggctcgctggccgccgagctgggcggcgatgatgtggaagtcacgtccatcgtgaactccaccaatgtggatgcccacgatttcgagccaaagatctcggacgtcgccaagctgtccaaggcacaaatcatcgtggccaacggtgcgggctacgattcctgggccaccaaatcgatgaccaagaccacgaatatcgtatccgccgcttccgtcatgggtgccatggaaggcgataacccgcatctgtggttctccaaagacgctcgatccagcatggccacggccatcaccgatgcatatgtaaaggcgctccccagcaagaagaaggccttccagaagcggctcaaggcatggcaggcggatgagaaatcgctggaaacatgggcgtccgagttcaccagatcccactccgacctcacctatgcagccaccgaacccgtggtctattatctgatggccgatctcgggttcaagaatcagacgcccaaggggtatacgcaatcgaccgcttccggcggcgaaccggcccccgcggacctgcagtctttccagaaactcatcgaagacaagggcgtggatgtgctggttaacaacacgcaggaagccagtgacgcgaccaatatgatcactggcgctgccggtcgtgccgatgtgccggtagtcgacgtctccgaacaaatgcccaaggataccgacacgctgaacgcctggatcaaccagctcatcaacaccatcatcgacgcggtggatccgagctatggctgcgaagacgccacggacggcaacgcgaattccgatgattccagcgccgacggcgccgccacggatgatgccaatgcgcacgattccaaggccagcaccggttccagcacggagcccaagtacatccgtcagtgcaaggcggccacatccagtgattcgtctcaggattcggcaaaggccgatgcctccaatggcgattccggcgatgcctccggcaacgaccagaccgactccggcaaatagttagaagcaaaggacagcggcatcggattcatgcaatgccgatagacgccttgcacgagaagggttgtgcgaccattgtcgagatggccgcacaacccttttctttggttgtcaccatccgtacacgatattgagaacgattgtcagcatcgtttgccacaatcgggcgttatgagtgaaacttccgattgcatcgtgttcagcgatgccgccatcaagcgtggtgaccatatcatctggcagcatggcacctttgccattcccaccggttcggtcacggccatcgtcggcaccaacggcaccggcaaaaccacgatgatgagggccgagctgggacttttgccgctttgccatggcagcctgaccgtactgggcaagcctgcgggcgagatgaacaaacgcatcggatatgtgccgcagagctatgtggcgaatgtcgattccaatctcaccgccgaacaatccgtgttgctgggcctgaccggcacccgattcggcatccaccccatcaccaaggcccagaaagccaaagcgctcgaggcgatggagttcaccggcatcgccgacaaggcgcagtaccgtctgtccgaactgtccggcggtttgcgccagcgtgtggccatcgcccaggcgttggtgtgcgatccacaactgctgatgcttgacgagccgttggccaacctcgatctggccagtcaacgcgccaccgtacacgtgctggccaagctgaaccgtgaactgaacatgaccatccaggtggttgcgcacgatctcaatatgctcttgccgattctgaccggtgccgtctacttgctcgacgggcacccgcactacgccgatatgcacaaagtgctcgactccgacctactcacccacctctacggcacacaggtgcaggtggtcaccactccgcagggtgacatgttcgtgaccccgacgccggatgagccccaggaccagccgcaggatatgcacacggcagccgaagtggcgcaattgcaccatcacgagcacggcaacgccaccaatggcagtgccgccaacagcgccgagaatcgataacatcaagctagccgatccacagcccgtcaacgggctgcagctcaggcatggagaaaatacagggacatgagcaccatcaacttttcgtatgatcccgaatggctggacacactgtccgctccattcatgaccaacgccttcatcgccggcctgtgcattgccctggccgccggtgtcatgggatacttcaccatcgcccgtcgttccaccttcgcggcccatgcgctggcccatatcggtctgccgggcgcgaccggcgcggtgttgctcggcctgcccgtatcactgggcatgggcgtgttcgcactgggcggcgcactggtgatcggtgctttgggcaagcgcgtttccgagcgtgaaatcgcaaccggcaccgtactggccttcgccaccggcttgggtctgttcttcgcgcgattgtcgagttccgcctcccagcagatgcagtcgatcctcttcggctcgatcctgaccatcaccaccggccagatcatcggcttcgccgtgttcgacgtattgctgctggcattgttggccatcatctaccgcccgctgctgttcagctcgttggatgagcaggtggcacaggccaagggtgtgccgatcgggctgatgaacgtggcgtttatggcgattatggccggtgtaatcaccattgccgtgccggcagtgggcaccttgctgattttcgcgctggtgatcacgcctgcggccaccgccaatattctggccggctccccattcaaggcgatggtgatcgccagcgtgctgtgcctggtgtcgatttgggccggactcgtgctgtcggcgatgttccccgcccccccgagcttcattatcgtgacgctttccaccctgttctgggctatcgccaaggccgtggagacagtgcggaagtaatctcattcatttttcttgccccccgctggcaaattcatagcgggggctttgttatatcttctccaccaaggcattggcgatggcggcgatgccttcgccgcggccagtgaatcccatatggtcggtggtggtggcggtaaccgataccgggcaaccaaccgccgcagacagggcggcttcggcttcagcacggcgtgtgccgattttcgggcggttgccgatgatcgccaccgaggccgatgccggcgtatacccgttggatgccagatgcgccacaacttcttgcagcatatcgatgccatgccttccggcaccatgcgcgtccgcaccgacaccgaacagtgaaccaatgtctcccaatcgggcggcggcaagcaacgcgtcaatcagggcgtgcgcggccacatcgccatcggaatcgccttcgataccctcgtatttggcggcatcggcctcgctgcatgaatcagacgccggccagtaaagcccggcaatccacagttcacggcctgagccggcaggcgcaaaacggtgagcgtcaaaaccctgccctatcaacactcctgcagaccccatgcagtccccttcgatggcgctacccagacgaacggcagcaaacgattatgaatcacgaagccccggcgtatcgcataaggacacgaccggggcctcaacaatcaaatcacttcttcttggacttcttctcggcttcgacacgagccaaagtatcggccgcggcctcttcgggctcggcggtgtgatgcttgtcgtcaccgggttgagcgggctcgtagcccaggttcacgtcgagcagacgctgggcttccgcctcgtcgatcttctcggacaaggcgatctcagaagtcagaatggcgcgggccttggtgagcatacgcttctcgcctgcggacaggccgtgctcgtcgacatcgcgctgggcgagatcgcgaaccacttcggcgatcttgttgacgtcaccggtggcgatcttttcgacgttcagcttgtaacggcgagaccagttcatctctttctcgatgatcggggtccgcaggatgccgaacaccttggccacttcggatgcggagacgatgtcacgcacgccgaccttcctggcattgtccacgggaacgttgatgaccaaaccatcggaagagagtacggacagctgcagatattcgcgcgtcactcccttgaccgtccgctcggtaatggcctccaccttcgctgcaccatgacgcggatagacgaccatatcgccgactttgtaagacatgtaccctccgagaactgacggcttacacacaaaaactcgaataattatgccatgcggtctggaccgcccctatgagagcgctcacaaccacggagacacaccgaaaagggcaagaattcgccattttcgacgcgccaatgtagcgttttcgactccaacgcacgtagactttgggtcatggctaaagaaacgaagatcaaggaagataccgtcaccgtgcctgtcgcccaaggcgacctcgatgcggtgagcaatgctgaattctacaacccccacggagttctcggcgggcatctcggcatcggcaagcatgccgacaccgccacaatccgtgtgctgcgtccgcttgccaagtccgtgaccatcctcacccaggatggcgaatacccgatgacccacgaatacaacggcgtgttcgtggctaccgtgccggcctccggcaccaagaagcagcccacgattcccgactaccgcgtcaggaccgagtgggaaagcggcgcagtgctcattgaggacgacccataccgttatatgcccacagtcggtgacatggacacctatctgttcggcgagggccgtcacgagaagctctgggaggcgcttggcgcgcacgtgctgcgctatgacgatccgatgggcggcgtggacggcacgcctggcgaacaggtggtaggcaccgcgttctccgtgtgggccccgaacgcccatgccgtgcgcgtggtcggtaacttcaacgcctgggatggccgtcgtcatgccatgcgcgagctcggctcctccggcgtgtgggagatcttcattcccggcatcggcgcgggcgagacctacaagttccagatcctgaacgccaattacacgtgggagatgaaggctgacccgatggagcgtcagcacgaggttccgccgcacaccgcctccatcgtcaccgaatccacctacgagtggaacgatgacgcctggatgcagcaccgccgcaccaccaacccgcatgatggcccggtctccatctatgaggttcacgccggcagctggaagcagggactgacctaccgcgacctggccaagcagctcgtggactatgtcaagcaggaaggcttcacccacgtggagttcatgccactggcacagcacccgttctccggctcctggggctatcaggtcaccggctactatgcggtggattcccgcctcggctcccccgacgacttccgttacctggtcgatcggttccatcaggccggcatcggcgtgatcatggactgggtgcccgcccacttcccgaaggatgccttcgcactcggccgcttcgacggcaccccgctgtacgaggacccggacccgctgcgcggcgaacaccccgaatggggcacctatgtgttcaacttcggacgccgcgaagtacgcaacttcctggtggccaacgccctgttctggctcgaggacctgcatgtcgatgcgctgcgcgtggatgccgtcagctccatgctctacctcgactacagccgcgaacccggccattggcgtccgaacatctacggcggacgcgaaaacctggaggccatcgacttcctcaaggaagccaccgccaccgcgtacaagaacaaccccggcgtcatgatgatcgccgaggagtccaccgcatggccgggcatcaccgcccccacctccgccggcggcatcggcttcggtatgaagtggaacatgggatggatgcacgacaccctcgagtatctgcacgaggagcccatcaatcgcaagtggcaccacaacgaaatcaccttctccatggtgtacgcctactccgaacactacgtattgcccatcagccacgacgaagtcgtgtacggcaagggctccctgtacggcaagatgccgggcgatggctggcagaagctagccggcgtgcgttcgatgttcgcctatcagtgggctcacccgggcaagaagctctccttcatgggcaacgagctggcccagtggggcgagtgggatcacgacgcctccatcgattgggattgcctgaactggcaggagcaccgtcaggtccagaccatggtcgccgacctcaacgccttctacaaggcgcatccggcactttggagccaggacttcgatccggccggcttccagtggctgaccagcgacgatgccgaccacaacacgctgagcttcctgcgcatcggcaccaagggcgagaccttggccgtggtggtcaacttctccggtgaagcctggcccgattaccaggtggcgctgcccaccggcggcaagtggaccgaagtgttcaccaccgatgacgccaagtacggcggctccgacatccacaacggcaccttcgaagcggtcgagggcgaatatcattcgcgtccgttctcggcgaagatcaccgttccggctctgggagttgtattcttgaagccggaagactgaactggtcaacaggctgaaaggtaaccggtttatttatgctcaataccacagcgcgtcagaatacgacaccgcgcatggtgctggtggtcgaggacgagcccacactcgccacggccattgcccagcgcatcaccgctgaaggatggaccgctcgcgtggccggggacggcgcttccgccgtccaggccgcgtcccagctacgccccgatctggtaatcatggacatcatgctgccggtcatggatggtcttgaggccaccaaacgcatcgtcgccgaacgtccggtgccggtgctgatcctcaccgcacgtgatgacgaggccgacaaggtcatcggtctgggagcgggcgccgatgattacatgaccaaaccgttctccatgcgcgagctcatcgcccgctgcaaggcgctgctacgccgcgtggagcgtgcgaaggtcatcgccaagaattcggagaacgagaagctgctcgacttcggttcgatggtcatagacccggcccagcgcatcgtcaccgtgaacggcgagcaggtgcatctgacccccaccgagttcgatctgctggccacgctggcccgccgcccgaagtcggtgctcacccgcgaaaagctgctcgaagaggtctgggactgggtcgacgcatccggcacccgcaccgtcgacagccacgtcaaggcgctgcgccataagctcggcgccgataccatccgcaccgtgcacggcgtaggctacgctttcgagccgccgaccgcgtgatggcatccaaaaaacaacagcaatcccggcttgatgcgatgaaacctcgcgtcaagccggttgatttgttctcctctctgaagctggaactcagcgtactgatcgttatcgccactgccatcgcgtttgccatgtgctggttcctcctgaaattcggctggtccggttggatcgccatgccgctgactttggtggtggccttgggcatcacctatttcttctcccgcggcatcaccgctcccttacgccagatgcgcgatgtggccgaagccatggcggatggcgattacacggtccgcgtggatatcgatcaggatcgtcatgacgaggtcggccagctggctcgctcgttcaacgagatggccggcgaactcgaacatgccgataaaatgcgccgcgacatgatagccaatgtgagccatgagctgcgtacgcccgtttccgctttgcaggcgatggtcgagaacatggccgacggcgtcaccgagcccactcccgccaatctggagagcatcctcacccaaacgcagcgtctctccgacctcatcgccttcctgttggatttgagccgtatggaggccggtgcggcgagtctgaatatcgaaaagttcaacttcgccgactttcttgacgagaccatcgagccgttggaaatcgccgatggcggccacgcccacgacatccgcgtcaccgtgccggccgacatctcgatggaaggcgatcaggaccgcctgcgccagctgttcaccaacatcatcgccaacgcactgaagcattcggccgacggcaccaccgtgctggtcgatgcccatgaggatgacagccaaggcaccatcgtgaccaatgtggtgaatttcggctcccagattgcaccgtccgaccgttcggatatcttccggcgctttgtcaaaggcaagacgggtcccggcaccgagtcgggcggcaccggccttggcctgtccatcgcacgttgggcggcccaattgcacggcggcaccgtcaaagtggtcgatgacacgcgaggcgccgatttcgaaatcatcctgcctaaatatcacgtcgccgaacgctgatattgtccgccgtcctaccgtatactgtattcgaacagatgttcgaatacagggtgggaggcacagcatgacacagcaatccaagtcacgaaccatgccgcacgacaccacgctgtttgtcatgcagatggccggcgattccatgatcaatgccggtattcataacggcgatctgctgattgtcgatcgttcgttggcaccagtccccggagatgtggttgcggctgtcatggacgatgaaatcgccatcaagcggctggtttcacgggccggcatcaccatattgcacgccgagaatcctcgatatcccgattacatgccgagcaacggcgcttcgcctgctatctggggcatcgtcaccgatgtcattcacccgttgatatcgtcatcggaccgtcgcgccacggcatccgccaataccagcacgcccaccaccttggtgccggcctgctgaaacacctgaacgcattgccgcacggtggcacctgtggtgacgatgtcatcaatgagaagcaccgcgtcgccatggcctatgagatcacgcttcaccctgacatgaccggtgatacgacgggcacgctgtaccgaagaggtctgctgcacggagcgtgccttggtggaggagctcagggcattgcatggtcgcgcattgacaccgtacccacgcaatgcccctgccaccgatttggccaacggtgccgtatgggcacgccctcttcggcgcattgacgcccgcgatgacggcaccggaaccaccaatacgcgatgccccaagcatgatgatgatattggcgtcttgttcagcagcgacaccatgatgcggccgaaagggccgtcaagctcggtatcgtcgtggtccttccagtcgagaatggcacgacgcgccgctccctggtaaatcgatgcggaccatatacgggctccgccaccaccgtctgtatcccgctcccggcattgtgcgaacaaggcccgacatgccgcacacaatacctcatccggcgcgtcacacccagcgcagccgcgtggaaacagcagattgcaggcctgtgcccacatcgcatgccaccacttgtatacgctcggcctgtccataacgcgtcaccatcaagctggagtatcgaatcgcgcaagcagtgcatccagcagttgtaccgtgtcttgcggattctccacacgaacaccgatcgcaccggcctcaaccgcaggatagtcattacccgtaggcgtcatgcgatcgcccacgaacaccatttcatcggcctgtatgccaagtgtctgcgtcagcttgcgcacggcataggccttatcgatgccgcattcgctgacatccacactggtgtagccgccggccctgacccgcatgtgcggcagatcggccttgaccgcttcgaccagcgcctgtttcttcgtgttatcgcgatcccatgcctgtttggccgctacgggtgcgaactgtcccagagcggagaaggtgatctggctgcccctgttctcgattcgaggcccccatacctgctgttcccacaatcccagttcccgggcatgtcgctcaagactttccgagacagcggccacggtggcttcggacagatcatgcgcatacaccaaggcccattgcgtgccatcccaccggtaataccgggagccggaggcaggcatgacatgcagattgccgcgcctggcattcggggtgagtacatccagcacctgtgaggtgaccaccgccatgccgccccctgagatcagggccaccaccgtatggtcgagcagcgcacagaaccgttcgatcatcgcgggcctcatcggctgttttgagctggccagcgtgttgtccaaatcgaaaccgaacaccttggcgttggagcagacattatcgaaatcaagttcggaccacgaacgtaccaccatttgtcgcgcctccctcgttgacgaatgttcacagccaatgaaccaatcctaacgcatgttgcctccgccatgtcctatggtgggaaccatgcttcagccaccttggaacgcacgaatctaccgcaaccgccacggtcgcggcacacgaaccccgatgttcggcacccgtctgccccgttaccgcactcgcaccggcatgttcgacgatatggtggcggcccaggttcgcaggctcggccaagcgtggccggaactgatacgtccgctccagttcgcggtggaggatgtgccgccttcggatccgacgccttggcagaccgagccgaatatgacgtcccagtgcttccccgccagccacggcattcccgcacgagtcgtgctctaccgtatgccgttgcagaccgaggcacctaccaagctcgaattgcagttggccgtcagggatgagctggtggctcgcatagcggaattgtatgggcgcaggcccgaggaaatcgaccccgattggggcctgtgacagtattgcgggggctgtgccacttcaagtaagacagtggcacggcccccgcagctatatcggcgccgaaacatcatcagaccgatgcttcggcgagcgcgctctacttgacgatggaggaatcgttccgagcccagacatggaccgtggcgggcatcagcgttgaagcgtcgatggcggacaatccggcgatgtccttgtcttgcaacgaatcgtgactgaaacgcgctccccagctcactttcttggatgagtcctccaacatcagcacgaccgcggtgccatgatcgccggaaagtttgccggtctcaatcgtttgcgccgcgttcgcatccagcgtgatttcctcggaggtcaccgaagcaccggcatcatcgtaggcgtgcaaggtgaccgtcctgcgcgcattggacgtattggccagcgtgatggaggcctttactccgtcgggaagggccaaccccgagaattcggatggctcgccggcattgaccaatgcgaaatcggcttggccggagtcaccggagcgtgtggccttgacggagaacgacacggcatcctctgcggtggacatcacgcccaacgccccatcaggagcctctcccaagtcgatcgccgtcaccttatcggcagtgacggtggcatctttggcgggaaccaatcctttgtcggtaatccatgacagcccggtgctggtgtctgccttggcgaacagataagcggtgaccgcatcgccggcagtgatggacggcgccaccgacgcattggaggcggtcggcagcggcagcgcgaaatcagaacccttcggtgtcagaccatccatggtcaccgtacgtaccacggacgcgataggagtctccttgctggaaacggtcacgaacagaccatgctgcccatcgaccgcggcggacagttccatcgaggactccccctcggccggcacagacagcgtggattgtgtggacaatgccattttcccggctgtctcggaaccccagacggcaatgtcgacggtggtcggcttggtggagggattcgagacgatgagctgctgtgtggtaccggtcgtgccgccggagagcaagaacgactggctgagcgaggtcgatacgcaggatgccgccgatacgcctctcacatcgccgtcatcggcccatgatgcgatggtgccgacggtgccggtgccagctgcggcctgcaacatacgggtattgatcaggcgagctccctgatcgatcttctgagcaccggttttcaccgaggaatcgtcggtcggatcggcgtctttcaaagtcacgtcatctgaactggacttttgcccgatcgccgagacagtggcgctgtagacggagccgaacgccgcgtagcgcgcctgtgtgctcagattgccgacagtggcctggaaggcgctgtcgccgtacgtgccggtatcggccaatcctataggtgccgggcagtaggtttcggactgagtcggactaactgtctggtcgatggcattatcggaagcggccaccttgtccacccagatattggggatgggggccatgacgagaacgacgaacagcgcaatcaacaccagcatggtgatcacaccgagcacgatgccgatcgcacgtttgaaaccagaagttgtgttgctcatgcctgctcctccaatccgtaggacggtcgtctgcgaggcatggcgaccaagcagtacaacgccgtgatcacacctaggcatatcagccaggcgtgcctccagacactatgctgtgcacgttgctgccatgaggtatccacctgctgtgaggtgctgctacgcagcgtcagacgatagtagctgccgctatccgtggagaccagggactgggtgccgttcgatgcggcgatattcgcgctcaactgttcatacggcatgtcgttcgaggaatcgccggtctcgggaaccacgtagatgccgccgaatccaagcgcgctgatggccgcgatggcctcttcgtcgggattggacagcagcgaggcacaggcctgggccagctgttcgtcaaccgcatcatgcttgccggacagcaggcgcgcccgctggaccggagagctgtcgatcagatcgccgcgcgaggtgcgcatcaccgcatagttgacgatgttgcgggtctccgcgctcacggcaagcacacgatgatcggcactggcctccagataatcggtggtgaccatgggcaggccgttttcggacacgcccagtcccgcatccttatgacgttcgatgccatacatgcattggatgccgatgcagcacaccagtatcagagcaagcaccacacggccagacacgatgagcgcatgcagacggtcccttttcggtgcgggatcgctgccggacgcatgcaacggttggaatcgcttcaccgccccaccggcgacgaggcacacgcaggcaaggaagcccaatatcatcatcgcgatgccaggctgtgcggaaccggccacgacgccatcggcatccacggctatggccacacggctggaaatcagggcgagcgcgcctccgcaaacgattaccacccacatcagccgcgaggtccgcaacgcgaacggcagcaccagcgaagcaagagcgagcagcgtgatgacgccgaacagcacagtgaccgccaaatcggcataatcggtcgatcccattcgccatcccagcgcacgctgtacggcctcaagcaggctcagcgacgccggcgacccgttggcggatgacgttggcactgtgatgtcgccgaacagttgacgccacatgcccaaatcggcgtaacgcaccgcattgacgagcgtaggggccaccgcaaaggcggcaggaaccggaataagcaacagcatggcgcgcttgcggcgcacgaacagcaggaacatcaggaacacgacgatcagcgcgaacagcagctgcggttcggcggccaccacagggatgaagcacagtgcggcgatggccgcggcctgaacggatgtgcgcggcttgagcgggtcttcggtatggtacatgcccacggcacggaacacgaatgcgaacgcggccggcaggaacaccattacggtgagcatcggcatattggcctgcgcataccagccgaacataatgccggtggatgcccacaacagtcctcccagcacacgaaccacgtccgagcgggtgaatacgcccgccagcgcccagaacgacaatgcgctcagcggcgcggccacaaacagtatcatcgccagagcggcggtcacatggccgagcgtgaccagcgaggccagcatcagcaccagcagccacggcgtgggcggcgcaggaatgccggtgccgctgccaaacacccatggcgtggtggcggactgcaccagttgagtgaagctggcaccggtggaaagcaacacatcggaatacaacgatccaccggagaatatcgaacggaacaccggccaatacatcaccacgatggccgcaaagcacaccagcgccatcaccacggctgcgctccagcgatatatggtgcgtgtccgcagatgggcacgttccagcggactgagcagcactctgccctgctgggattggaatgcatcccgacgatcatggaactgcttgatctgccgactgtcggcgaacaaaacctgcagggacgatgcggcgaccttcgactgtctggccaccagcctgcgcgatttcatgtttcccgcgatatcggccaaagccaaccatggcaggcacaattgcacccatgcttcatacggcttcttgccgaacatcatggctatggccatgccaaaactgcgaatcagcctccacagccagacgataatccaggacgacatggccaggtcagtgtacagatagcgctgttgggagcgatgcaccgtcatcgcatgattgaccgtgtgatcttccttaagcggctccccgcctcgcgtacgaatgccctcataccgtgcgcgacgatgtgatatctccgcttgcgggactaccaccacgcgtccgccgctcaggcagacacggcggcagaaatcgaccgattcgctgtaggtggtcagccaggcattgatgccccgcagtcgcgtgaattgcgacatggacaccagcgcgcccgccagcgacaccgcgaacacatcctgtcgcccgtcatactgctcctgatcgggttctccatcgaccaccagggaatgcacggcgtgtcggcctgcatacataccgacatcatgcaggtgggatccttcccaatcacactgtttgcacccgagcacgctggcccccggcgtattgcgccacgcctcaagcaatcgttcaaggcatgaggcatccgaggggcgggaatcatcatggagcaaccacaatgcgcggggagcgtcatccaaatcggcccgatccaacgcccggctgaccgcatcgccgaaggaacgcgcgcccttggccgaaacgatgtgaatggtcacatgcttggactgcggcacctccactaccggccccgatggcgagggaatgacctcgaacgaagtggttatcctcgaaccggcgcgcccggtcgcgtcggcgatgatgacgactcccggaagaacattctgcgtcaataccgaacgcaatgtagaccggaggaaacgcatatcctcctcaacggtgatcacagccgtaatgccggtatccacatcctgcctatgcgtatacggtcgagaagacatggcgtcggccaacgcctcatgaatatcgctattacctgtcggactcataaactcccagtgtacgcaccagacttgaagggggtgtgtgtggaactacgcctgctcccggtgctctcgcttatatcgacggcgttcgcgctcgctcataccgccccaaataccgaatcgctcatcatggtcgatggcccatttcaggcattgttcacgcacttcgcatttggcgcacacacgcttggcatcacgggtcgagcctcccttttccgggaagaacgcctccggatcggtttgcgcgcacaacgccttgtgctgccaagatacatcgccatcaggtcggaatagtccccacaattcatgccatggctcttcggctgaatcgtcgaccacaccccacatacgattctccttgcctattgagcttttcatacggactaaattacacacatgcaatttcgtttttgtcaaattctttctcgtgtcattacatcatttttatggaactgtgtgctatggcgcggacacgatgccctgatgccgttgcacatgatattgtgccgttcctgcgcaggaacaccatagcgcaggaacacccggcggatgctgtgtcaaagtgtcattcagacaatcgacagtttcaggaggggttatgacgcaggaatcaggtggggcggatccgcatatcaacccgccaagcttcattcctgcgggaaatcgacgcacccgaccttccgggcaggtgccacgctccttcgcccctgcccgcgcctcacgtcagtcaggtcaggctccatcggcccgtccgtccgtcacgggaaatgacatcgaagagcctcaaccgaacgccaacgccacggcaagcgccaacgtcacggcaagcgccaacgtcacggacaacggcaggcggactccgcccagtttttctccgaaaaccggacgtgccacccgcagcacggctccggatgccgccgcaccgcgcagcattccgccgtcgcgagcgcggatgtcttccggctcatcccgcaacgccgtgcgcaatccgtcggatatgtcggtttcccggccctcatcgccagcagcaaacgtgtccacgaagttcagccatcttggccggccggcggcggcaacggcgaaaacggtaacggcacaccggccgcgcgccttgcgcatcatcttatgcgcgattgcggtactggtggcggcgttgattctttctgttttcggtgcctggcaatgggtggacagcaaactgaaccggagcgactggctgaccgacacccccaacacgccggcctcgacctggctgattcttggctccgacgagcgagacggttccaccgattacggcggcgtggacaatatctcaggcttcagaaccgatacgattctggtgctgatcaagcctaaaagcgggccgagttcgctgatttccattccccgcgattcgcttatgaacgtcgatgaccagtacatgaaaatcaatgcggtggcgcagattgccggcaagaaagccttggtaagcaacgtcgagcagattaccggccagaaaatcgaccatgtggcgcagatcaagttcggcggtctgcagaacgtggtgaacgccttgggcggtatcgaactgtgctatgacgaggatgttcaggattcctattccggactgaactggaaggcgggatgccatacgacggatggttccactgcattgtccttctctcgtatgcgatacgccgacgcgcgaggagacttcggacgcaacgaacgccagcggcaggtcatctcggccatcgtcaaaaaggcttccagcagtgggaccctgaccaatccgtccaaagtcgtggcagtgtccaatgccgcgatgagcgcactcaccgtggatgaaaaaaccaacccttacacgttgctcaccatggcgttggcgttcaaaagcgccaccggctcgaatggcatctccggcagcgtgtactggtccgacccagattattacgttgatggcgttggctcctcggtgctgctcgatgacgccaggaacaccgaactgttcaatcagcttgccgacggcacgcataaggccggcgccgtgggcaatctggcggaaggctgaccgacgctttcccggagcccatcggcttcatcgtcggcgcatgatcgccgccgttgcccacgcagccaatcatgcacgggcaaaatgtcatgtggataactcggcaagctagaaccacataccttgattcggcttgcgctttcggcatgcgctcccccacgctggaagcatgacatcacagcagaacgattcgaagcgacattccgcccatacggcatccgccgtatcccgggcgaagcaccgtttgggcgcgccgccattgcgcgcccgcctgaccatgcttgccgcggcgtgcccgatgatcgcgcaggcactgatgatggtcatactgctgttgcacgggcaatggctgttcgccgccatgatcacgccaggcatattcgcctgtctcgtgtccctgctgctgacgctccccccacctccgggcccggagaagacccccgccccgcaacaggcaacgatcgatatcggtatcacggacgatgccgatgcccgcgccgcagacctccgtcatgcgccgtcgcagccgatagaatcgctgctgcacttcgcacgcctgccatggcgcaccattgtgggccattggcttgaaccccttgaccttgcggtgccgatcggcatgaccggaagcgagccgctgaggctcgatctgaaccgtcaggggccgcatgctctggtggccggcaccactggttccggcaaatccgtgttgctgcaaagctggtgtctggcgctcgcctcgatgaacgggcctgagcatctgaatttcgtgtttttggatttcaaaggcggttccgcgttccgcaaactcgaacggttgccgcataccgtgggcagcgtatgcgatctggatctggcgcatgccgtacgcgcgttgcgtgcgctggaagccgaactgacacgccgtgaacagctgtccgccgctgtccatgcttccgatatccgtgatatggtcaatccgccaccgcgcctgatcgtggtcattgacgaattccatgccctgaaggaccagctcccggattatgtgaatcgtctggtgcgtattgcctcgctcggcaggtcactgggcatgtatctgatcgcctgtacgcagaatccgatgggtcaggtcagtgccgatatgaaggcgaatatgtccgtcagcatttgtttacgggttcgggaccgtctgcaatcatgcgagctgcttggtgatggtcgtgccgccgacctcagtccggcaatgcccggtgcggcgttctgcaacgattccgaacaggtgacggcattccgctgtgcaacggcgcgcgatatcgatgcggtatgccgccagatcgcgttcgcatcgcggttcgtcgggagcccgccgcagccgtccctgtttaccgcgccacttccccggcacgtaaaagaccggactgtggccaatcacgcaccgcaacgcattcgatttggacttgccgacgatggcatcaacctgcgagaagcgacggtatccctcaccggtggcaatatcggtgtcatcggcccgcaggggcgcggcaaaaccacgttgctgaaaacattggctcgacacgccagcatggctgatggcttggcggtacgtgtcagttccccgcatcgccgggtatggggatcgcaatggcttcgcaacggccgctgcacgccgtatgccagctcggatgcaccaccgcctccgcatatcgtgtggttcgtcgacgacgccgatgagttgttcgacccattccgcaccgacgagcaggcgctgtctttcacacatgcgttggccgatgagtccgtcagcgtggtattcgccgtcagcacgattcgcccgatacgtataccagagcattgcaataccagaatcgtgttcccgtgcggggaacgaacgtctgaccttatggccggagtccccgctcgcctattggatacgatgagtcatatcgatgccgacaacgcgggccgggccgtgctcatcgagggcacatcggcatgtctggtgcagtgcgcttcgtgaaaacttcggttttttctcggcgaaacctcttgaaaatcaccacggttcgtggttaccttggtactggacttaaggaacaacaccagccacggggcttttaagggaggcaagcaatgagcagcgcttttgattggcgagccaaggccgcatgtcgtgacaaggatccggaactcttcttcccggtgggcaacaccggtgcagcctatcagcagattgaggaggccaaggccgtgtgccgcacctgcaaggtgattgatgcatgcctgaagtgcgctctggacaccaatcaggattacggcgtgtggggcggcttgagcgaagatgagcgtcgtgcgctgaagcgccgcgccatgcgcgcccgccgttctcaggccatgcagatgcaaatctgatgttttgattatcgcttcgtcatactaggaaaccctcccacttgggagggtttccttatttttgggcttcgcatcactcatcctgagcggccctgagcttcatatcaagcaccacgcgggtgccgcctccgcggcgcggctcccaatgcacggaaccaccgaaatcattggtcacaaaggtgttgatgatctgcgtgcccaaaccagaaccggaagaacgagccaatcctccctgttcttcggagccgagaccggaaccgtcatcctcgaccaccacattgaggttcgggccggagcggcccacggaaatcgtgatatggccatccttgcggccttcgaacccatgctccaccgaattggtgatgagctcggtcagcacgagggacagcggcgtggcatcctgagcgggcatcatgccgaacttgcccatgtagttgatatcgatgtgctggtctttcatcgtggctaggtccacggccatgcgcagcagattggcaatcaccttgtcgaagtcgacgacctcgtcggcggtctggctcaatccctcatgcaccatggcaatggtctgcacgcggcgttgcgcctcctgcaattccttcttgacctcatccgacttggtcttacgagcctgaagcctcagcaatgcggagacggcctgcaggttgttcttgacacgatggtgaatctcggaaatcgtagcgtccttggtctgcagctcctgctcacgacggcgcagctcggtgacgtcacggcatagcagaatcgctccgatacgaccgttgttgtcatataagggcagcgagcgtatcgagacggcggaacggttggcgttgagttcggagtcgaccgcggctttgcccgccagcaccaacggcagggtttccggaacggggtcgttctccttcaacagctgtgtgccgagttcgctgaggtaatggccaggcatggtggtcagcaggccgagacgcctaaagcagctgatggcgttcggggctgcgtatcgaaccacgccgtccatggtcaggatgatgaagccgtccgccacgcgagcgatatggcgctggctcatcaccgaatccttgtaggggaactggcctcgtggaatcatctcgtacagctgtttgcccgcgttaatgctttccgactcatatcgaccgttggattctcgtgtggccatattggtctcacgcacgaccaagcccaaggtcttgccattgtgccgaaccggcgcgtacacgttgcagacggtcgccttgcccacggttctcaataccgtggagcggaacaccacgctggagagcatggcggcgtccaattcgccgaccatgtcatccggcatgacgtttcccaccacgtcttccgcccgtagcgtcatcacggtggatgggcggcattgttcggccaccacgtatttgccgtcaccgttctgtaccagcaacagcaggtcggcaaagctcagatcggcgatcacctgccaatcggcaacgagatgatgcagccactcgcggtcctcgtcgtcgaagtcggggcgcgttgcaaggatgtgtgaaaaatcagccatgcccctatcatacgcagacacgtcgccgccattgcggcaagccacacgggcaagtatgacgactattacgacatcgcatcttcaataccgcaccaatcgcgttgcacggctgcccgccgttcaggcggtcatcgcctcatacacctgagaggacaatgcggcgatctgctgctgcgcggttcccgagaccactcccgaggtcataaccaccatcacataatcccgttctgttccgtccgcggccttgccccacaccacggcggcatcattttccacgccggccagttcaccggttttattggccacctgaatgccagacggtactccggcgggtattttggcgcgtcgcgtctgcccgagcaatacgtcaagcatggagcggctggcttcggcggaaaccagtttgcctcggtacaatgcagcgaggaatctgccgcaatcggaagccgacgtccagttctcggtgccggtcccgtctgtgccggcatcggacaacacccgcaactgcttggatgagctgaagccgtatcgggcggccgtaccagtcacccgttgcatgcctgtggccatgtcgccatcgccgaccatcaataccagctgattggtggcagcgttcgagctgacggtgatcatctggttgatcagcgaggtggtatcttgcccgcccgcggccaaggtgccggcatgttgcttatcgtacacggcaagcatcacgtacagtttgatatccgaagccgccaccatgggctggccgccgacgctcacggttttgcccgtggccagatcctcgacatacaccgaccaggtgcctccattgccggccacagctgccgtgaccgccgaggacacatctgacatccgcttctcttccgccaccgtggtcaggtcgggagcaggtgccgccttgcgctccaaggtgtcatgcacagggcgttgttcgtgtttcgatgacgccgttgacgacgatgccgacgctgttgccggtgagtccgatgccgaggcgacgggcgatgttttggcgtgcgatgcgccgagaccgttatgcgcgtacatccatccaccgacgccgattaccaaagcggcgatcagggcggcgatcaggatcaatcccacgacgctgcctgttgcacgcgtgtcgctactatgcttggtatgccgagccaccgtcactgccccaatgtcttgtcaacactggccagcacccggctcatcaggtccgcggccaccgactgcccctgatattgggtgacaacggccacggcggccttatgaccattggcttcgacgatggcgaagtaattccaggtgtcctggatgccttggcctcggtgggcatgcacgatcatgtcggacggaatggttacgccttcggaagcaatgtccgcgttcatcaatgacgcgcctcccttggcgtccactgcggcgagcatgcgggccgcatcgcgggaggaactgtaattctcataaccggcattgctggccgccacatcgccgaaatcgcggttgaacgaggtgcccttatacccatgcgaagatgcccacgaattgacgccgctccagccacctaccgccgcggccgccatattgccggcattgttgtccatggaacccatcatcgcgtttgcctgcgctttggcgttgtcatcgccattgtcctgggccgcaagatagaccggcagatagagaccggcagccacgaattgcttgccggactgcgacgtggtcgcgatggtggcgtcctctgaggaatcggcgtatgttccatcgatgaccatggcggagacggccacatcggaggacgagtatgaatccgcgatgtcagacaactggctggatgtgatcaccggagtggaaggcttcgacttctccgtcgagcttttcttggacgaatcgtcgctgttcttgtctttggcgctatcagacgtgttcttcttggccttggacttggcgtcagaggaatccgtcgtgccatcatcggcggaatccgacgcatcggacccggtcgactgtaccgatgtttgcgcctgcggctgagctccccacaatcccatgctatgggtgacgaacaagccgatgaccaacgccacgacgcaaatcagcgcgatgagcacaatcaccaccgctttggtgtgatcgccgccaggacgcccggcgggaggttcaggagaagcaggtgccgcagggccagcggtcatgggtcccggtgccatgggccccggcaccgcggaacccggcgccgttggcggcgcgacggcgggcaacggcgccgccggctgcttcaccagcgtcagcgtggtgtcgtcataggcaggggccgccggattggcctcgggctgctccaatgggcttccgcactgcgaacagaaggcatttccttgctcgttggcaaacccacactccgtgcaatacaccatcaccgaacccctttttgctgtgacgttctcatcttcggattccatagtatcgccaccattgggtgatagtgttcgtgtgagtcggtattgacaagcataaaagttacgctaacgtaggttacggcagcgtaagaagcgtatcgtcaactcgtgaaacgggggcatcaccatggcatcaacaaccgacgacgcggaaaagacgatgcatcacgacgctcataacagcgcgacgattgcagaggatgccaccatcgcatacaagcgtcaggcggctatcgaggcgcgcgaacaggcgttgcaggccaaggctgatgccgtacgggccaaggcccagttcaaggccgaggccattcgagccaaagccgaggagaaggcccggcacaagctcgccaaagcggagcaccgtgcgctgaaaatcgagggcattgcccctgcggaagtggaacgcaagattcgtctcgacgtgcacggacgaccaaagccgttgatgcgcggctggattcacgcgattgccgctcccctgtcattggcggcaggcatcgtgcttatatgcctggcacatggcgcgagtctgaagtgggcgtgtgccgtgttcatgacagcgtcgctgattctgttcaccaattcggcctgctaccatctgggcgattggagcccgcgcgtcaccgatgtgctgcggcgtatcgatcatgtcaacatcttcctgctcattgccggcacgtataccccggtctcgtttgcgctggaaccgttctggcgcaatgtgatcatcatatcgatgtgggcgtgcacggccatcgccatcgtgattcatgtgatctggatcaatgcaccacgctggctgtatacggtggtgtacatcatcttcggcatctacggcctggcttatatggtgatgttctggaattcgccgtatgcggggccagccgtggtggcgctgctgtgcgccggcggtgcctgctacatcctcggcgccatcgtctacgccttgcgcaagcccgacccttggcctcgcgtcttcggcttccatgagattttccactgcggaacggtggccggatatgcctgccatatggtggccatctacatggtgatcgtctcgctgtggcaataaacgctacgacatataagtatgcccccgcctacgggggcatactagtcacttataactcaggccagcggcttggcggccttgaccgtcacggacagctcgcggccgttcggtgcggtgtaggaaacgacgtcgcccaccttggcaccttcgatggccttgccaatcggggaatccggggtcatgatgtcgtagtcggtgccggccacgatgtcacggctgccgagcacgtaggtcatctcgttgccgttgagctcgatggtcaccacagagccctcgcccacggtgccttccggggcattctcgatgatcttggaatcgcgcagcttgacggtgagctcggtgatgcggccctcgttcttgctctgcgcctcacgggcggcctggtagccgccgttctcggacaagtcgccctcggcacgcgccacggcgatcttgtgcgcgatttcctcacgcagctcgccttcacgatgggcgagctcttccttcatcttgttgtatgcttcctgcgtcagcaggtagaccttgtcctcagccatatcgtcctcctgaaccgttgtcgatgctgaaacaattttcgttatttatgacaaaacgccggctatgaccccggcgttcgtcatgtgctgacctatggtcagcgggtggaaatgatgtcgatgacgaacaccagcgtgtcctcgccgccgatgccggcctgcgggatgccgcgggaaccgtagccgtattccggcggaatggaaaccaccagacgcgagcccacgttatggcccggcacggtctggtcccagcccttgatgacctgtcccacgccgatgccgaagctggcgggctgatgacggtcgaagctggagtcgaatggggtgtccttaccccacaccacgccgtggtagttcacggtgacggtgtcgccgcgacgcacgatcgggccgtcgccctcggtcagctccacaaccttgaggcccttcggggcttcgggcgccgggaactcgataacgggcgtggtgccgaattcggcgttcacctgaggcatctgatctgccattagtcctccttcaaagacacaatgcgccctaccttagcaccatcggcgaatcggcggtagtccttcatccctgtgcgatacgacacgctggccgtatacgtcaattccggtcatcatgctggtgaataccagacatgtcaatcaacattcgacgacattgacggcaagcccgcccttggaggtctccttgtatttggccatcatgtcttcaccggtctgcttcatggtttcgatggcctgatcgagggtcacgatgtgtgagccgtcgccgagcatggccatacgcacggcgttgatggcggtgttggcggccatggcgttgcgttcgatgcatggaatctgcaccagtccgcccaccggatcgcaagtcaggcccaagttgtgttcgatgccgatctcagcagcattctccacctgttccggcgtgccgcccatgactgcggcaagtccggccgccgccatcgaacaggccgagccgacttcgccctggcaaccgacttccgcaccggaaattgaggcgttgcgtttgaacaggtatccgatggcaccggcggtcagcagaaacgtgaccacgccctgttcattggcgttgtccacgaaatgccagtaatagtgaagcacggcgggaatgatgccggcggaaccgttggtcggagcggttacgatgcgcccgcctccggcattctcctcagagacggccaaggcgaagagatccacccatgcggcgtcggaagactcgagcacggcgtctttgcgccggctgtcgcggcgcagcacatcggaattcgaagcgagacgccgatacatcttcggcgcgcggcggggtacgtcaaggccaccgggcaatgtgggctccgccgaggtgcatccgtggtccacgcaggcgcgcataacacgccagatggcatcaatatcggatcggacctggatgcctgagcgtgaagcggtttcgttggcccatacaagttcggcgatgctgagatgatgttcccggcacaacgacaccagttcggcgcatgatgagaacgggtagggtgcctcgacgccgaaatcagtggatgatgattcgtccgcgtcggcaaaggaggtgccttccggaggacgttcatgaatgccgatcatcgggtcttcgggagcgcctttgcgcacgaatccgccgccgatggaataccagacctgttcgtcgaccaagcttgcggcggcgtcgaaagcctggaatcgcatgccattggggtgcgcggccatgcgcttccattgttcgaacaccacgtcgcggtcgtagtcgaaatggatgcgtttgaggccggcgaggttcagagtatcgtccaacgcgcaggtctcgcggatgcgcatcatgtggtcggtatccacggtggccggcagattgccttcgagcccggccatcgcagcacgatcggtgccgtggccgagaccggtcagcgccagagaaccgtaaagcgtgattttgacacgtgcggtgcgatcgaccaaatggtcggccagcaacgaggaggcaaaggcatgtgccgcgaccatcgggcctacggtgtgcgaggatgaaggtccgacgccgatggtgaacatgtcaagcacactgaacatttggctccttctcccctgctggttcggcatgccggtgtcaccaggcgtcatgccatcacgatatcgtattccagcctagcgcccggaatctttcgctttgcgcgatgatggccgcgcgcgtcgtgccggcgagcgataagtcagtcagtgagatagtgcggagaacatcataaccagtacgatgataccgatgatggccaatacgatctgcaccaccatcagcccgatggtcagtcccttcttggtggcgattttgggcgcgtacgcctgtgccagcaggaaggcgatgaagccgaacaccgcgtagttgacggtcagggccatcacatcgctgttcgacaacaccacgccgttcagcggctggttcagcgtgttcatcatcgtgctcatcacgaacatgccccacacgccgtagccgattaatccgacgacgccgtacagccatggcttgagtttgtcgttggcacgcagggtcagggcttcggcacaccacaacagggcgaagccgacgatgtaggtgaacgccacggcgatcagtatcacgatagtcgcccacggcaggagtgcggccacattgccgatcatggacagatagaatcccgagcaggcgatggcaccaacggtgagtgcagtgcccgcaatgacggcttgggcaagcatggtgggcagggcgccttgttcgactcgttcgacatcggtccagcgtgaagccatgtggattcctcgtttcatcaggtacatcgtcacaacgccacatagcctaacggccttttgtttcggccttataagctctccacatagtaagctgcgagcccctctgacgaggggagctgtcggtgaagccgactgggggagagaccgcggcacagccgcaaaaaacggcatcggccacaggccgatttcaaagtgcctccggtgggactcgaacccacaagccgaagcgatcgattttaagtcgactgcgtataccatttcgccacggaggccaacttttctattataagctatctcctgccctgagcattgcttgcgggttgctgcgcttcgtgcagccgtcgcggcatagccgctcccttcgcctacaaacagcccagtgggctgtttgtagcagccggtagcgatagcgtcgccggcgtcgcatataacgcaaacagcccaccgggctgtttgcttaacggctcagcccgctggaggcacttaccacttacgctattgagccagcaaccggcgaccataatcgagcacaatgccgtccagcagcccgtgttcgctggcgacgaacgaatcgatggcttcaccatgatcggccttggcggcttcgctgacacgcgccagcacacggctccagaccacagcgccgccgccgaccacatcgatacggccggggtggatggtcttgtattcgcggcgctcggcgcgcgtcatcctaaggaacttgtcgtccacggcataggcgtcttcaaggctcaaccgatgcccgtcgaccacggtgtgatcgtattctttcaatcccatagccaaggcggtcatcgtggtcaccgtgccggacacaccgatgatggtacgggccttgcctgcgtccacggtgcggaaggcctcatcgatatgctcgtcgatgtccgcaacggcctcatcgatctgcgcctgggtcggcggatcgttggtcagatgacgttcggtcatgcgcacggaaccgatgttcatggagaatgcgccctgaacctgggtggtgggcgcactgacgccgtcgccaccgatgaccagctcagtggacccgccgccgaggtcaaccaccagatagggggcgggcagatcgtcgcgattgaccacggaagtggcaccgaggaagctcaggtcggcttcttcagtgccgggaatgacttcggggcgcacgccgaggatacgttcgatctcatcctcgaactcctcacggttttccgcgtcacgagtggcggaggtggcaacgaaacgcaggccgtcgatgggatgctcggcaatcacaccggcgaattcccgagcggccacataggcgcgttccaacgcttcgtcggcaaaacgatgggtcttgtccacatcctgaccaaggcggatcacacgcaggatgcgcggcaccacctcatgcatgccatcggcatcgacacgtgcgattttcagtcgaatggagttcgtgccgcaatcaatgccggcgacggttacggattccttgctcattgccttctcctcgtatcccttagtgcgtatgaatggactgttcgcggtggctcatctgttgatcaatcatccagcgtgcagcggcagacggtcggatcgaattcgtctttgacgcgttccagcaccaaatcgccaatggggttgacgcccggccccataaccaaggactgggccagcagggcatgcaggcacttgacgcgcaccggcatgccaccggccgaagtgccttcaatatgctcctcactgtcgccaagacggcctgccagttcgtggcggaatgccagatacaggttatgggcctgctcatatgcggccttgagctcctcgtccgaggccagcatatcgttgtattgctgcatcacgccggcggcctcgacatgggaggcggccttgacggcttccggaccggtcagatagcacgtggtggggaaagggattccgccgggcaacaccgggcgggtgattacggcaagtggcctaccgcagacgcatcgcgcccccacggcgaccatgccgcgcgggtatcggccgagctgacgctgcaccaggtcgatgtcatggtcgttggcgggctcggcaagcatggtgtcgacaagggccttggccttggcggcgatatcgatggtcactgttgggttccctcccctgtgttctgttgggtgttctgatcggatggggtgttctgttctgacttatcggactgcttggatgagtcgttggatgacgagtcagaggaaccggaagtatcggatttgccggactcgctatcggtcacaggctcatcggcctttttgagcgagtaagacagttcgctgtaccatggcaggacttttttgttgctggtattggaatcttccgttttctgggattcgcgatcggagccggtcacggcttcgggatgcagcacacgcacggcctgttcgccggggaatacgaagccgaggcgttcacgggcctgggcggtgatgtaggccttgtcatcccaacgcttgatatcgttctccaactcctgcttttgggcgatcagcgaggcttcctcacgcttgaggccattgagctcggccaggttcagggcataagtgtggaaggtggagaccagctggatggcgccgagtgcgatgatgaacagggagacgaagaacgctatgggccccgccgacccttttttcctgacttgtgctttgccggttttgccaggtttgccggtacgggacgacttgctcatgtcacatgaaaatacccgccgcattcgacttgacgaacacgacgggtatcgagcttcagtggaaactcacgcctttacgggcgtttcagctcacttggccaagtacttcttgcaggccttgaaggcgctgtagccggcgtactgagcggtggagccgagctcctcctcgatctcgagcaggcggttgtacttggcaacacgctcgccacgggccggggcaccggtcttgatctggcgggtgttcttagcaacagccaggtcggagatggtggtgtccggggtctcgccggagcggtgggaaaccatggaggtgtagccgttggcggtggccagctcgatggcgtcgagggtctcggtgacggaaccgatctggttcagcttgaccagcagg

SEQ ID NO: 3811 - DNA, 6169 bp, Unknown
  R35_2m  MAG No. k141_5670
caccctcaagtacggtccgaacggtgagcgttccattcagggcatcaagcgcatctccaagccgggccttcgtcgttacgcgaagtccgactccctgccgatgccgctcggtggcctgggtatcgccatcatctcgacttcttcgggactgctgactcagaaggaatgcctcgaccgaggcattggcggcgaaattgtcgccttcgtgtggtgagaaaggagagctgaaacatggcatcgcatattggtaagctccccatcgccatccctgctggcgttgaagtcaagattgaaggccagaacttctccgccaagggcgctaagggttctgactcctacgtggttccggaaggcatcaccgctgccgttgaaggcaacgagatcgtcctgaccgccgctgatgacctgcgtccgacccgtgccaagcacggtctggcccgctccatcatggccggcatggtcaagggtgttcacgatggctactccaagactcttgagatcgtcggcaccggttaccgcgccgtcgccaagggcaagggcatcgagttcttcctcggctactcccacaccatcaccgtcaacccgcccgaaggcatcaccctgaaggtgaccgacgccaaccacgtggttgtcgaaggcaccgacaagcaggtcgtgggccaggttgccgccaacatccgcaagctgcgcgctccggaaccctacaagggcaagggcatcaagtatgccgatgaacgcatcctgcgcaaggctggaaaggctggtaagtgatatgagcgttgctattctcggaaaaggcaagaaggtagctctcaagcgccgtcacgcgcgtatccgcaagcgcatctccggtacccccgagcgtccgcgcctggtggtcacccgctccaaccgtcacatggttgctcaggtggtcgacgataccaagggtattaccttggtgtccgcctccacccttcaggccgacttcgccggtttcgaaggcaccatgactgaggccgccaagaaggtcggcgagctgatcgccgagaaggccaaggctgccggcatcaccgcagtcgtgttcgaccgcggtggcaacaagtacaccggtcgcgtcgcagccgttgctgatggcgcccgcgagggaggtcttgcactgtgagcgacaacgaaacgaaggaaacccaagtggctgaagaaactcagaacactgtggcgaccgaatccaacaacgaggaccgcaagggtcgtcgtggccagcgcggtgaaggccgtcgcggcgagcgtcgtaaccgtcgtgaagaaaaccacggcgacgagctgctcgatcgcgtggtgaccatcaaccgtgtgtccaagacccacaagggtggccgtaccttcagcttcgctgcactggttgtggtcggcgacggcaacggcaccgtgggtgtcggctacggcaagtcccgtgaagtcccggccgccatcgccaagggccagctggacgccaagaagcacatgttctctgtgcctcgcgtccgcggcaccatcacccacccggttcagggtcacgacgctgctggcaccgtcctgctgcgtccggctgccccgggtaccggtgtaatcgccggtggctccgtgcgcgccgtcatggaatgcgcaggcatcaccgacgtcctgaccaagtcgatgggctccgccaccgccgttaatgtggtgcgcgctaccgtcgacgccctcaagcagctcgaagagcccgaggagatcgccgcccgtcgtggcctggcgctcgacgaggttgctcccgatgctctgctgcgcgcccgtgccgccggcattgccgaggctcgcaaggctcgcgaagaggctgctgccgctaaggccgccgaagagaaggatggtgagtgatactcatggctaagaacctgaagattaccctgcaccacggcatcgtgaaccgtaccccggctcagcgcgccaccgtcaagaccctcggcctcaacaagatcggtaagaccgttgtccgcgaggacaccccggccaaccgtggtctggtgaacgccgtgcgtcacctggtcaccgttgaggaggttgactgattatggcagataacgaaatcctgcagatgcacgacctgaagcccgccccgggcgccaagaaggaccgcacccgtgtgggccgcggtgaaggctccaagggtaagacctccggtcgtggcgccaagggccagacgaagcgtaaccacgtgcgtccgggctttgaaggcggccagctgccgctgtacatgcgccggccgaagcttcgtggcttcaagaacccgttcaaggtcgagttccaggtcatcaacatcgctcgtctcgtggagctcttccccgagggtggcgaggttgctgtggccgacctgatcgccaagggcgctgttcgtgacaacgctccggtgaaggttctgggcgacggcgagaccaccgtggctttcaccctcaagggtgttaaggcttcggcttccgccaagtccaagatcgaggccgccggcggttccgtttccgaggactgattagtcctacggggagcgcaataggctgtacaacccccgcccgccaataggtggacgggggttcccttttctcaaaaattgttgttctgagcgcagagaagcagtctcaacacaatgatcgttttgagtatgcttcccccgttcagtacggcggagcataattcaggtaacattcgcgagacatgaagtggccgaagtaggcactgtagactatgctcattcgttagtttgtgtatttcgcgtgattggcgcgctattgggaggaaatctaggtgaggacactaatccaggccctgaagaccaaagagttgaggaagaagattctcttcgtcctgttcatcatcatcgtctaccgcatcggttcgttcattccgacccctggcgtggactacaacgtggtgaacaagtgcatggccactgtcggcagcgcctcccaggagaacttcatcggactggtgaacctcttctccggtggcgctatgctccagctgtctatcttcgcgctgggcgtcatgccgtacatcaccgcgtccatcgtggtgcagctgctgcgcgtggtcatcccgcgcttcgaggccctgcataaggagggccagtccggagaggccaagctcacccagtacacgcgttacctgaccatcggcctggccgtgctgcagtccaccaccatcctggtcaccgcccgctccggtgccctgttcaactaccgctgcgaccaggtcatcccggacggctccgtgtggaacctcgtggtcatggtcctcatcatgaccggcggcaccggcctgatcatgtggatggccgagctcgtgaccgacaagggcatcggccagggcatgtccatcttgatcttcatgtccatctgctccggcttcctgccgcagctgtgggagatcggctacggcaccaacggcaagaacggcgactggaccaagttcggcatcgtcgtgggcgtgctcgtggtcatcctcatcttcgtcgacttcgtcgaactgtgccagcgccgcgtcccggtgcagtacacgcgccgcatgatcggccgtaagatgtacggtggctcctccacctacctgccgctgaagatcaacatgtccggcgtcatcccgccgatcttcgcctcctcgatcctcgccatcccgaccctgatcgcccagttcggcaagtccgaccagtcctgggtcaagtggatcaacgccaacctggcgaacaccacatccgtgtggtacatcgccctgtacgcactgatgatcgtgttcttctgcttcttctacacctcgatcacgttcaacccggacgagaccgcggacaacatgaagcagtacggcggcttcattcccggcatccgcgccggcaacgccaccagccgttacctgacctacgtgatgaaccgactcaacaccgtgggtgccgtctacctgctgttcgtggccctgatcccgaccgtgctgatcatggctctcggactcaacgccaagctgccgttcggtggcaccacgatcctgattatcgcgggcgtgggcctcgacaccctgcgtcaggccaaggcccagaccgaacagttccagtacaccggcttcctgttcgaaaacgtggaccacaaagaaggctgacgcccgcttggcagcggtcgcccgcaatgggcaggcggccgcgcgaggagtggaacagtccagtggactgttccacgacggagcaatctttcttccacatataactcaatggctcccctaaccaagggagccaaaaccgtattaataaccgacacaaaaggagaccaccatgcgtctgctcatcatgggcccccagggcgtgggcaagggcacccaggctgctctgctcgccgagcacttcaacatccccaccatctccaccggcgacatcttccgctacaacatcaagaacaagaccgaactcggtcttgaggcgatgagctacaccgacaagggcgagctggttcctgactccctgaccaacaagatcgtcaaggatcgtctggccaaggaagactgcaataacggctggatcctcgatggctacccgcgtaacgccgcccaggtcaccgctctcgacgagatgctcgccgacctcgacactccgctcgaccacgtggtggccctcgaagccgcccgtgacgtgctgctggagcgtatgaagaagcgcgccgccgagcagggccgcgctgacgacactccggaggccatcgccaagcgcctggagacctacgagaaggaaaccgctccgctgctcgacatctacgaatcccgtggcctgctcgtcgtggtcaacggcgtcggcgacatcgacgagatcagcggccgtatcatcagccacctcgagtagtaggttcggcagcccggccaacaagccggagtgatgccgaaataccacatcaacgtttccatacccctgtgcgacacgccgagtgttcgtacaggggtatgtgcgtatatagttgacagttggtgtgtcttcggatatgccatagtaatcatccaacggaataggactagaggcacatggcaaaagacggtgtgattgaagtcgaaggacaggtagtggaagcactgcctaacgcgatgttccgcgttgaactcgagaacaagcacatcgtgctcgccacgatttccggcaaaatgcgtaagaactacattcgtattctgccgcaggatcgtgtcgtgctcgaaatgagcccttacgacctgaaccgcggacgcattacgtaccgttacaagtaaaggtacacaagaaaaggataaccatgaaggtcagccctagcgtgaagaggatctgcgaaaactgccgcgtgatccgccgtcacggccgcgtcatggtgatctgcgtcaacccgcgccacaagcagcgtcagggctgagagcagattctccagcggcactaagtaaataaggcactctctcacagtgcttcccgcaagggaacgacactgaaccacgggtacgtaggcccgtgccgggtaaccgggcgagcgggtgcaagacctacggcaacaagaaggaatcgcaatggcacgtcttgccggagtcgacatccccaatgagaagcgcatcgagatcgccctcacctacattttcggtgtgggtcgcactcgtgccaaggaaacgcttgccgcgaccggtatcagcccggacatccgcgtcaaggatctcaccgacgagcagctgattacgctgcgtgactacctcgaagccaactacaagatcgagggtgacctgcgtcgtgaagtcgatgcagatattcgtcgcaagattcagatcaactgctaccaaggccagcgtcaccgtaagggacttcctgtgcgcggtcagcgcaccaagaccaatgctcgtacccgcaagggcccgaagcgcacggtcgccggaaagaagaaggccaccaagtagtcggtggcatgattcgggccacgggatgatttcatcccatcgcccgaacgtcaacaacaaagttcgttactaggaaacgagggtcaatggcagcgcctaagcaagccgctcgtaagccccgtcgtcgcgaccgcaagtcggtcccggtcggccaggctcacatcaagtccactttcaacaacacgatcatttcgatcaccgatccgtccggtgccgtggtgtcctgggcgtccggtggtgatgtcggcttcaa

SEQ ID NO: 3812 - DNA, 45678 bp, Unknown
  R35_2m  MAG No. k141_5994
cgccaccactcaacgtcggtcacatcaccgaacgtacagcacatggcgatgccggcacccttgtccatttcggcggccgggtgagccagaatcggcaccttgaccttgaacagcggggagtagacttcctggccgaagtactgcttgtaacgctcgtcattcgggttggcgatcagcgaggtgcaagcggccagcagctcagggcgggtggtctcgatgtagattggggtgccgtcctcaaagcggaaagccaccttgtggtagaagcccgggtattcgcgggactcaagctcggcctgagccactgcggtctggaaggtcacgtcccacaggccgggggcgtcctgctggtaggcctcgccacgagcgaggttgcgcaggaaggccttctgagccacgcgccgcgggtgctggccgatggtgtggtaggtctgcgaccagtcgatggacaggcccagcttgcgccacagggcctcgaacagcttctcatcctgagcagtcagacgctcgcacagctcgatgaagttcttgcgggaaatcggcacctgatccttggcgtcgatcttcttgccatcggtgccctcgaacggcggcttgaagtccgggtcgtaggggagggacacgtccacgcgcacgccgtagtagttctgcacgcggcgctcggtgggcaggccgttgtcgtcccagcccatcgggtagaacacgtcgtagccgcgcatgcgcttgtaacgcgcaatcacatcggtatgcgtgtaagagaacacgtgacccacgtgcagcgaaccggagacggtgggcggcggggtgtcgatggagtagacggccttgcggtcgcgggtattgcggaatttgtaggtgccgtcttcatcccagacggcgcgccacttgtcctcaagtccgtccacaccgaccttgtcgggcagcggggtgaggttggcgttgatgatggatttgccttcagtcataaagccaaagtttatgcacgttgcatgacaagccgaactgtacagtaaacagcccagtaggctgttcgcaggcgagatacgaacgatcgaacgatagtgagccaaggactatcgggcgtagcccgtccgtgactgaaggttgcctacttcaccgtcaacccggccagcggcatgcgacgattgatcatcgaggtcgggtagccggagaccttggtggacgccacagtgaagcatttgcgggtatacagccaatcactggccgcatcctcgctgatcagccgggcgtacgccttcattcgtgcctcataatcggcgtcattagtggcggcgcgagcatccgcataggcctgttgcgcttcggtatggtcgtaatggaacatggaatcggggtcggcgaatatgccggcatcatccgtgccgtccatgctcatcacggtcagttcccatttgccgtccttgattcgtttggcataatcctcatcggagagcacttcaaggttcaccgtggggcgcggctgccgctcgatctgctgcttgatggtttcggccaacgaccggtattcttcgggaaccaccagattcaccgtagtcagatattgcgcaccgaagtaggagaacatctgcccagcttggttttcgtcatgcggatacagtccggtcaaatcttcgtatccgggttccagcgggctgatggggccgcccaatgctccggctgcgtcgggttgggcggaggcgatgccggctgcgtcgatttgatagcggaaggctttacgcgcctgttcgtcggagagcagcgaatcgatgccgttgttgtaggccagcagcaccttatccgtagtggccccctccttgacggtcaggccatccttgccgttcaaaccggtggccgtcgaagccgaaaccggtgccgccatatcgagactgccgtcggtcagggccttgctgagcgcatcggcgtcggagtattgcataaattcaacgatattgctggccgctttggtgccatggtaggtatcgctgcgcgccagcttcagggaatggccaggctggaaatcggccacggtgaatggtccggaacctatggccttgcgttgataatcggcactggacgactcggaatcgtagacaatgccgagtttgccggacagcgctcgcagcagcgtcggattgggcttggcaagcgtaatgatcaccgtggtggcgttcggattggcgaccgacgtcagatcgcccaattcgtcgacgtccgccaccttgttggtcacgttctgttgcaacgaccacacggcgtccgaggcatccaacgtatgaccgttcgagaaggtgacgcccgattgcagtgtcaaggtgacggtcagtccgtcatcggaagtcttccagcttgtcgccagtcccggctgaatcttgttgtcttgatcgacggtcactaatgtctcatacacattgtcgacgagcaggcgctcggctgccgcagaggaatcggaccgaatatccaaggattgcggcatatcgtcgatgccaatggtcacatcggcatcgagggatgatcccggctggaaccggttttgcatgaacgtccatcccgcaaccacgagtgcgccgagtgccacggcgactccgagaaaaatcccccacttggaccatgtattgttccgcttgctgtgctgcatggttttcagtctagcggtggattcagcctagaatccgcaattcaccatgatgaggtatgagttagcgcttggacgtgctcttgccggcgggcggcgcatagttagggcaggtgtcggacagcgggcagttggcgcagtcgggggtacgtgcgtggcaggtggcccggccgaacagaatcagtcggtggctgagattcgtccactcttcgggcggaaaacaggcggtgatttccttctcgattttcacgggatcagggtgtgcggaccgccaatccgaccgccaacgcagtcgtccggttacgcgcatcacatgcgtatcgaccgggaatccggggatatcgaacgcgttgccgagcacgacgttcgcggttttgcggccgacccccggcaagctggtcagttcatccatcgtgcgcggcaccacgccgccgaaccgttcgtccagtgccgtggccaatccgatgagatgctgggttttcgaacggtagaaccccagcggatgaatgatgtcttcgacttgggccgggttcgcggccgccaagtcacgggcggtggggtaggtggcgaacagttccggggtgaccgtgttgacacgcttgtcggtggtctgggcgctgagcacggtggcgatcagcaattcgagcggattcgagaaatgcagtgcgcaagcgggtgccggaatcacctggcgcagaatgtcgtattcgtcatgcatgcgcgtgagacgcgcggatttggtttctctcatcgtatggacctaagcggcgtaatgtcgatgattgatggtttgtagcgctgctggtctgtcaggcggcggtgttgagatcgggggtatcgtcatcggtgccgatggcggcagaggatgctttggcggcctgctgtgcggcggcagtttccttatccgtctccggcgggtcgaatcggtagcccacgttgcgcacggtgccgatgaggtgttcgtattcgccgccaagcttggcgcgcagacgacggatatgcacgtcgaccgtacgggtgccaccgtagtagtcgtagccccatacttcctgcagcaactgggcgcgcgtgaacacgcggccggggtgctggaccaagtacttgaggagttcgaactccttgtatgccagatcgatggggcgtccatgcagggaggcggtatagccgttggtgtccacaatgaggtcgccggagcgaatctggccatcttccaccgtggtggtggattcggcgggagaaccggctgctgcggctgcgggagcgttgccgcgctcggagaccaatcgcaatcggccctcgacttcagccggggaagcggtggcgaccaccacatccgcaatgccccactgggagttgaccacggtgaagccgccttcggtcagcaccagcacgattggcgtggacaggccggaagcgtggatgagacggcacaaggttttggcggtcgccagatcatcgcgtgcatccagaaacagaatggtgttctccggcatcttcaccaagctggctgcatccatcggcagcacgcggacgcgatgagaaagcagggcgagtgatggcaaaacggtggcggggtcgctggcgaaagtcatcaacgtaagatccgtcacgctaatccccctttatcctgcaatgtgttacgcaattgcttggtgtggctgtacgagtcgtcagcggcgttatgccgctttcgcgcggtttttcattattctacgcgcttgtagtggacacatgggttacaagtttgcggaatatggaacggcagacgtccatcaaccgatgacacggccgagcaccagtgcggttgcggcgatggtcacgcccatcagcattaccggcatcaggccggtaccgatccacggatagcggatatccgggtccggatcggcgtcacgcacccacaacgtggaggccacggccaaggccagtcccaaaacgatgaggatgatcagggcaacggttcccgcaacggtgcccttggcgagcatcgcgcccaaatcaggcaggaagcaccagccggccacggcgagagccgccacacctgaagtcacggcgtgagagagtgcgcggataagatgttcgcgcttctcacgagccatctggcgcccgaaggagaagaccaccagcaccaccagcagcaggcccatggccagtgcccatgaataccaaggaagtaccgagccatccgcagcggtctgatccggcggaaccttgccggtcgggaaaggtacgatgacgaaaatcagagaaatcgcgccaaacaccaaagtgacgatacgatccagcatgctgccgcggaacggccagaacacgacaaatgcggccaacgtcagagcggcgataatcaaagggatgatggggacggtgccaggggagggaatgaccgtggctgcgatgagcagtacataggacgtcagttgggccaacaacatgctcagggctttgttcttccaaccctcctgggtgatctcggtcatgatacgcctctcagataatcgaatttccatcccaatcctacgtcgggcattggaacggtgaaatcaaacaaaatagccctttctggtgaaggggcttatgacactaaatcagaacgcgataacgcccaaatgctccaacagcactttgacgccaagtagaatcagcaccacgccgccggcgatctgcgccggctcctgccagcgggagccgaacgcgcggccaatgtacaggcccgcagcggagaacagtccggtgaccacaccgatgctgaggatggcgaatgccatatgggctttggtgaacatgaaggtcaggctcacgcccacggcgaacgcatcgatgctgcaggccacggccaggggaagcatatgcttccaatcgaactgggcggtctccttggagttttcctcatcttcttcgaaggcttcgtgaaccatgttgccgccgatgaacaccaacagggcgaagatgatccaatgatcgaatcgggttacgtatttgctgaatgtagatgccgcgaaatagccgagaatggggaacagcatctggaatccgccgagccagagggcgcttttcgcggcgtcttgcactcgtacgcgggatacggccagacctttgccaatggatacggcgaatgcatccatagctacggaaacagaaataagcaggatttgaatgattatcggaatcatggtgcgacagaaggttcatcgccggattaccgtgcgatgggcctcgaccagcgttcctacacgccgcctacgcctagctgaaaaatacaccagcactatatcacgcgatgcacgtcgaatcaaaaaggcgggaggcctccggagaggtctcccgccgacgattcggaatcgaatcacttgccttcgttggcgaggcgttcgcgtgccgcgatgatttccttttcggcggcgtccacaccagtccagtagtcgcccggcaggacttccttgcccggctccagagccttgtactgctcgaagaagtgcttgatttcggccttgtggtactcgttgacgtcgtcgatgtccttgatgtcatcgaaacgaacgtcggcgggcacgcacagcaccttgtcgtcgccgccggcctcgtcgaccatgtggtacaggcccacggcgcggcactcgaccacgcagcccgggaacacggagttcggaatcatcacgagagcgtccagcggatcgccgtcctcgcccagggtgccgtcgatgtagccgtagtcatccgggtaacccattgcggtgaacagggtacggtccaggaagacgcgaccggtctcgtgatcgacttcgtacttgttcttggagccgcgcggaatttccacaacgacgttgaaggtttctgccatgtcatttctccttgaaaatcgacagttacgttatcgtctcaccacaataccctgtttgcgcctgcaaaacaggtgcggaactcaagaaaccgtgctgagattatgccgacactatgtctaaacagacgaaatcctcccctcaaggggaggatttctagcggtttacgcacacgataaacccatgcacgtcaacggcatcactgttgcattaccgttgcactaccgcatcactgcacggacaggatgtgggccacatccgcccaaggcgccagagacacgtagttgtcccaaccccactggaattcgcggccggtcagctcgtcgcgcacgttgagcgggcggtcggtgggcagacccagctcgccgagttccaggtgaatcatcgactggtgtgcgttgtgtccatcgaggttcacgaccacaatcagtgtgtccgcttggccggtaccggtcagttcggccggcgtgtggcgtgcgaaagccagaatattcgggtcggacgtaggcagcacggtgaggttgtgatagctcaacgcggccgggtgggcgcgacgaatcttgttgagcgcggtgagcatctcggccacgccgtactgcttggccttgctccaatcgcgaaccttgacctcgtacttctcgttgtcgatctgctcttcgaagccggggcgctgcttgttctcgatgagttcgtaaccgttgtagataccccaggacggcgagcccatggctgccagcaccgcacgcacgcagtggccggctacgccgttgtctcgcacgtaagcggtgagaatatccggcgtggtgggccagaaggtgttgtgctggtagtagccgtcgtcgccattggtgatcggcagatactcttccagttcgtccttggtgttgcgccacgggaagtagcagtgggactgggtgaagcccacgtagctcagggcacgcatcatgcccgggcgggtgaatgcctcagccaggaacaggatctccgggtgcttcttggtcacggcggcaatcacgtcctgccagaaacgcaccggcttggtgtgcgggttatcgatgcggaagatggtgacgcccgcctcgatccacagattcatgatgcgttcgacttctttttcgatgccgggcatgtcggcgttgaagtcgatcgggtagatgtcctgatacttcttcggcgggttctcggcgaaggcgatggagccgtctggcttgtgacggaaccagttcgggtgggccttgacccacgggtgatcgggcgagcactgcagtgcgaaatcaagcgcgatttccagacccagttcatgtgcacgctggcacagggccttgaaatcgtccatggtgccgagcagcggatccacggtgtcgtggccgcccagctcggagccgatgccgaacggcgagcccgggtcatcggggccggcgaccagcgtgttgttgcggcccttgcggttggtcacgccaatcgggaagaccggcggcagatagacgatgtcgaagccttcggcagcggcgcgttcgaggccggccatcgaggtcttcagcgtaccctgaatgatcttgccggtgttcggatcgatggtggcgccttcggaacgtgggaagaactggtaccaagccgcgaagctggacttcgggcgttccaccttgaaacgctggggctggctgggggagatgccatcgcgcagcgggtgagtctcgtgcagggcggcgatggtagggttgtcgccggcggcgaggcgatcctcggcgctcagcgtctgatcggccatggtctcagcggccttctccaaggtcttgcgatcgcgtgcggtcaggccggcgtccggggttgcggcccaacgggccagcagctcggcaccggaattgagcgcgttgtccacgtcgtccatcacacgcaccttgatacgggcgtcatgcagccaagaaacgtacgtgtcttcccaaccttcgatggtcacggtccattcgccgagctgacgcttgacggccgcgtagccatcctcccaaggcttcagatcgctgtgctcgccgcacttgaccatcacggtccaacgatcgaggccgggatttacgcaggtcatggcctggcgcatggtttccttgccgcgcgggttgcgcacgatggcggtggcacccaccttggtgcggccttcgatgaacacttgggcggtcatctcaaacggttcgccgagttccacacgggcggggaagatgccacgctcctcggcgggagtgatgtccatgacattgatgcggccgaactggccgggctcgtttgcttcgatggacggtgcgggggcttcgacagccaggcctttcagcgctgctgcggcgcgtgccgtttcggcgctgactctcttgcgcttggttgcggggctctttcgggcagaagtcgtctttgacttcgtcttcgtggtgttgttatcggtattactagtgcgcgtggtcgcgcgatgttgtactgctgccataaggccctattctaggggcttttgaacatatgttgcacattgtggataactttcaggtaaacgttcggtcaaccgcatgaggtggataactcggcggaagagttatccacaactcgccggcaaacggcaagctcggaccacataggtcgaaagaccggctgtagcgaatgaaaatctgccatgatcgtggcctacccgcacacagtgcagtatgcggggaacgtaccaggaaaggacgaatgatgataacgacatggaggcaacggggcatggccatcgtagcgatgctgaccggtctgataataatggtgggagtggtgttcggctcggcgaatacggcgtatgccgcgacgttgacgcccgccgacgaaagatatcacgtgacgtttccatacaacgatatggaatattacgtcggtgtcgcggggctggacgcttcgggcaacaaatactactgcatcgaagcggggaaactgagcgactatgtgataggccccaccacggtgcttgcctccgatgagaacgcccggcgtatggcatggatccttgaccggtaccgcgacacggatgccgccacccatgcggcgatcggcatcatcgtgcaggatcacttcgggcgcgatcgggacgagtgggcgagacagatggcggtcattcaaggccggtatcccgagatcgtggcgaaggcggcccagatatgggatcaatcggccggcaagacgcctgcgggcacgacggtggaacgcaccgatgccgaggctttgcgcagcggttccatcttggtgaaagtggtgaaccgcgccggtgacgcgatcgcgggagtgccgttcaccgtcaccttgcaggggccggcgcggttcgtccaaggcggcaacacgttctcgggggtgtcgacgagcgccggatcctcgatcgcgtgggaggcgaccggtaccggcgaggtgacggcgaacaccacatacgagtatgggcggatgcacgtcatggacagcactcaggacatgctggccttcgattcgatggcttccgccggcggttcgtcgtcgacgttccaggtgcgcaaggatttcgttccgtcggtgtccacgcaggtgtccgataaggtgcttgatgcggcttcgccggtgttcgatgatgtgaccagcggcgtgggggacgagggcagtcattgggtgcccggtctgaagctgcaggcgcgtggatactatttcgacgggctcggcaaggacgatctgggcaaggtcatcgcgccgaacgcacgggagagcgcggacgcttttctcgcccggctggcgtcctcgggttatgagccgagtgcttatggcaaggcgtccttcaccggtgtggggcagcgggttcgtgtgcgggccatggccaagccggacggtgacgccgcctatctgactccgaagaccggcggctttggcacctgggtgtgggtgttccggcggagcgagcaaagcaaacgggcgcaggaataccttaccggcgactgggtgagcccgttcatggaggcttcggaaagcaacgtggggcgcgggaaggtcgaagtcatgtcgacggttactgaacattcggcggatatcggcgccgaactcagcgacaccatcaccgtatcggggttcccggcggaccacggccagttcatgggtgatgaaacctatggtttcgcggcggatcagccgtatgcgacggtgagcgtatggtggtccggcgatcccgacaacccctccaacgatgaggcgtacaagccatccgggggagaggtccccacggaagacgacaaccaccggttgctggccacctgggagattcccgcgatgaacggcacgttcaaaatcggcgccggggcgttggacgcgcatggcgctcccatgcatctgaccgccgaacggcatgggtggtacgtgttcgtttggcggttcgagggggatgaccgtgtttccccggcgtccagccggtatgacgatgcctgggagcgtgtgcgggtgttgcccccatgcgagtcggagaaaccgtgcgaaccggagaaacccgagacgccaccggcgccggcggaggcaaccacgcccaaccctcgcccgtcactgcccgtcacgggtggcgatgtgtcgcttgcctcggttctggccgtgtcagctctggcgataggcgccatactgtccatcgtcgttcggtggcgtcgttgctatgaccgatccaagcactggacgatgcgctggccgatacgttgacccgctgcggcatgatgccgatgatgtcggctggatggtgaaccgcactccgcttctgagcagaaggacgggagctgggcacgaagtcgattgtgacatacgacttgtgcccggcttccgcttcgttgagaaacttcacgcctgtcgtctcccgtggattagacaactgaaggtccgcgatgaaaacgacgagacgtttatgatcgccgacttccctgggcaccgtagctgcctgatcgcctttcatccatatcgccccggtcaggtcgtcacctacaacggcggcggcagcgtcgccaccggcagcaacgccccaccgtcccgtaccgtgaccgtccgtgcagaccctcggccccgtatggggctggacgtgggccgatccggccgcgacgaccatcagcgccgtcgccctgaccatcggcgtcgtcatcggcgccagcgccctcaaggccaaggcatccaaggccgaataacaagaagcccccgaacctgaaccgtatcacgcggcaggttcgggggcttttcgccgtatatgggtcaggccatcgcgggctgtgcctgattggcggtcaggtatgcggccagtgccttgcggatcagagcgctcttgccgatgtgctctcgttcggcctgtgcccgcacctgtgcgtccatgtcgggcgtgaggtatgccttgtagagcacgtcggccttccggcggggctggtcggcgagggggcggccggcgaagatgtcgtcgatgtcatccatcgtgatcgccctttgcgggcggatggtctcgccgatgatggcgggggtgtgctcggtgtattcgtccgagagctcgtcccagtctgtttcgttgctcatgatgtcctccttggtgttttttagtcgtcgaacttgtagagccattcgcggcggcagtccatcgcgtggaacaccttgcgggtgcgctgggataccagcagctccacggggcgttccctgaactcgtccgggtgtccgaggatcgccatgaccctgtcgccggcgtgtctcgactgcacctcgaacacggccaccggatgccggaatatgtagtcgatctgtggctgtgtgagccagtgcttgaaggctgacggctcgcattcgatcatgcttattatggtaccataatttagtaccacaatcaatttagtaccacaatcaagtcggggaaacggaacatcgtgatcctcctaggcggcgaggcgcgtggcttccacggcggcgcgcagctggtcgtcgggcatggcgatgtaccgttgcgtggtctcgaccgaggcgtggccgctccaccggccggggagcagatagccgttggcggatcggatcagcagggcgaggtcgtcgccctccacgtccctagatcgcccttaagcgccctcgacaatgcggatatctggcatcggcgcgtgccgatcgtgttgggggagtagcccgccgccttgagggagtcgagccatagattgattgattctgcccagagcgggcttggatgttgttttttcacaggacatcatcgccccgatcggatatgcggccccgtagggcacgacggcggataaacgaaaagccgtcacgaataatcgtgacggcctcgcccgcagtagcggggcatggatttgaaccatggacctctgggttatgagcccagcgagctaccgagctgctccaccccgcgtcggcttgtctctcagacagctctatctacaataggtgcagattccagaaagtcaacatcggcgtgtcgtgtcattttcccacggttttaaaacgtgaatcggctcacgcagcgaggggtttggggcggagccggagtcggggtgataacgcgccataaatggccgttataggaatgccctgaaccgttatcccgaatattgacataataggaacatgcctatcaagatccccagtggcctgccggccagagatatcctcgattcggagcgcatcttcgctctggagaagcccgaggcggagcgtcagcgcgtccgcccgctcaaactggtggtcctgaacttgatgcctaagaaaatcgagactgaaacgcagctgctgcgtctgatttccaagtcgccgctgcaggtcgaaatcgacttcatgaagacctccacgcatgaggccacgcacgtttccgccgatcatctcgtcaagttctacgaaaacctcgatgcgttcaaagacaactattacgacggttttgtggtcaccggcgcgcctgtagaacatatgccgttcgaagatgtggactactgggacgagttcaagacgattctcgactgggcctccacccacgtgttctccactatgtacctgtgctggggcgcgatgggcgcgctgtatgagcgctacggcattcgcaaggtcgattaccccgagaagatcttcggagtgttcccccaatatctgcaggatgaatactgcttcctgaccaacggcttcgacgagatcgcgctgcagccccactcccgtcttgccggcgtgaacgaggatgatgtgcgcgccaaccatgatctgcagatcctgacctggggtccccagtccggacccggcctgatcgccacgcgcgacttctccgaagtgttcgcgcttggccactgggagtatggcaagtacacgcttgccgaggaatacgagcgcgacatggccaaggggctgaccaacgtgccgttcccccggaactacttcccgcatgatgattcggagctggagccgctgttcgcctggcgcgcgcacgccaacctgctgtggcgcaactggctcaactgggtgtatcagaccacgccgtacgacctgaccgaggtgccgcggttgagggccgagaagaagctgggtaccgaccgttcgattcggcatgagccgggcgggccacgtgaggatgacttcaagccgtttgttcatgacggatacggggttattcagggctgagcgttcgcaccgtggacggcaatccgtccacgatacggacaacctgatgaacataatgccacacatccgccatatgcgaccaatagcgcgcgaagccggcgaaacgcccgggaaagccttgcgccagtaggcctcggaaaagactcgccggtgtaatattgactttgtctagacacaggcaaataatcactcttcagtcattcggagtcgaatgcccagcgtcgactccccgtccgcgcccggcatgctccatccgaggggcgcgaaagttacgagtacgtcacattcgcacatctcttgggtttaaactgacacctgatattgaagaagcaggaggcgtgatatggtcggttcgctcggcgcaggattgctgttggctgacgaggcaggcgctcatctgccctcggttggtgacttccttcccccggagattctgttccagggaactccgtttgctatcaaccgcattattttgattcgtatcgtggcaaccatcgtgctgttggtggtgctcggcgtgaccgcaaagcgcgccaagctcatccccggccgttggcagggcgtggtggaatacggtcttgacttcgtgcgtgacaaggtcgtctatgacgtgatgggcgaggttcgcggcaagcgctacgtgccgatgatcaccaccatcttcttcacgattttcatcttcaacctgtgtggcatcatcccgggtatgaacatggcggccaccgccactgtggtcatgccgctggtgttcgccatctggaccatggtccagtattggatcgccgccgcacgttcgcaaggtcttggccattatctgcgtcacgagctgttcacccccggtgtgccgtggccggtctacatcctgttgaccccgattaacatccttgagttgctggtcatccgtccggcctccctgaccatccgtctgttcgccaacatgatttccggccacctgatggtcgccacctgcctggcattcgcacagtactggatcgtcgatgcagccaacaagctgcaaggcatcccagtcggcgcgatgtggttcgtcagcggtcttgccatgacgtgcttcgaggcgttcgtcgccttcctgcaggcttacgtcttcgccattctttccaccgtgtacatcaacctaagcttcccggaggagtgaggttcaaccccctctttcggaacccggcctcgcctaggtaggcaggaccgaacgaaataagatttataacgtcgccaagtacgttagaaaggaaacacaatggatatcatcaccctcgcagcggtcgccggcaacctgtccgtcatcggttacggtctcggtgcggttggccctggcatcggtctgggcatcctcttcggcaaggccatggaatccaccgctcgtcagcctgagatgtccggcaagattcagaccatcatgttcatcggcctggctctgatcgaggtgctggcactgatcggcttcgttaccgccctgatgttccactgatcgaacgttttctcagtcgaatacagaaggcaaaacgaatccaccagtgaaaggaggacttcataatgacgctcgcagaaggcggaattgatctgttcattcccgagacctatgacattgtgtggtccctgatcattcttgtcatcgttgcggtgttcttctacaagttcttcatgccgaagttcaatgcgatcttcgacgagcgcgccgccaagattcagggcaacatcgccaaggcggagcaggctaagaaggacgccgacgaggccaaggccaagtatgaggcccagctgagcaccgcccgtgtggacgccgccaagattcgcgacgacgcccgcgcagaagcgtcccacatcatcgccgacgctcgttcccgcgccgagtccgatgcggcccagatcaccgcatccgcacagcgctcgatcgaatctcagcaccagcaggccatcgtctcgctcaagggcgaggtcggcgcacttgccaccgccttggccggcaagatcctcggtgccaagctggaagacagcgacgtgcagtcctcgatgatcgattcgatgatcgacgacctgggcgccaagaagtgaccgtgaccatccgtaaccagaaagggaggtgaccatgcgaggagaggcatcacgtattgcagaccgcgagtcgcgtgattcgctggccccgaaactgcgcgacacccgtgaggacgcgtggcggatcggcaacgaactgttcacgatcaccaaggtgctcgatgacagcattcagctggaacgcgcactgaccgacccgtcccgcccggtcgccgacaaggtggccgtcctgaagggactgctcggtgacaacgcgcatcctatgaccatggagatcatgaccgacttggtctcccgccgttggagccgtgcgcgcgacatcgccaacgcggtggaggacttcggcgtggacgccatgatgtactacgctgacgccaccgacgccacgctgcaggtatccatcgagctgtccgagctgcattccgcactgctgaacctgccggtcgtccgctccaagctgtacgactgccaggccaccagcgaggcccgtgtgaagctgttccgcgaggtgttctccggcaagaccctgaacaaggtcaccatgaggctcgccgaacacgccacctgcaacctgcgccgccgccgctacttggagaccatccagtggctgatcaacaagttctcccgccacatgggcgagtcgatggtcaccgtgaccaccgccaccccgctgaagaaggagcagattgagcgactggtcgaggtctactccgccaaggtgggccgccaggtgcacatcaactcggtggtcgatccgaccgtactgggtggcatgcgcattcaggtgggcgacgaagtcacggacaacaccgtggtcgcacagctgcagaacctgcatcgcaaggtgcagacggaggcgactccggcctgaccggccgagccaatccgtccaacaccacacacaagcaaagacttgactgaacaataaccaatagaaggagtgatcatggcagaactgaccatcgatcccgcctcgattcgcaaggcccttgacgacttcgtgtcgtcgtacaagccgagcgacacccccacccaggaagtgggctatgtcgccacggccggtgacggcattgcgcacgtgacgggattgcctggttgcatggccaatgagctgctgacgttcgaagacggcacgctcggcctggcgttcaaccttgacgcccgtgagatcggcgtggtggtcctcggcgatttcgcaggaattgaggaaggccaggaagtgcgacgcaccggcgaagtgctctccgtgcccgtcggcgacggctatctcggccgtgtcgtggacccgctgggcaagccgatcgacggcctcggcgagatccagggcattgagggtcgtcgtatcctcgaagcccaggcccccgacgtgatgcaccgccacccggtcgacgagccgctgtccaccggcctcaaggccatcgacgcgatgaccccgatcggccgcggccagcgccagctcatcatcggcgaccgccagaccggtaagaccgccatcgcgatcgataccatcatcaaccagaaggccaactgggaatccggcgacccgaagaagcaggtccgctgcatctacgtggccatcggccagaagggctccaccatcgcctcggtgaagcagagcctggaagacgccggcgccatggagtacaccaccatcgtggcctccccggcagccgattccgctggcttcaagtacatcgccccgtacaccggctcggccatcggccagcactggatgtacaacggcaagcatgtgctcatcgtcttcgatgacttgtccaagcaggcagaggcctatcgttcgatttccctgctgctgcgccgcccgccggggcgtgaagcctacccgggtgatgtgttctacctgcactcccgcctgctcgaacgttgcgccaaggtctccgatgacctgggcggcggttcgatgacgggtctgccgatcgttgagaccaaggcgaacgatgtgtccgcctacatcccgaccaacgtgatctccatcactgacggccagatcttcctgcagtccgatctgttcaacgccaaccagcgccccgccgtggacgtcggtatctccgtctctcgagtcggtggcgccgcacagaccaaggctctgaagaaggtctccggtacgctgaagatctccctggcacagtaccgttcgctggaatccttcgccatgttcgcctccgatctggatgcggcttccaaggcccagctgacccgtggtgcccacctgaccgagctgttgaagcagccgcagttccacccgtactcgccggaacaggaagtcgtgtccgtatggaccggcacccacggcaagctcgacgacctcgacctgaaggacgtccttccgttcgagcagggactgctggactacatcgaccacaacaccgatatcctcaagaccattcgcgagaccgaggaattcaccgccgacaccgaggctgccctcgataaggccgtggacgagttccgttcgacgttcgtctcttccgccggcaagccgctggtcgagaagaagccggacgttgacaaggccgcgccggttgatcaggaaaagatcgtggcgggagaaaagtaagccatgggctcgcaactcgcattgaaatcacgcatccactccaccgagtcgttggcgaagatcttcaacgctcaggagatgatcgcgtcttcgcatatcgccaaggcccgtgatgtggccctgaacgcgaagccgtacaccgatgcgattttcgatgccgtgcaagcgttggtggcccacacccatatcacgcatccgatcgcggtgaaggacgagaagaacccgcgcgtggctgttctcgccctcacctcggatcgtggtatggccggcccgtacacctcttcgattatccgtgaaacggagtcgctgctgtcccgcctcgatgcggcaggcaagcagccggagctgttcgtgtacgggcgtcgcggttcgacgtactacaagtaccgtaatcgtgacatcgcggcgacgtgggaaggcgacaccgaccagcccggcgtggaaattgctgaaacgatctccaacactttgatggacgcctacatgaagccggctgagaaaggtggagtttccgaactctacatcgtctacaccgagttcatcaacatggtggtgcaaaaggtgcgcgtgctgcgcatgctgccggtcgaaatcgtgaaaaacgagaccaaggtgcccgatcctgatgaagaggcaccggctactgcggatgtcgctccgctgtacactttcgagcccagcctcgaaaaggtactggacgcgattctgccgaagtacattcagtcccgcatccacgagtgcctgctgaccgcggccgcgtcggaaaccgcaagccgccagaacgccatgcacacggcaaccgacaacgcacgaaacctgatcgacgaccttacgcgcaagctcaacgcttcccgccaggcctcgatcacccaggaacttaccgaaatcatcggcagcgctgacgcgctgaccaagaaggaagagtaggaacgcatatggctgacaaccagaccactgcggccgagcctaccaacggtcgcgtcacccgcgtccagggctcggttatcgacgttgaattcccggtgggtcatctgcccgacatctacaacgccctgaaagtaacgatcgtcaacaccggcgccaaggaagaaggcgaggcgaaggagaccgagatcaccctcgaggtcgaacagcacctcggtgattccacggtccgttgcgtcgctctgaagcccaccgacggcctggtccgtggtgcctccgtctccgacaccggcgccccgatctccgtgccggtcggcgacgtgaccaagggccacgtcttcgacgtgtccggtaacatcctcaacaagaagccggatgagaccatcaccgtctccgagcgttggcctatccaccgcaacccgccggccttcgatcagctggagtccaagacccagatgttcgaaacgggcatcaaggtcatcgacctgctgaccccgtacgtgcagggcggcaagatcggtctgttcggtggtgcaggtgtgggcaagaccgtgctgattcaggaaatgattcagcgcgtggctcagaaccacggtggcgtgtccgtgttcgcgggcgtcggcgagcgtacccgtgagggtaacgatctgatcggcgaaatggccgaggccggcgtgcttgagaagaccgcactggtcttcggccagatggatgagcagccgggtacccgtctgcgtgtcccgctgaccgcactgaccatggcagagtacttccgtgacgtgcagaaccaggacgtgctgctgttcatcgacaacatcttccgcttcacccaggccggttccgaggtgtccaccctgctgggtcgtatgccttccgccgtgggttaccagccgaacctggccgatgagatgggttccctccaggagcgcatcacctcgacccgtggtcactcgatcacctcgctgcaggccatctacgtgccggccgatgattacaccgacccggccccggccacgaccttcgcccacttggatgcaaccaccgagctgtctcgtgacattgcctccaagggtatctacccggctgtggacccgctgagctccacctcgcgaatcctcgatccgcgttacgtgggccaggctcactacgactgcgccaaccgcgtcaaggcgattctgcagcgtaacaaggagctgcaggacatcatcgccttgattggtatcgacgagctcggcgaagaggacaagaccaccgtgaaccgcgctcgtaagatcgagcagttcctcggccagaacttctacgttgccgagaagttcaccggtcgccccggctcctacgtgccggccgacgagaccatcgaagccttcacccgcatctgcgacggcgtgtacgacgacgtcccggagcaggcgttctccggtatcggtggcatcgatgatctcgaagagaagtggcacaacatgcagaaggaactgggtgcgtgatggctgcggaaaaaaccacgatgaaggtcaacatcgtcgccgctgaccaccctgtgtggcacggcgaggcgacgagcgtgaccattcccgcctctgagggcggcatgggcatcctgcccgaccatgagcctgtgctcacggtgatcaagcagggtacgctcaccgtggttgagcccgatggcgatcgccacatgttcgaggtgaccgacggattcatctccttcgactcgaacaaactcaccgtggcggtcgagcgcggccacgacgtccagtactccggcaccgccgagtgatctgaaccaactcctcaaggggctctctggttttccagagagccccttttgctatgtatgccatgtgttgcgctacagtggtggcctatgcgagttattgttgccgactgttcggccgagtattcgggccgcctcaacgcctcactgcccctggccaagcgtgtattgctgatcaaggctgattccagcctgttgattttctccgaattgggctcctacaagccgctgaactggatgaccgcgccctgcacgattcgtgagatcgacccagccgccaaatccgcgcaacattcccgggaaagtgtcgctggtggggctgtggatggtgattccgcgacgcattccccggaaagtgtcgccgctggtgagccggaaaaggtgctacgtgtcagcgccgacaagggctctgacattcttgaagtgacgctgcaacacgtctattccgaccaaacctatgatctgggcgaagatccgggtctcatcaaggatggcgtggaagaccatctgcaacgctatctggccgagcagatcgagcgtatcggcaagggagccaagctggtgcgtcgcgaataccctaccgccattggtccggtggatatcatggccgtgaatgccgagggcgagcatgtggctgtggaaatcaaacgtcacggcggcattgatggcgtcgagcagttgactcgctactgcgaactgctcaatcgcgatccgctgctggccccggtgcatggcatcttcgccgcacaaaccatcacgccgcaagcccaggtcttggccaaggaccgcggcttcacctgcctcatcctcgattacgacgatatgaaaggcaccgaggacgacagtctcaggctgttctgattgttcttggcttccctcttgaaggggagttttcgaacgtacatagagagactgaggggaggcctcacggtatattccgtgagacctcccctcagtcagtttcgctgccagctcccctcttggggagagccatcgagattgtttagtacgcggcgagaatatcgattacgaagaccaacgtggagttggcgggaatcgaaccttgctccttatctccataggcctgatccggcggaatcaccagcagaacctgagagccgacggtctggccgaccagacccttctgccagccctcgataacctgatgctggccgctggaatcgctgaacagatcggcgtcgattgtggaatcgcgatcccaggacgaatcgaactgcttgccatccgtaagccaaccggtgtacttgaccaccacggtgttcttgtcggtcagcttggcgccgttacccttgatcagcgtctgcgagatcagcgaatcaaccgaaccctgaccgttcatgtcaatggacggcttgccattcttggctcgcgtcaccttcggcagattggccggcacatccttgacttcctcgccagtggccttcttcaggtccttggacttggatacaaacgtcatcgccaaaatgtaagagtatccggacgaatcctgagcgttgacgccaaagccgatcgtggtgttgatcttggcacccttgatctggttgtagtaggtcgaggagagggtcttggaatccaccttcagcgagcaatccggcgtgttcttggtccaggtgtccatgagctcggtgccgtctttaacgttgagcgcgatgccttgggcgcagacgcggtcgccctcctcgattacgtcgccatcgcccttttgcagcaccacataggagccgtcggacacggtcatcggcgtattaaaggagatggtcggcttctcgccgagcttgcccttggcggtcacgccggcaatttgccccttcttgtcagaagagccggaagaggatttcgagtccgagctcgaactggagcaggcagccagcgatacgcacatcgccagcgagcaggcaagagcaacggccttgccgagaggggataacatagatttaacagacttacgcatgacacaccaccctactggtgaaccttgattttctgcgctcctaggtaataaacaggtgaagattgtagaatggttaagttatgagtgctgaagaacagactacaagaccggataagggcgccaagcgtccatcccgtcatgccaagatcatgcgtggagtggtgacgcctatcttcggtctattggccgtggcggctgtggtgttggggtacatgaatgccacgatatggaagccctccactgaaatcaccgcttccgcaaccatgagcggctcccggtatgccgtcactgatccgaatgtgctgaccttgttggatcagaacgccacgataaccgtggactcgggatcctctcaggacgaggcgtgcgtggcgttgggtccgtccaaggatgttgccggatgggtcgcgtccgagaagtcctatacccgtatcaccggattggcgtcatggagcgagctgagcacccagaagggaagcagcacgagtcagggagcgcctgccagtgccgatgacgcggtggcgttcaaggattccgatatgtggactgccgtgaaatgcggcaccgggtccgtttcgctggagagcaagaagaccggcgcctcgacggtggccattgtggatttgggtgaaaatgccaccaacgccaaggtgcagctgcactgggtgcgctccgaagtgccggactttgcgatgccgttctatctgtccggtggattgctggccgtgctggccgtattgtgcgcctccgtgttcgccatgccgccgcataagcgccgcaagcgcatggtggaaggcacggcaagcgccgtaattgaggaagaggcacccgccagcatcgcagtgtccgggaagccggatggtgcaagtcgacgtaatcgtcgccgccacgccacaaatcggcgttcgggccgtgcgtcctcgcaatctgaagccaccgaaacaccggttatcatcgacccaagttcacgtaacctggtcgccgaccagcagactggtgccgagagcggcgctgagaccggcttcagcgccggcgataacgaatcgacttcggtaatcacccctgacgaactgcaggcctacttctcccgcttggcccaagaggtcaataccggagacgactcggccgatgacggacaggaggaaagctgatgaacaagcgatggaacaaactgtgtgtggccgccctcgcctgcgtggcgttggtcgtgccgttgaccgcctgtgaaggccggctgccgacgccggctgctgatacctccaccaaggttgcgccggatttgaccgaggcacaggagaagaagattcgcctgaagattctcaagacgatcgatgaagccgatcaggccaagaatcccgatggatatgcggccgttatgggcgggccccagctggacattcgcatcagccagaccacgatcaaccagcgcggcggcggtatgtccaaatacgcgaccattcccaaggacatcgcccagacggtgattcccatggacgacggatggcctcgctcggtgttcaccatcacgaccaccaccgaagatcagcagtccaagcgtttgctggtcttcgatcaggaatccgcccagcagaattacaagctgatggccatggctcgactgtttgagggggccaagctgccgaagttcgagattccgactattggctcgcagatgggcactgcaaaggatgagaagctggtggccactcccgccgatgccttgacccaatacgccgatgtgctgcagaacggctccaagagccaatacgcttccaagttcgcagacgatttgctgcgccaggaactggccaataccacggccaaggtgcaggaaggtatgcaacgcaacaacggtacgcaggagcagaaattcaccgttgtgcctgaacagatgtgggtgatgcgtgctgcagatggtgccggtgatttggtggttggccgtattaacggcgaatggactcgcaaggcgggggatggccgcgaatcgcagccggcttccgacgacgagaaggcgctgttcaatagcgacaagtacaccagcaccatgaaggtcacgtatgtgaacgtggtggccttgtacattccgttggcaagctccggtgagcaaatcaccgccgtgggcgccgaccgtcagccggtaaaggtcgaagcgctgtagttgttgccgccgcccaccgcgcggttaacgccccaccacgatatgattcatccaccacgatgtcggtaagttttacctttcgcacaatggtgccgttttgagtcacatcgtggtgggcgttttgctacgtggtgggaatttcaccgcgtagtggaagaatccctacgtggtgggaatcggcattacaatcaatgtcagcaaatgtgattgttgttgtacgcgaatcgcgtggaatcgggaggcattatggcagagcagcagttcaatccgggagtctcgttggcgggcgccgtcgatttggaggcgctgaagcatcaggtcaaggccgagcccggccaggcgggtggcgctcctgccgctggtgggtacgtgatcgacaccaccgaaaacaccttccaggcaatggtgcagacttctgcgaccttcccgatcctgctgctcctgtggataccgaccgatgaccgcctgttcccgatggcccgtgcgttgggcgacgcggtgaacgccctgaacggccagattcagctctcccgtatcgatatctcgtccaatccttcgattgcccaagcgttgcaggtgcagggcgcgcccgcactgttcgcgttgattgccggccgtccgatgccactgttgcagggtcttccgggtgacgacgagctcaagcaacttaccgacgaggtgattccgaagatcattcaggccgccgcgcagtctggtgtgaacggtaccgcgccgtactcgggtgatcctgattccgatgccgccaagagcgctggtgccaccggtgccggcgtgggtgctgagcaggtgccgccggagcatgccgaagcccatcgtttggccgaggagggcgattacgccggtgccgccgccgaatacgagcgcgtgctcgaatccgacccgtccgatgcactggccgcccgcgaacgtgcgaaggcgctgttgctggcccgctccgggtccgctgatgtacgtgacgtgcgtgccgctgccgccgcagcgccggacgatgtggaagcgcagttggctgtggctgatatcgacatgatcggtggccagattcaagacgctttcgaccgtttgctggactttttggccgccgggcacaaggccgatatcgagccggttcgcaagcgtctgctcgaatacttcgccatccccgaacccaccgacccgcgtctggctcgcgcccgccgtcgcctagccaccctcatgtactaagtggttttggctcccctctttgagaggagctgtcaggcgtagatgactgagaggagcgcgcgagcgtacttgattgattcccctaaaccatccgattcttcccgaaatattgctggaaccttggcccctccagcgccagttcctcctcgaaatcatccgcccacttgcagaacggacggttggcgagaccatcgttattgaatcgcgcctgatcggtgatttcggtgatgcagaatttcggaatcgtcagattggtaaccggcccggatcgttcggcctcggctacgatcagcggcgcgttcggcccgccgaacacgtccacgctccagccgtcttccgcaatccacacggaataccggttcttgatgattaccgagccgccgcgcttgatgagttcggcggcgatgcgcgtgtcgatctcgcgctcgacctcgtagcgcgtgccacccgcggacggacctttgacggtgacatacgcttccgagaaccggtcgcggtactcgtccagcacggccaccggatttacgtcgggcgtcatgtcgacgtgaaccttgtgcgagaccagccgcacgcgcaaggcgtaattgtcggcatgcacgtagtagctctgaataatgagggtcggggcgtcgccgtcgtcgtattccgccggcagctcgcggcagaagaagcggcgttcgtattcgaagtcatctgtaggttccgacataaccccattgtagagccgatgatggcgattttctcgttattttggcgacgtatgtgcctcatgcagcgtgatgtggtgtacagtaaagaagttgctcgggtttgtagctcagtggatagagcgtctgtctccggaacagaaggtcgtgggttcgatccccatcaagcccaccagcatggctttcggctagtcgccggaagccttttgcatattcggcgcgtgatattaagcgcgtgcaaagctggtgctggtgctggtgctggtgctggtgctggtgtcggggtcggtgatgccggctcgcttgggtcgtggaaaaaccgcccggtttggcgagaacggtagtcgaatcgtctggaatcgtctggaatagcaaggaatagtctgttgatggccgtatgccgggcatcatgcgcgctaaacgcgacttcgctcagtagactgctacgtaatcggcattgccaatcgttgctgatcgtgcgattggtcgtagccggtggtgatgtgtaccggcgccggccgcagcaggtgggcgcccccaagatgagaaggagcacaatatgagcgaaaagatggaagccgtagccacttccgaggcgccggccgcgctgggcgcatacagccaggcggcgaaggccaatggcttcgtgttcgtatccggccagctgggcattgatccggccaccggcgaactggtgggcgagaccgctggagagcaggctgcacaggcgctgaagaatattaagcacattctcgacactgccggtaccggcattgagcatgtgtgccgcgccaccatctacctgaagaacgtcgaggacttcaaggaagtggacgcacgttacgctgaggcgttcatcggctccgtcaagcccgcccgcgtggcctttggcaacaacatgattcccaagggcgcgctcgtggagatcgacgccatcgcggtggagtgattcgaacgttttcccggcggcccgtctgcgcgcatggtgtgtgcagacgggccgccgcgtattgtgcgacgcattcccgggaatgtcgcgctaggcggggtgtgaggggtggttccgcggcacattcccgggaatgttgcgctggaatcgttgggcggtggtccgtgccacaatagagaccatggcatccaaaggaaaaccgtcgccgcgttcggccgtaagcccgctgagtgatgagcaggtcaagcgtctggccgcccgccacacgcttgtggactcgacacagtattacccgaccggccctcgcacgcccaatcagccggaaatcaacgcccagaatcccaaggccaccaaacgactgctgggaggggtgtccattgtgttccgcgccagctgcaagaccaaggcctggggcttggaacaggtgccggaaaccggaccgttcatcaccgccgccagtcatatcaccatgtttgatgtgttcgtgccgatgatgagcctgttccacatgggccgccgcccccggtacatggccaaggctgagatggcgaagtggccattgatcggcaagtggttccggttggtcggcatgcagccggtgcagcgtcattcgggcaaggccaagcagatcgaagagacctcgattgatattctgacgtccggccgcccgctgacggtctggccggaaggcaccgtgacccgcgacccgaaaaagtgggtgatgagcattaaggagggcgtgggatacatcgcccttgaatcctcgcgcagactggggcatcaggtgccgctgtaccctgcggtgacgtggggtgccgcctccatcaaccactggtggccatggccgcgcaaaaacgtggtgatgtgctatgaccatgcgctcgattactccgatctgcttgccgacatggactcatggggtgaagaaccgcctgccgaggccgtgaacgagctgatgtggcgcgtgctcaaacgcatgaacacagtactggaggaaattcgtggcgagcagttccccgctgaaggctactgggactaccgcagcatgagtcgcaagccttggccggaagccggcggcccgttcccggctgagaagtagccgcaccggttcccgtacggggagcctaggcgagtagcatggcacaagattgtgccgatgaagttgcgcgacaagcgaaggtaggaatctgatatgggtaaaaatataacggttctcggtgcaggagcatggggtaccgctttcggccaagtgctggcggacgccggcaacacggtgaccatgtgggccaaggagcagcggattgtcgaggacattcgcgatcgccaccacaacgccgtgcgcctgccgtccgtcgaaaagttgccggacaacatgaccgccaccggggatcgcgccgaagccgtcaagaacgcggacatcgtggttgtggccatcgccgcgcagttcgcgcgagtggcactcgtcgaattcaagggactgattcccgatcacgccatcatcgtcagcctgatgaagggcatcgagcgtggcaccaacaagcgtatggacgaagtcgtccgcgaatcccttgacctgccggccgaccggttcgccgccatttccggaccgaacctgtccaaggaaatcgccgatcgtcatcctgccgccaccgtggtggcttgtacgaacctcgataatgccacgaaggtggccgaggcatgtaccacctcctatttcaagccgttcgtgaccaccgacgtcatcggcctggaaatgtgcggcagcctgaagaacgtgaccgcgctggccgtgggcatggcccgtggtgccggctacggtgagaacaccgcagccatgatcgaaactcgtggactggccgaactgaccgcgctgggcgcagccgctggcgccgatcccaagaccttcttcggcttggccggtgtgggcgatctcatcgccacctgtggctctccgctgtctcgtaactatacgttcggcgcgaatctcggcaagggattgacggtcgaggaggccaccaaggtcagcaacggtgtggccgaaggcgtgcccaccacggatgcggtggtggctcttggcgagcagcttgatgtgccgaccccattggcgtatcagatgagccgcgtgctgaacgaaggcatttcctgttcggagatgcttgccggactgttcgggcacgaggttaccggcgaataacgagagaagcgacgtacacgtggcgtatacgttgtacgtgcaaagtcgtgtggcgtatacgtcgttgacgtgcgcgagtagactggtgtgcgtctcttgtgcgcggcggtccgagcgcggttcggtccggttggcggtgcaaagcataggcttgaaaacggttgtagtttcaataaaaggatggttatggccaagaagcgtgttgtggtgctctatggtgggcgtgcagacgagcattcgatttcctgcatctccactgccggtgtgctgggggccatggacactgaacggttcgagccgattccggtcggcatcaccaaggacggcaagtggatcatcaacggcgaagatcctcgtggctggaacttggatggcggcgagctgccgaccgtaaagatcaccccgggatcgcgcccggtgatgcttgacccctctcgcggccaggacggtttcttcatcggcgagcccagccgcatcaattccgccgattccggcttcggcaccagcttcgtcagcatgtccgacccggaaatgcaccatgcgctgacctcccttggccatgtggacgcggtactgccggtgctgcacggcccctatggcgaggacggcacggttcaaggcctgctggaaatgatgggtgtgccgtacgtggggtgcggagtgtttgcttccgccgcctgcatggataagcattacaccaaggtggtgctgggtgccgccggcattcccaccgcgcccggtgtgacggtcgatgcgcgcaacttcaccgccgccgatgtgcttgccaagatcgaggacgccggtcttacctatccgctgttcatcaagccttcgcgcgcaggctccagcttcggtgtgaccaaggtcgagaaaaccgatgaccgcgagacccagcaggatcgtctggccgccgccatcgccaccgccggcgagcacgactggaaggtgctcgtcgaacaggggattgatggtcgcgaaatcgaatgtgccgtgctgtgcccgaaggccggtgacgagcccgaggccagctggcccggcgaaatcgtgctcgatcatcagaacgacgaccagttctacgatttcgactccaagtacatggatgcctccgccagccacgtggaagtgcctgccaatctgccggtcagcgtgcttgaggacgtgcgtgacgtggcccggcgtgcgttcaaggccgtggatggtgccggcttgagccgtgtggacaccttcgtgacgcctgatggcacggtgatggtcaacgaaatcaacaccatgcccggcttcacgccgatttctatgtatcccaaggcttgggatgccaccggagtgagctacaccgaactcatcacgcgattgattgagggcgtgctgaggtaagtgtggtgcggaatcggccaccaaggaagaaggcgcgctgaacgtcatcgccttgccgcatgattggtccaactatggcgaggtcatcgagggcttcaagaagaagtacccggagatcaagatcaccgagctgaacccgaacgcctcctccaaggaggagatcgacgccgccaagaccaacaagggtaccgacgccgcccccgatgtcttcgacgtcggccaggccatcgccgccacctccaccgactatttcgccccgtacaaggtgcaggcctggaacaagatccctgatgctgccaagaacgtcgacggcgcctactacgccgactacaccggcatcatgtccgtgggctggaacgccgacaagtacggcgatgtcgcctccctgaacgacctgctcgatccgaagttcgccggcaccgtgtccctgaacggcaagcctaccgaggccggcgcggccttcaacggctatctgatggtcaaccagctcgccggcggcgacatcaacaacctgcagcccggtctcgacttcttcaagaagctcaaggaagccggcaacctgaacaccatcgatgtgaccaacggcaccatcgactccggccagaccggcgtggtcttcgactggacctacaaccaggcctcctacaagaaggaactcaagtccaagggcgtgaactggaagtacaagaccttccccaaagcccaggtcgtcagctactacaaccaggccatcaacaaggacgcgccgcaccccgccgccgcacgcctgtgggaggaatacctgtacaccgccgaaacccagaacctgtggttcaagggcggcgccaacccggtgctgctcgactccatgaaggccgacggcaccgtcgaccagaccaccctgaaggacgccatcaccatcgaaggccagccggtcacctacagcaacgatgactccacccgcatcaccgagtggcttcaaaacaactgggacaagacgatcggcaactgagagtccacgatgaccgccgcaatcgcacccatcgcaccgaacggacccgccgcctccaaggccgcgggtccgtccgccgcatcgacccccgcttcgtccgcactggcgaaacaccgtcaggagcttggcacgctcgccaccacgctcccgttcttcgcctacaccgcctgcttcctgctggcacccaccgtgatcgtgatcatcggcgcgttccgggatcgcagcggcggtttcacgcttgcgaacttccacaagatgttcgaagccaacaccattgccgcgttcggcacgtcaatcctggtgtccgtggcctcatccctgatcggtgccgtggtgggcgcgctcgcctcctacgcgctggtgatcggcgccaagccgaacggaccgctgcgccgtatggtcgccgccatctcatcggtgctcgcccagttcggcggcgtgatgctcgcgttcgcgttcatcgccactcttggcatcaatggcatcggcaccatgctcatcaaaaccctgactggctataccgtgaacccgaattggctcagctccctgccggggctggtgaccgtctactgctacttccagattccgctgatgatcatcatcttcctgcccgcggtcgattccattcgtccacagtggcgcgaagcctgcgagtcgctcggcggcaacaccgtccaatactggacgcgcgtggcctgcccgatcctcgcaccccgcttcatctcggcgttcctgctgttgttcgcctccgcgttctccgcatacgcgaccgccgcagccctgttctcgcagcgctcgattctggtgccgttgatgatccaaggtgccatgcgcaatgagatggaccccaaccagcagggcttcgcgcaggtgctggcattcgcaatgatcatcgtcgtggccatcgtcatgctgctgagccacgccgtggaaaagagggccggacgttggcaatgaccgaaacttccacaaccaagccgccgcagctgcgtgccgcccgcgtgcgcaaacagagcatcatcaaattcgtgatcctgttcgtcaccctggcgttcctgttcgtgccgctgctggccatgttcatcttcaccctgcgtcacccgttgtccggtcgctggtcggccgcgccgtggacggcgattttcaccggcaacggcgaatcgttgggcgccgatctgagcgtgctatggcagggcgtcggcatctcgctgtcgttgagcgccgtcaccgtcgtgatcatgctcatcctgctggtgcccaccatggtcatcgtgcatattcgctccaaagccttggagcgtgcaatcgaatgggtggccacgctgccgctgaccattccggccatcgtgctggtggtgggtcttgggccgatctaccgttggctttccgccgacgtgttgagcaccaacccgatctggctgtgcttcgcctatgtgattctcgtgatgccgttcgccttccgcgcgatcgccgtgggcctcaactccatcgacgtcaagacgttggtcgaagcctcccgatcgctcggcgcctcctggcccaaagtgttcttcaaggtgatcatcccgaacctgtggcagtcgatcctctcggcatccttcatctccatcgccgtggtactcggtgaatacaccgtcgcctcgctgctcggccgtatgaacctgcaggtcgcgctctaccagctcggccaatccaatgcccaaatttccaccgccatgtcgctgctggctctgctcttcggcgtggtgctcctcgttgcgctcgacctgatctccgacgcaatgcgtaagtcaagggaaggtaagtgacccgatgaacaacgattcaactcccacccgtcaggaaaccggtaccgcagtggacgccgccccggcgtccccggccatcccggcagccgtgtcctccactgccgaggacgccttcaagaacgatcccaccgctaccctcgagggcgtgcgcggcaaggacgtgaccaaggctgccaaggccctgctcaaagacaccgccaagcgcggcggtggttccattcagatgcagaacgtcgtcaagatctatcccggctccaccgttcacgcgctcgacgacttcaacctggacatcaagcccggcgaaatggtcgtgctgctcggtggatccggttgcggcaagtccaccgcgctgcgatcgcttgccggtctcgaagacatccaaggcggacgcatcatggtcggcggacaggacgtcaccggtgtgccggtgaacaagcgcgagatggccatggtgttccaggcgtactcgctgttcccgcacatgaccgccctggagaacgtggaattcggcctcgaagtgcgcggcatgggcaaggccgaacgccgcaagatcgccatggaacagctggagctcgtggggcttgccgatcaggccaagaagtacacgcagcagatgtccggcggccagcagcagcgcgtggccttggcccgggcgctggccatcaagccgcgcgtgctgctgctcgacgagccgttgtccgcgctcgacgccaaagtgcgcgtccagctgcgtgaccagattcgccgcatccaactcaccaccggcaccacaaccgtcttcgtgacccacgatcaggaagaggcgctggccgtggccgaccgcatcggcgtgatgaacaagggcaagatcgagcagatcgccgccccgcaggacctgtaccagcgccctgccaccgagtacgtggccacgttcattggactcaccaaccgcctgctcggcgcatccaatggcgacgaggccgtggtcttcggccagcgcgtgccgctgctcgccggctccgccaagggcgattccgtggccgtgctcgtgcgcccggagaacctgatgctggccttggctggcagcagcgattcgcacgtcggcgaacgcgcccgcgtggaggtcattcacttccttggctctttggttcgtgtggacacggtcatcacctccggcgaataccagcgctggaacaaaggtgaacagctcaaggccaccgtgcagctgcccgccagcgagctgccggccggtctggcggtgggcgatgacgtgattgtcgccccgcgtccggtcgccacgctcgcctgctgaatggcgttgcgatgatcgtgcggttctgttctgttttgtgactgtacgatcgtcgaatggcttatcggcaatgatatgtgtgggatggcggcgatttttgggcgattatcgcgggccgtcccacgccggtgtgggatggcatgaacgtcaaacgatgtacattcgtgccgtcccacagattgtattgaggaatcgttgcaatgacgccatttcttcgtgcggcgtcatcagtcatatgtggagtggtgtgggccgccgcgaaaaaatcgggcaaaatcgcgtgccgtcccacaacaatcccgcagagtagaggactctctcggcatggggattgattgacgtagatcattccttgcccattgatgattttccccattcccaatgcaatcgaaacgccgtgccgtattcttgaagagtattgcacgtgtgatcggtccgtttgcggccagtgactatgggggataagtatgagcgaaccaatgccgtcggcgcagcagccgcaggtacctgagcaaccacagcagccgcaacaaaccccacgcgattggtggttcacggcccatcgccggttttcgacaatcggctcggcgctcgccattatgatggtgttctggatcgggctgaatattctggccactgaagcactacgaacgctgcttggcgccgatgtgcccgcttgggctgtgctgctcgcctcctccgggccgctgtatgtggtggccatgccgctgagtatgttggccttcactcgcgtaccggttattcgcacccggcagtaccccatgaaggcgggggagttcattcggattttcgtcatgtgcattccggtaatgttcttgggcaatatgatcggcaatatattgtctgccggagccactgatggtcaggccaccaatcgcatcaacgacgtgattcttggcagcgactggcgggtgaacgcattgttcataggcctgttggcaccggtttgcgaagaatggatttttcgcaaggagattatctcccgcctgcgccggtacggagaaaagaccgcaatcatgttctccgcattggcgttcgcgctattccatatgaacgtgttccagttcttctacgcctttggcctaggactgatgttcggatatgtatacacacgcacctcccgactgcggtattcagtggctatgcacatgctgatcaacctgaacggggcagtgctcgccccattggtgatacaacagatcgatccccgcatcctcgacggcacaatcagcgaggccgaaatcatgcgtatggctgaaaccggcaacatgggcggcatgggcatcatgatgttgtacggcacagtgatgttgggcctctgcattgccggtatcgtgctgcttatcaccaagcgcaagagctgggagttctatcttgcgccagaggagttgcctgcggggcttaaaatacgcaccgcctatgccaatcccggcgttatctcgtacctactgttgactgtgatgcttaccggttggatgctgttcgcatgactgtcatagccggacccagagaggcgagccgggagatatcacagattgtctgacgagccgccatcttcaacaaggtattcggtgcccgaaccggcgatggctcgcgccgccatatctttgatggtggaaggcagcacaccctcgcgcgcgaacacaagcacttggccggtcatgccgtaaggggagaagccggtgaacttgaccagcggtggctggccctccagtgccacgtcggcggtggctttggttacgcggtcgagaatatcctgactgatagcggacgggtcgccggaggccttggccgtgaattcaagcgtggccatgccttcgctggccggcgtgagcttggtcaaggcggcggtattgagtactgaattgggaatgaccatcatgtccccggagcgggtgcgcaccacggtctgccgccaggtgatgtcatgcacggtgcccgtgacgccttgaatggtcaccagatcgccgggctggattacgcggcccagcatcaggccgaagccgccgatgacgttggcgatcgtatccttcaaacccagtgaaatcgccacgcctccgacgccgagggcggtgaccagggtggtcggattgatgccgaacaccggttgcagtaccatcgccgtaccggtgacccagatggtcacgcgcgtgagattcacgaaaatcgaggcgctgggaatctgcgaactatccagaaccctgcgcagcacgcggctgatcacgcgatcggccgcgaacacgacggccagcacgacggccagccagatgagcttgcccgcattgacttggaaccagtgtgcgatgtcttgtgcatattcggtcatatgccctactgtatcgaccatttctggtgaagtcgtaaacatgcgggcccacgtcgggttttggccgttgcggtggtgccgatggtgcgataccggtggcgtgccgtcggcaccaccggcaccaccgcggcaccgcggtgcagcatcgtcgtggtgatgacgtcgccgtgacgcctagtcccgatgctcgcggcaggtttggccgaggccacgggccagtcgaatcggatcgagaatctcgtccagctgctcggcgggcaggtcggtgcgttcgccggccacctcgcgcacggtacggccggtgtgcacggcttcggcggcgatgtcggccgcgtgctcgtagccgatgtaatggttgagcgcggcggaaatcgacggtgaggactgggcatatgaacgccccaggtcagcattgatttcgatgccttccacgcagttgacgcggaacgtctccatggcgcgcgtcagcaacgccatgccggtcagcagctcatgcaccatcaccgggtcgaaggcgttcagctgcaactggccctcggccacagcccagttcacagtcacgtccatgccgaagatcgtgaagcagcactggttgacgcattcggggatcaccgggttcactttggccggcataatcgacgatccggcctggcgagccggcacgttgagatcgttgaaaccgcagcgcggcccggaattgagcagtcgcaaatcgtcggcggccttcttcaggtgcacggcaaggctcttgatggcggccgacgtggccacgtacgcgcccatatccgtcatggcggccaccggatcgggcgcggcggtgaccggcaagccggtgatctgcgccagatgcttgatggcggacttgcggaatcgcagatccgcgcaaatgccggtgccgatggcggtggcaccgaggttgagctgggccagcagcggcaccacgcgatcgaatgcagccaaatcggatttcagcagcgtggcgaacgaatgaaactcctgaccataggtcattggtacggcgtcctgcagttgcgtacggccgatcgtcacgtcattgatatgtttgtcggccagatcgtggaaggccttggcgagtttcttggtggactcggcgagcggcccgatcgcgtcgataagcgcgagtttgcaggcggccgggtaggtgtcgttcgtggactgcgactcgttgacgtcgtcgttcggatggatgtatgtgtaatcgccacgctggtggccggcgatttccagcgcacggttggcgatcacctcgttcatgttcatgttcgacgaggtgccggcaccgccctgcatcacatcgaccgggaactgatcggccagtttgccggcctcgatttctaggcaggcggcgcgaatggcctcggccttggccgggtcgatcaggcctaattcctcattggcgatggcgcaggcgcgcttgaccgtggcataggcgcgaatcagctcgggatgttggctatcggtgatgccggagaccgggaagttgccgatagcgcgctgggtgtgaatgccccagtagacgttcgccggcacctccatctggccgatgcagtcatgttccagacgggttttgttcgatgtttcgctcatgcttccatcttcctgtgtgagggctggaaacgccagcatgagaggctgattgcgccttgtgagaaacctcacgcgggggttcattcgacggaaacaatccagactcactggttttcggtcaagcggtgtacccggggaatcctgcggggccgttcgacggtgagatgggggatggcgcggcatgcgtggcggtggcctgcatgcagggggcggccgaatcctgcgcattgtgcacgaagatgcgattccagtaattaagcatgtccttttggctcatggccaggtatatgcccatggccagcacggccacatcttctttaagcaggtctttgatttcgatggcgtcgctcaattcgggccaacgttgcagcacggcgagcatgccgcccacggtgaactcgaccatgagatcggttttcagatcaaggttcttggggtcgcgttgcaatgtgctgagcatttgcagacggcagaagtcgcgcagcgattcggtcagttcaagcgtgctgtgcgggcctgccaacagggccaggcggtcgaggcgttgccgttgctctggatcggagagcgtggcggtgacgcggtctcgccattgttcctcgggattgccattggggtcgggggtgcggttgatcggaatcgattcgacctgatgcaggatggctgaatcggccaattcgggcaggctggagaagtgataatagaacgaattacggttcacgccagcctcacgcaccacatcggtgacggtgatcttgcggtagtcgcggtcggcgagcaattcccagaaagcgttctctaggcgttctttggcgggcagcacctcggaatcatggcgtggacgtggcatctcttcctcctgatgcaccagcgtgatatggtcacgctgtctaataacttattgggcagtataactattatttgtggacatgtctatgagctaatcggcgatttcagttgcgtcctccgctgagggcgaagctgcggtgtcagtgtcggtgtcggtatcggcgctggccggggccgcgctatctgttcctgtcgcagttcctgctggggtctcggctgttcctttggcggtcgcagaactcggcgcggaagccggggcgggcgtcggcctgcgtttggccgtggacgccttgaacagtatcgccagggcctcaaccaaatgacgccggtctgcgggggtcagccctacatacgcgccaagcatcgccggaatcgaagcggggaagttgctcatcacctcgctgaagctggtggcgccgttggcgtgcagcacggtgaacagcgcgtccaccgcacgctcgcgctgttcgggcgtaagcgtggcgatccaatggttcagctcctcgttaaacaactgcgagctggaactcaaatccggctcggtgatgaactggtcgccatccaatagccaggtgaaggcggaatgctgcataatgccatccgaatcggaagagaccacgcggcaaggctccggggtctcgaaaatcatgcccacaatcgacgaacttggcacgattttcgtcaccttcggctggatggtgcggtaggcggggctggtcacaatctccggcgggaaaccggggccgtccagtgaatagacatgctgaatgcgcttgcgcaccttggggtcggcgttcatggccgcgtaaatcgccagattgcctcccttggaatggccgaccagaataatcggaccctcccacagtcgcgccaccgtatccagataggcgctggctgaacgttgcgccggcaccggatactggaaagccatattgaaatcttccttccatccgatgagcgaatcatcggtgccgcggaaggaaataaccaacgtgcctttgtaggtcggctttcggcgcttgtggccgtcgggcagttggaaggtggcggcggcgaattgggtttgctcaccctgattgatgtgctcgaccaccgcgcccagacgaacgttggcgtagcgggggttctcgcccgcggcctggaacaggtcgtgggtcaggtccggattgaccactgaaaccatttgggcttcgtgcgtcttgtcgtcggcatgcgtttccggcgaacgatgcagctcgcggttggcctcgtcaaggctcaccgattcaagctcgggatgccagatacccttcagccagatcagtggatgcttgggctcgaaagcgcgaatgcgtgcggcgaacgagcctgactgcgtctcatccagcatcaacgtcggacagatactggccacatcctcatagatgagcgtggagatgatcaaggcgtcgatttcattgaacggcaagtcggcgaaggagcgcgtttcggtgtgcgcgtaatcgataatgccggtcatacgcacctcctgcttccgttgatattgcatatccccttgggccatgtggtcttgcgattgcgtgcggccgtgcggctgcgcgcagcaattaaccatatacattccattgtagggattgtacggttttggccggcgcgatcgagcaagactgcaccgacggcgaacaattcgtgggaggattcccgtcagcttgtcgaaaattgtcgggtagcgggggttgcgatgccagccagccgaccatcctccggcgctacgcgccatctcccgccggcgggagggttaatcactcaatctttttgacgaggcggaccgctgggccggtcaagggttcggtagatcgaagcgcgccagatccacgccctcgagttcaagcaactcggccttgatgtcgagtcggccgccgtagccgccaaacgcgcggcccgagccgactacgcggtgacagggcacgatgatggtaaccggattgcgcttcactgcgcctccgaccgcctgcgcggccatgcggccgccaccgcgtcgttcggccaattcggcggcgagttcgccgtaacttaccgtcatgccatagggaatctcggccaccagattccacacttcatgttggaatggcgtgccggcgggatgcaacggcggcgtctgatctaggccggggcgctcgccggcgaaataggcggtcagccatacgcgggtcatacggaacacatcgggttcacgatcggattcgcgattcgaatcgagaacggcttggtgatcggtggcccaccaccagtcttcaagacagagctcggtcaggccctcgccgtccgaggccatcatcatccggccgatgggcgtttcggctgtggcccgcatcagttgtcgttgcgtcataccgccattatcgcgcgttgagggatgaagcccataccgtgcctgatttcatgaaggacgggtcgtgctgtacggtcagtattgcgtgctgggcagcgatatctgacatagtgggggttcttgggccggcatgagtgttctttccgacatcccaaccgtctaactccgtttcgaggggctgatttgggctgttccggaggtctatctccgtttcgaggggctcctcatccgggaaaccacaagtataaacggctccgggctaacgtcattacgccgtttttggcccgtgtctactcagccaccagccccttgaaacgggagtagacctccggagaaggccaaatcagccccttgaaacgcagcgacccctctgattggagtcgatcagaggggttcggcacattgctgatgcagctggtccgccttgaggcggaacgtaaccaagattcaggcgggattactccgcaacgagcgccaggaaggcggcggccacggcggctgtcgggttcgggaattcctcgtcctggttgaagaacggcacgtcggcgtagttcaggaacttcacttcggcacggtcgccgatcaaggccttggcctcttcggccagctgatcggttatcgtcatgcgttcctgatttccacggccatggccgtgcaatgtgcccatcgcttagttctacccgctgtttatgctggccatgcccatcgctcggccgctgtatgcggccaccgcgagttatgtgcacggcggcacccgataatcgttggaaaaccagtgggacacgcgggggcttggctttttcctgagattggcgtatctttgtcacctgttgcccgtgaaggtaacacatgcggacatagcttagttggtaaagcgcaaccttgccaaggttgagaccgcgggttcgagtcccgttgtccgctctcggatggttgattcatattgattgattcaaccggaggatgacccgggcggttggcgcagtggtagcgcacttccctgacacggaaggggtcacaagttcgaatcttgtatcgcccactcgatgaatcgccggcagaatgttgccggttttttcatcacaagctcgggcgattggcgcagcggctagcgcacttcgttcacaccgaaggggtcgtaggttcgattcctacatcgcccacccgatatcacgctcgtcagtctatgatggcgtgcattttctatatctgccgtgccacggttccttatatggcgtccggcctcgggtggcatttggctgtgagcggtttccgattatgagtggcgtccggccgtcgtgcaatcccgctgcgcgcggtgccgtttgggctgtaatacgggtgctttgaaccggccataacttcttcatatgtcccggggcttgtgtcgtgtgccgcggcgcgcttccatagtggatatggcggtgtggaaggggagccgccatacttacttacacaaggacgtcttggtccgccagggcaacgcgcatggaaaggggtttgcgatggtgtgcaccacgctgaatttcgcggagaaatacctactgaaaaccgaagtcaggtccgttgccggtatgtccggcggtacttccgatgctggtactgatttcgatgtcgatttcggtggcgagggcgacctcggaagcgatcatgccaccggtttcaatcgctcgctatcggccgacgattattgggctgcagccggatatgccgatgagtcattgtattgatggacgtgatgacgcggtaagggcgcgtcgataagtgcggctggtgtcgcggctgatgccgcatctggtgctcgttcggtggtcgcggctgatgttccgtacggagcctgcaatggttttgcatcggtggtgcgtcaaaatccggaccgtcgccgacgctgtggacgtctggcggcgttgaaaggacagataatggattgtcaacgccgctgagaacgattggcgacggtggtgggacagcggatgccccaccaccgtcgccaagagtggtacttgtgtcggtggcgtccaagacatggcccggcaccgacatcagatactctgaacgtcggcggattcccgttctgtgtcccagcgccgacgtttgattcctgcttatgcgagctggcgtcggtaaaaaggcagaacttggttcaccggcgatgtctcagcacgtttgcgcgcgtcggatccttctggagcagcaggaaaacgagcgccacaacgagcaggacggcgatggagagcacgccgagcgaggcgttgccggtcagggacgtggtggtggctaccaggaaggtgccgatgattgaggccgttttagggaagaaacaatagtgagaccggggaacccttgaaatcattggggaatcatggtggcgatgcatgcgattaac

SEQ ID NO: 3813 - DNA, 21268 bp, Unknown
  R35_2m  MAG No. k141_6018
ccggaaggacgttcttctccttgagcagctcgccgccacgcttggcttcggcttcaccctgctcggtcagcggtacgtcgacccagccggtgaactggttggttttattccatgcgctctgtccatgacggagcagtactagtttataagtcatacggttcagtctacagccgcgtgcgcccaaacacgagtattcgtcttattatttcgctctcatagcgccacggcaaccgccagcaccaccgcaaacagcaaggtctggaagctggcggcgggcagagccgggcggaattgacgtttattcacgctggagaccatgcgcacaggtattccggtgcccgagagcaacagcaccgcaccccacggccaccataatgtaccgcacatcagcagggcgatgatccatgcgatgacgcagcacacaatcagcaacgtacgcgcgccggactcccccagccgtacggccagcgtgtgtttgccatgctcacgatcctcgtcgatgtcacggatattgttcaccatcatgatcaggcaggagaacaggccagccgccacagcacccaatagtccgccgacgtccaccgtgccgcacagcgcgtattcggtgcccaataccgcagccaagccgaagaacaggaacacgccgacttctcccagcccgacgtatccatacggatgcttgccaccggtgtagaaccagccggccagcaaggaggccgcgcccacggccagcaaccaccatgcttgggcgagcacgaccgccacaacaccgcatatgcaggcgatggcggcgcaaatcatcgccgcgaacagtacatgcttggccggtaccagtccggatgcggtcagtcgctggggtttgcctgatttcgattcgtccgtgtcacgcccggcgtcagtgccgcggatgccgtcggaatagtcgttcgcatagttgacggcgatttgcaggaacagcgcgactagcaggcacaggatggtcaccggccagaatcggtccatcagcagggtctgctgttcacgggccgtggcgcaggaggccggttctggatatattgcgatgcaggtgcccgaccgctcgatatgcacgtacgccatcaccgccccaaccatcaccgacgcgatggaagtgaccaaggtcttgggacgcgcgccccgaacccacaagccgatagacataagcaatccctttcatatataactctggttcccctctctgagaggagccagagtatgcctaatcagccaacgagcggcttgaccagcgggaaggtgatggtctcgcgaatcgtggcaccggtcaaggcgataagcagtcgatcaatgcccatacccataccgccggccggaggcatgcccacgccgagagcctcgaggaagtcctcatcgatgtcgcaggcctcttcgtcgccggcgagtgcgtccttggcctgggccacgaaacgctcacgctgcacgatcgggtcgttgagctcggagtagccggtagccagctcgaagccgcgcacgtagagatcccacttctccaccacgccgggcttggtgcggtggcccttgaccagcggggaggtttcgaccgggaagtcacgcacgaaggtgggctcgtaaagcttgtcctcgtagaagtgctcccacaggtgttcgacgagcttgccgtggttctccacgtcgtcgcgctccacgccgagcttgtcggcgatggcgcccaaatgctcaacggaggtgccgggatgctcagggccgccgttcggcacgatttcctcgcccaatgcctcggacagcgaatcgtacatgctgatggtcttccattcgccgccgaagtcgtattcggtgccgtcgagcagggtgaccttgtgcgagccgtagacgtccatggcggtcttctgcacgagctccttgaccagctggccgatggaatcataggtgccataggcctggtaggcctcgaccatggtgaattcgggggcgtgcgtggcgtcgacgccctcattgcggaagtcgcggttgatttcgaacacgcgatcgatgccgccgaccaggcagcgcttgaggaacagttccggggcgatgcgaaggtacaggtcaaggtcgaaggcgttcatgtgcgtggtgaacgggcgggcggccgcgccaccgtgcagggtctgcagcatcggggtttcgacctcgaggaagtcgtggtcgtcaaaggtgcggcgcagggaggccacggccttggagcggttgcgcaccatgttgcggatgttctcgtccgcgatcatgccgatgtacggcttgcgggtgcgggtgtcttcgttcaggtccttgtgcagggccggaagcggctgcagggccttggaggcgatagcccactcagtggcgaatacggacagctcgccggtcttggaggcgatgacgcggcccttgaggtacaggtgatcgccaaggtcgacgagctgcttgaactgcttgagcgagtcggcgccaatctccttcttggagatcatgccctgaatcttggtaccgtcaccggcggacagctgcacgaagcacaggccgcccgcgttgcgcaggaacagcacgcggccagcaatgccgaccatgtcttcggtctcttcgccagcctcgagcttgccgtcatacttggcgcggaccgcctcgatggtgtcggtgacgtccaagtgcaccgggtagggggcgatgccggcctcaagcatcatcgcgcgcttggccacgcgcatctgcacctgctcggggtgagccagcgggccgaactccttgttggaggggtccacggcttcgtccagcgtggcaccggacttgatcttctcgcggatggtggcgtcctgctcgagcagcatttccgcacgttcgacggtgctcatctgcgggacggccggggtttcattctcagtgttttcggtattttcgacaacttcagccatgattcatcagtgtacgcaaggccggcgattatgagcccggcagaccgtacggccatctgaacacccgctcacatgacgcaaaaccggctctgcacaaggcttgagagacctgtacacacggcgaatccaccatcacgcaacactcgcgacatgccgatttgcattgtccaccaccacaatgtaatatctacgtctgttgccaaacgggctgtagcgcagcttggtagcgcgcttcgttcgggacgaagaggccgcgggttcaaatcccgccagcccgacaactggaccggattgttgagaaatcagcaatccggtttttcgtttcctaacccaacaatcagaccaagcgatcggacagcggtaaacaacccgccgcgcacagcgacaaaccgcgtcgcggcaaggcccgtatttgttggcggaccaccgtaatatatcgctcgaatcaatcgattgccgcactgtttttgtaagtaatactgaagtaattagaggaaccatgaagaagagtctgcttgcactggcttcgggcgcgttcattctcggtgccgccgagttcgtgatgatgggtattctgccgcaggccgcggccgccaccggcgtggacatccccaccgcaggccattacatttccgcgtatgcgatcggcgtgtgcttcggcacactgattctggtgttcggccgcaaggtgccgccgaagaacctcatcatattgtttatggtgattgcgcttatcggtaatctggcctccgcgttctcggtcaatgccgccacgctgattgtcgcgcgcttcattgccggcctgccgcacggcgcatttttcggcaccgccacactcatcgccaaaaccttggccgacaagggcaaagaagcacaagccgtatcggtaatggtcaccggccaaaccgtagccaatatgctcggcgtaccggcgggcaccttgatggctgagttcctatcctggcgcctcgcattcggtattctggctgcatgggcggcaatgaccatcgtgctagttctggcatggatccccttcgttgcgccgattaaggacgccggcatcgccggtcagttcaaattccttactcgtcgtggaccgtgggtgattctggccgccgtattcaccggcaacgcaggcgtgttctgctggtggagctacgtctccccttggctgcagaagaccggtggctggtcgtctaacctggtaccgctattgatgatgcttgccggcttcggcatggtgataggcggtcttatcggcggtcgcatcacagataaatggcgccacgccggcactgccgcgctgggtcagacgatttcctgcatcggcttgctgatggttttgctactgccgggaaaccagggcactactgctttgctgaccttctggatcgccttcggcctgttcttcatctccgctccgcaacagctgttgatgaccgaagccggccaaggcggcggcgagctcatcgccggcgcagccgtgcaggtggccttcaacttcggcaatgccatcggctcgattgtcggcggcgcgatgctcaccactttctcgatgaactatcgctataccggtctgggcggtatgccgctggctctgcttgccgtagggctgctggccttctactcgtggcgctgcgaaaccgataccgacgccattcaccgcatgcgcgaaatcaaggtggactgagaccaagctcacagcaaactccctgacgcgtttgtttacagtattaatagactgaaatcagacacgattcagggaggtctggcggtatggacgaggaagcactgctcaaacaattcgccgcacaattcgcgcatggtccagacgatgccgacgacaccgatgcggcggccgcagcgcaaggtgccgattctactgcgaaccaggccacggacgatgccgatcaatcgcccgcaacctttgatacccaacaattcctgaacggactggacgcgattttcgatcgccacgcggcagccaccgaagccggtccgtacttggaacaggcgatggtggacgcggaaaacgccggcgacgaggccggactgctcaccgtactcaacgaaacgatgggcttctatcgctcgcagggccggcacaaggagaatcagtggattgtgcagcgggcgctggaactggccgctcgtatgggcttgaccaccggcacatccgaggcgtgggccaccacgctaatcaattgcgctaccgcgatgcgcgcggcccaacaatacgatcaggccgaggatttgtatcatcaggcgcagagtgtctgccggcattcgctggcacccaccgaccgtaggctcgcagcactgcacaacaatctatcgatgctctacagcgagacgaatcggcccgacaaggcggaactggagttgcgtgaagcgctgcgcattatcgaagcctcgagcgtgaacccggacgcggatatcgacgtggccagctcgcacacgaatctggcgttgaccctgctgaccgaacacaagttggagggcgcgcattggcatgcagccaaggcactggaaatctatcgcaccggccatctggaacattccgcgcattatgcctccgcactggcgggcttcgcgcaggtgtgctttgccgagagacggcatgcggatgcagttactggataccggcatgcgctggccgtgatcgagaaatgttacggcaaggacaccgattactggcgtatcaccgccgacaatctgcggcaggccgaggaagaggcggcgaaggccggggtgacggttgacaatgcgggtgttgccggcgatgcaggcgcgctgccccagtccggatcacggctgccggacagcccggcacagggcaagaccggtgcgggcgtcgaggcacaggtcggctccgcgtcatcggccgtggacgcggatacgccgggcgcattggcgcaggcgttacccgagaccggtgcgaacgcggcgttttccccatccaccgtttcggtgtcgaccggttctgcgggcgcggccgaggccgtttccgcatgcccggtgtccggactgaagctggcccgcgcgttctggacgcagatgggcaagccgatgattgcggcgaagtatccgcagtatgccgggcgtatcgccgccggtctggtgggtcatggctcggaatgctacggattcgatgatgcgtattcgcaggaccacgatttcggcccgcgcttctgcctgtggcttacggatgaggattacgcggccatcggcgagcaacttgaggccgattacgaggcgctgccgcgcaagttcagcgtggatgcgcaaggccgcgtgacgttcgaggcgcatgccagatccgatgcttccgggacattcccctccgcaggtgcaggctccaccgtcatacccgatgcgacaaacgcacccacccccggcaccgctacggacgataccgccactgccgagtcaggcgcggcgtcctctgatgtggcggaagcgatgacgactccgattgatgcaccgctctcccccgtcacgccgcgcgcacagggcgcgaatcgccgtgacggcgtgttccgcatcggcgacttctttgagtcgatcaccgggtatcgcactgcgcccgcgcagaccgcgccgcacgagtggctgatgcttcaggaatcgaccttggccgccgccaccaatggcgaggtgttcgccgatcccaccggtctgttttccaagacgcgccaagggttcaaaaacatgccagacgatgtgcggctcgcgctgatctccaagcgactcggcatgatcgcccaggccggtcaatataatctgccgcgttcgttgaagcgcggcgacggcgcggccgcatggctgtccatccacgagttcgtgcaggccaccgcctcgttggtgttcctggttaacgtgccgatggtggtgggctatatgccgtattacaagtggcagttcgcagcattgcgcaagctgtctggctcgatgttcgcgctgttgccgaacgtgggcgaacagttggaaaccgtgatgcgattgagttcggcagcctgctatggaggggccggattcggcgaaggcggcaagggcgcggctacagcaatcaagaaaatcaacgatatcgtggagcagattgcggcggatatcgtcaaggaactcaaacgcgaacacctgaccacgtccggcgagaccttcctcgaatggcagcgcccgtatgtcgaggaccacatcgtctccgatgatccggtgcttaaaagtttgtagattcaagctccctctgatgatccggcgctttagagctccctcatcagagggagatattagtgaaaggaacgtcgatgaccaacgaactgactgatgatgaactgcgcgaggctattgtgcgccatgaatgggatcagttccagcgcaccaacaatgagggtggacgcgcggcatgccaaggcaactggccggtgttccaccagatgcggctggcccagttcctcacatgggagcggccattactcaccagctatgccgctgatcttgacgcggccgaccacgtgggccgcaacctcgtgaccgaaaaatacggccgcatgatggcctccaccgcgccggaagatttcacgaagaacatagagccgtatattccgcgtctctctgaagagcgcgtggcccgtcaggaacaggtcatcgcccagcaggtcgcctgggccaaggatttccgcgaacgctaccccaagctcggcgaggcgatgcgcgtactcaccaccaccgacgacacaccatctgccacctcattcgaaacctatctgcgcggcgagcttggtacgtattccgaccagaccttcgaacgttacgaagcgatgattggcgagcgggccgcagccagtctgcaacgcaatatcactgaggaaaccttgttgcacacggtccagctcggcggtttcgacaccttggaggaggccgaagccgctcagcgctgacgacagtgcctccacgccgtcacgccccatccaccttcccgaatttgtgacgctcacggcgactcagtggcacatattcgggaaggagccggtaacgaccgtgaatatcacagactgaacaacccccagaaagacaatatcgtcaatgtgacaagtgcagccagtgtcaccatcacgcaaatgacacgacgcacgccgataatgctggcgcgataccgccacatacgttccagttcccacgcgaacagcacgaccaacagcacggtcagcacctgcaatgccctccacccaagggaaaacaattgcggttgaggcataaccaatacagccgatacgcctacggcgctcatatagccatacaacagcccagtaatcaccatcaccgctgtgccgataccggcagataagccggcaatgccgtgcaacgtacgctgttgggcggctcccagcccactcggcgtcgcatgcatggcccgcacagtcgccacactacgtcgcccggccagcaacgtctgtagccaagaaaacacagtcaagccaatacctaatatcgccgccatcacgatcagcacgggccctgccaccatcagaccggccagcacgccgagcgagccgacgataccggatctggtacgttgcggcgcggcgaagcgctggtgaggtgtcgcaccggcgacttggggcgttgcccatccatcggctttggttccggcagtcacaccgttcacccaattttccagcgcttgcgtatagccttcggccaatggcaggttcggggtgaataagccctcaccagcccgcatctgatggttgccggcgaaatagcgtacggtgacgttctcgttgccggacttgttggccgtggcgatgatccgctgcgccccctgttcgatgggcatggccgtatcgtaggtgccgtagttcaccagcaccggcatggtgagggatttcagataccggtcggcatcaaagtcggcataggccagatcgaatggcgcgtagtccagcgacatcaatttggccatgtctttgaccacgggcttgggcgcgccggcctcatgcgtataggcgctgacagccatggccatttgctcacgtccattgaacaccggtgcggatgtaagtatggcaaaggcaatgtcttgccgtttcgaggttagaatcgtggcgatccaggtgccttcggattcggcgtagatgccggttttggcggggtccacgccgcttatgccacgcagcacgtcgagcgaacgcccgtattcgcgagcaaaacgcgggtagtcgcgatgcagcacggtgtagttgtcgttgcgcttggccggcaccaaggtcacgatgccggcagaggccatggcgttggcgatatcgccgaaatcctcggcaccgctggtaccggacccgtgaatgaacagacaagccgggcgtggcccgggagcgtcgaccggttcacgtagtacggcgggtagcgtgacgccgtcgccggtcttgatggatagtcgggtttcacgcgtacgatatcgcccctcgtggggaatgttcgcatgggcaggggtgatggtggtgtcggcagaagcgatagcgatgtgcttggtgtagggccgtgtgttccattgcggcatcatcgcccagccaagtgtggcgaataccagcgtcatcgccatcgcggtggcgatgacgctcgctacccgccgcgccgaaatccgtttcatagttactatgcctccccccatcagcatagaacggtcggctcttatcggtcggctcccgtcataatgtgcttctactgggaccgtaatgcaatggttgtaacgctattttctcttcttgacggcaccgactatggcccatacaacggccactattaccagaataagtcccactacggcgcagataatagccgtcagcaattgcggattcggcgagaacagcgaaatcatccgatccggagatatgtacccgaaaaccagcgcgatcacgccgataatcacgcctaatagtccgaataccacagtaggcgcgctggtgctctgtttctggatgttcttggcactcttgacatccttagcattctggacgttcttggcgatcccctcagtttggcgtggtttgccggcagtctgagactgctcataggaaggttgtgctgaagatgctgcgtacatcggtacatcatcggcagatggaatcggcccgccatccccctccacggcatcggcaactgtttccagggcaatccgatctgtggttggttcgatgggcgatggagaggcagctgttgcctgcgtatccacatccgagaccggcgcatccgcatgatcgtcggggacgggtagcacagccgttttgtcatcatccgctgcggatggcagcaccgtggtatcggttcggtcatcgacggtcaccatggttgtggtctcggtggtctcgtcggtttcggaaggtatggccgtggtcggtgtcgcatcctcgatggaggcgaattccttggtttcatcagtcatgattccatctcctggttgtaacggcttgatcattccgattgcccggttgtgttcttgcttgtgctgttgccgtcgtatatatcggcaagcggctggaacgtggagcctttccaatcggaggcgtacaccacgttgacacatgcttccactgcatagggaatattgatttttaattctgggccgttgtccggcatggcggatcccttatccaaccattcgtaatcaggcccattcatgggattggtggcgctttcagctccgaagaaaacaaagcttagacccatgtagttgttgtataccatctcgtatttgccgccgacgtcactcgaagtgaagtaggagtcggcggtgccgaaggcgtaagtgcaggaatccggcagaacgatatgcacttgcgcctgtgttgcggctatggtgatggtaccgaccggacaattactgatggaggttttgccatccagcatcttcaccgtgtgcggtccatgtgtcttgtcccaatcggaccaatcaatgattgcctggtcggtgttgtagttttcaccgttgaacgccacaccttgctgcaatgtttcgaacgtggcatcgctggcatcggcaacgaagatgccatccttttgcacatcattcatgccgtcgctgtttctcgcactgacagattggctcagtgaaacaacagtattgatgccgctggcaccaagatcacggtagtgcacgccatacgtgcctgaaacgatggtcatgcagagcgcgcatccaccggcaaccagtccgagaggaatcagaccaccggtacgccgccctctgaatccgagaatgatgaccaccagccccatcactatgcatactgcggcaatccagatggtgctcagacgcataatgccgataatgcccatgtcgtttacccaaatcagtcccatcagaccggcaaaggagaggaaggtaaggcccagtatgctcaagaccacgattgggcccgccggcttgcggcgcttggactcggtgggggcataagccgtcgcattcatacggtcgggggcaaacggcccgttgggtactgtgccgggcatcgcgctgggcactgtgcccggcatcacgctgggcatcgactgatagacaggctgtgaaacaggttgtgaaacactaggcgcggttcgtgaaacagattgtgaaacaggttgcggagctgaatacaaaggagatagagggaccggttgcgcggctggatatgaggcaggctgtggagctggatacgacacaggctgtgaaaccggtcgcggcgcagatgccccgaatccgtacccttcctgctggcgaatgccgcttttggccaacaaccatagcgctaaggcggcgagcgcaatacaaacccaccccgcacctggaatcacgattgccacggctaggaacaggaagcatccaagacaattccagtcccattggccggcaatgaggtcctcggccaagatgtgcccatcgcgtacatccggcatcagaaaccagccgagtgcgtacagagctgcgccgaagccgaagaacaatgtacatacaatcaccaacgcacgtactagtgtggggctccagccaagccgtaaagcgatgccgctgcatacgccaccgatccaccggtcgtcgccgcgaaccagtccactggatcgcacccaagtgaagaagcgtcgcgatgtcttgtttttttgcggaccaggctgcggctgtggctgatacggattcgcgtttggattgctcatgattccattacaccgcccgaccactgccacaacgctcggggaacaccctgattgttccctgaacaccgggtaaaccccggccgcaacgccctgagcgcggcacaataggagtatgacgtcatctcccgaaccattgctgcccgcgcgcatgccgttgatgcgcccccggcagggccgttggctcaccggtgtatgcaagggcatcgccctgcacttgggcatcggcgtgacatgggttcggattgcgttcatcgcactgaccttcctctacggcgcaggcatcatcgcttatgtattcctgtgggtgttcatgcccgccggagacccggtgacggctgcggctcgcacagtgcccgttgatcaggcgccgcttgcgcgaggcaatcagccacttgccgctcatgacgacgaatcggctgccgcaccggaatcattgtccgaggccatccaacgtgctccgaaaccggccgtcgtggcattggccggtttcgcgttgatggccaccggactgctgctcaccagcaccggtgcggatgcccagattgtgcttccgctgctggtagggttgggcggcatcgcactggcatggatgaatcttagtccgcgaggcacgcagctgttgtctatgttgggcggcatcgcactgattttcatgggatgggcattgtatgtgcataatgtcagcattcctgggtggggcacctctcctcgacgcattgttgccagcggattcatgatgatcgtcggtatcgtggtggcggtgatgccgtgggcgaacgcgatgctgcaacgactcacccacgagcaggcattgaaggaacgcgaagaggagcgcgcggacatgaccgcccatctgcatgatggcgtgctgcaaacgttggcgctgattcagctgcactccgaggaaccgaccaccgtattcgccctggcgcgtagccaagagcgcgagctgcgcgagtggctgtatcaggaacgttccacatcggatcgttcggtgggagccggattgaagcagatcgccgccgaggtggaggacgagcacggcaaaccgattgaggtggtcaccgtgggcgacgcgcggccgagcgcccagaccgatgcgctgctggacgccacccgtcaggcgttggtcaatgcggtcacgcatggtggcgagccggtgtctttgtattgcgaggccagcgacacgatggttgaagtgttcgtgcgcgaccatggcgaaggcttcgatatggacgccattccgcccgaccggctgggcatccgcgaatcgattatcggccgcgtcaaacggcgcggcggtacagtggagatagtgtccagggccggctggggcaccgaggtcagaatgcatatgccgatcgcgctgaaagcggcgcagggagaacatcgatgagcgagaatgagacagccaagattcgtgtggccgtggtcgatgaccatgagatgttccgtgcgggcgtaatcgccacgttgcgtgattccttcgatatcgtcggccaagcggcggacgtgcccggttcggtggcgatgatcgcacagaccaagccgcaggtggtgttgctggatgtgcatgtgcccggcggtgaaggtggcggcggtgccgagatcctcgccaaatcgcggccctactcccctaccaccgtgtttctggcattgtcggtttcggatgcgccgcaggatgtgggggcggtgattcgcgccggcgcccagggctatgtgaccaagacgattaccggcgctgatttgatttcatccatcaagcaggtgcatgagggctatgccgtgttctcgccaaaactggccggttttgtgctttcggcctttcagggtgtgccggcggcggggtctgatggcggcgctgatggtgcggcacgggctcatgatgaggagctggaccggctgtccgcccgcgagcaggaggtcatgcggctgatcgcacgcggatacacgtataaagaggtggcggccgaactgttcatttcgatcaagacggtcgaaacgcacgtgagctcggtgctgcgaaagcttcagctttcgaatcgcaccgagctcacccgctgggccgccgataggcgcattgtgtgataaacgacagatgagctccctcatcagagggagctcatctgctcatatcactcggcgtcgcggaaaccgttggggttcttggtctgccagttgagggaggaggcggccatgtcgtcgatggtcagctcggccttccagccaagctccttctccgccttggaagcgtcggcgtagcaggcggcgatgtcgccggggcgacgcggcttgatcgtgtacggaatcggatgaccggcggccttctcgtaagccttgataacctcaagcacggagtagccgtggccggtacccaggttgtagacgaacacgccttccttgtcgatgtggtcaatgacggccacgtgacccttggccaggtcgaccacatggatgtagtcacgcacgccggtgccgtcgggcgtgtcgtagtcgtcgccatagacctggacttccttgagctcgccgaccgcgaccttggccacgtacggggtgaggttcgccggaatgcccttcggatcttcgcccagcaggccggactcgtgtgcgccgaccgggttgaagtagcgcagcagcacgatggtccaggacggatcggccacatgtacgtcgcgcagaatctgctcctggaacagcttggaggtgccgtacgggttggtggtgccgccggtcggcgtctcctcggtaatcggcagttccttcggcgtgccgtacacggtggcggaggaggagaagatgatcttcttgacgttgtgcttcttcatcaccttgagcagcacaagcgtggagtacaggttgttgtcgtagtattcgatcggcttggccacggactcgcccacggccttgagaccggcgaagtgaatgacccaatcgatgttgttctcggtgaagacgcgttccataagcgcctcatcgcgcacgtcaccgtcgtaacgcttgaccggcttgccggtgatctgctcgacgcgctcaagcgccacgggagacgagttgccgtagttatctacggaaataacgtcgtagcccttgtcgagcagttcgatgtcggtgtgggtggcgatgaatccagcaccgcccgtaaccagaacagtagtcatatctcctcctttggaaggacttgccttcggttttccttcagtattgagcttacttcacttgacctgtttcacctagcggcaaaaccaagactttcgaggaatgtttgcgtggtggctttctgcttgaagacggccgtgttgccgaggatgcggtagcagacgctgccgagctcgtcacgtacggcttggtggatggcctcgcggtcgcggtttccggccaatgtttcagcgagttcgccccattcgagactgaattcgctgacttcatcgggcaaatcgcggccttcggcgagcgcctcctcgacgatgccgagctggtcgacgagccgtccgggcaggatgaacaggccttgggcttcgatcagtccaatcggctcctgcttgaccggccagtattcggggtgtgcatggaaaataccttccgggtactcgtcgctgatcgcattgttgcggaagatgagactcatctcatagccacgttcggtgatgatcgcgctgggcgagagggcggattggcggttgccgtccgcgtcatggctggcgatgccgttcgccgcgtcgtcataaccgacccatgcctcgcggatgatgtcggatacgtcgatgatgctctggcggtttttcgacaccacacgcacggcggtaccgggccagtcgaggatttcgaccacggcgtccggatagtcggcgagcgtgaaggcggcccaagtggcggccttgtgcatcggcagcagttcgccgccgccctggtagtggtcgtgggcgagcaccgagccgccgatgcgaggcagcgcggcgttgcatccgaggaagtatccggggaagcggtccacgaagtcgagcagatggccgaaggtgtcgcggtccacatgcatcggcgtgtggtcggtgttcacgcagatgccgtgctggtcgaagtagccgtagggcgagaactgccagaaccatgactcaccgccgagcgtgaccggcagggtgcgcagcgtgcgcttgtcacgtccggcgaagccctcgttctcatggcagatcgtgcacttcgggtagccgccggacacggcgttgccggccgccgccttcttcatgttcttgaattcgggtttggcgaggttgatggtcaccgtcagcccgtgcgagtcgaagcgcgggttccggtcgagctgggcacgcttgacataattgttggccacacagtagtcgtagaaccattgcatggcggccatgccgccgtccctgtgctcgatgagcaggaaccggtcgtcgagatcggcggggttggcggagaggatgcccatgatggtgtcggcgtaggccgggccttcctccggatcgaagaggccggcggttgtggcggcggcgcggaaggcggcgagtaggaggtcgggggtcttttcgtcagagggggcctggcttcggctgccgacaatgtcttggactgcgtctgacactgacgccgccgacgttgtggttttgggtccggggtaggaatccaggtggaagagggcgaagatttggttgcgggtccagtctgcgttgcgtggatcgagatcgagatgatccaaggcgtaatcgactagggcgtcgatgctggcgtatacctcggtcagctgatcgctcattgctcggcccccatcatgctggttcgggtatggttcgactgacggctcacttggcagcctccatgatgtcggctacgatggcgtgggtttcactggccttctgctccatctcctgcacgagtttgatctgggtgcgggtgcgcaccagattgtgctcggggtacttggtggcaaagtagatatcgccttccaagtagtcggcgagaaagcgcatgccgcattccatggtgagcaggttgccgctgaacggcagcagttcggcctcgcgcgcggtgatgctgccacgtagttcgcccacgaatccttccgtgtaggcacggaacagctcggtgctgaaatgcaccttgctgaggtccttttcgtcttccagagcagtggacgcaccaaagcgtatggaatcgccgaagtcgaacagcatggagccgggcatgatggtgtcgagatcgatgatcgcacgcgccttgccggtggtggcgtccatgaggatgttgttgagcttggtgtcgttgtgggtcacgcgcaacggaatcgaaccgtccctgagcccatccatcacgacggcatactggtcggcgtggctcagatagaagtcgatttccggctggcatgcggcggcgcggccgagcttgtccgcggcgagggcggccttgaagtcctcgaaacgatgcggggtgtcgtggaagcgggcgatggtttcggtcagctggctggcgtcgaattcggacaggaagttctggaagtcgccgaatgcgctgccggcctcgcggaacacgtccgggttcggcacgaggttgtacgacacggtgtgttcgatgaacttgtagacgcgccatgcgccgccatcgatctcggcccaggtggcgccggaggtggtgggcacaatgtccagcgtctctttgccctgagccttgagagtggaggtgaccagttcgacattgcgcatcagattcaccgtatcggggaagatgctggtgttcatctgttggaggatgtagcgggggccgtccgtggtcaccagataggtggtgttgatatggccgtctccgtaaggttcgatgccggtcacggcaccttccagcgcaaaatgcgaggcgatgccgaataaaacttcattgctttcgctcatgatgggtccgttctccaaaacgcgggaatcaggcttcacgccatgcgatgccgctgtcgggcaggtcgaagtcctcggtggtgccatcggccagagtcaccgtggtccgctgcggctgatcggtgttgttgattacgcagtacaacccttgctcggggaagtgcgccacctcgcactccgggttggacgagctccaagccgcatacttgtcttcgttgtgggaggcgtagaacagcacgcgttccagcagtcgggcgttggccgccgaatagggcagaccggagatgtacacaccgcggccttcgccataatcattggtcgcgagctgcacctgcccgccgtccgcgcgcagcagggtcacgttttcattgaccggatacgtgttgagcacgggttcgccgaagtcgatgccgcccaacggcttgatggactggccaccgccgcaaccgctcagcgggatgcggtagccggcctgttcccaagcctcgcgggccgccgggtcgaccggcacatcggcggtgatgaagtggtccggcaccaccggtgggaagtacttgtccacggagagggtctgatagcgctcctcgtccacgccaatcacgtcggccagctggaagaaccggcccgcttggaagcgcggtgccgagctcggctcgcccacgcccacgaacgcgccgccaccacgcacccaggcgcgcacggtttccacgagcttcgggttggtccacacgtcgccgccggtgaatgcggtgtcgaccgggccgccgttgatgattacgtcgatatcactatcgatgccatgcgcgagtacgtcgtcgaagctgatgaaccgcacgttcacgcgcatgccggacagggattccagaatgccgtagtaggagtaggtctgcttgttgggcagggcgtgtgccacggtgaacgccatccaggaacgcatcttgccccaggaattcagaatcgccacgttgagctcgccttcggcggccaccccaccggtgcggtcgtggatgtcgcggaattcgtcggcgatatgggtcaccgtgtccacgaacttcgggaacttggcggccaaggagaggtagccaccgtagcccatacggccgatcggcgaacgcaggatcgcgcggcgggccttacgccagttgtcgaggccttcgatgctcgggtcgttgccctcgtagaacgtgtcggggaagaagtacggcaggaagcgtccttccgtgtatttgacgcccggaatgtccgcgatcatgcgggtggtggtgccgtctccgatggagccgacgaccgcatccaaacccagcttttcgaacccgtccttatacggttcggtaccgatccactggtcgccaaggaacatcatggcttccttgcctgccgcgtgcgacatgtcggcaagccgcttgacgttctcgcgcacgaatccggagaggaagtcaatccagtcgcgttgcgccttgcggggcacgcgccacgcggagttgtaggcaccgccatccacgaaatcctccggacgcagacggtaaccgtactccttctcgaaatcgtccaatgcgcgcgggctcacggtgcaggcgcaaccgaaccagtcgaccaccttttcgcgacgcttggcatcgaacaggagcgtgaactggtagaagaacgtggtgaaacgcaccacatccacctgcgggctgtccttcagccactgctcgaacgtatcgaacacgaacttgcgggtggccggatggtagatgtcgaacggaatctcgtgttccttgtctccccaatcattggtcaggtggttgtacatctcgaccgggtcccagatgatgtaggccaggaaactcaccgtgtattcgtgcatcggcacggcagcggtcacgtgcacggtgtcctcgcccgggtcgagcgtccagccggacgggtccacgacctcgcccgtggtgcggtccacgacttcccagtacttatgagggtcggcgtcacggttaggcttgagctgttcctcgaagaaaccgtccatcagcggcacatccaccgcgttggactcggccaggatacgggcggtcagcaggtagacctgcggggtctcgtccatgtgcagggtgatccactcgttgtgggcgcgggtcgggaagtaggcgctgtagattttcttgccaagagcgagcactgcctcgtccagatgcgtgccgtcggagttgcggatggcgtccgcaccccacaattcggcgagttccttggtcttttcggcaaaattctcttcactgggcagcgtgaagcggccggtgctggtcatgagtgctcctttgtggggttggtcatcaaaaaactacaaagcgacgaattcgtcgcatacaaaatgaccggcgtcatcgcgggccctgggaccctgactgcgtagatccttgacgcttacggtgacgccggacgattggaatcgtgtcactgaatatgggagggacgttgcccggcaccggaaggagtgacacgacatgccgggcagcggattggttagcccttgacggcaccggcggcgaggccggactgccagtagcgctggaggccgaggaacagcacgatcacgggcagcacgccgagcaacgcacccatcatcagggcgccgcgatcggtgaacgtggccagcgagaccatgccgtacagaccgagggtcacgggcttcaaggtgtcggaagacaccatcatcaacggcagcaggaagttgttccacgtggccacgaacaggaacaggaaaatcgtcaccatggccggggccaggagcctcagcacgatggtgaagaagatcctcgcctcgctcgcgccgtcgatgcgggcggcttcaagcagttcgtccggcaccgaactctgtgcgtacgtgcggcccaggaagaagccgaacggcgaaacgcagcacgggatgatgatcgagagcatagtgttggtcaggtgcaacgtgtggaagatcgagtacatcgggatggtcagcagggcggacggcatgagcatgcaggccataatgatgccgatggccgcgttcttgccgcggaagttgaatattgcggtggcgtagccagccatcacagacacgatggtgccgatcaatgccgagacgcccgagtagatcagggagttcagcacccagcgccagaagttgccacgagtccagccaagcagcttggaatagttagtggcgatggcattgggcagctggtcaagcggcacagcaaaccacatgccgttgctaccggtcatctgggccggcgtcttggtggacgc

SEQ ID NO: 3814 - DNA, 30936 bp, Unknown
  R35_2m  MAG No. k141_6250
cggcacggtgagtgcgccgatggacatgatcgccatatccagagcggtccactcccaacgcgtgcgagacacgatggccacggagtcgcccttgttgacgcccagaccaatcaggcctttggccagatcgatgaccatgtcgcggaagacctgggcgctgtacggctgccaggtgccatcctcagttttatattcgatcatggcgccatcgggatcgcgcttggctcgctcatcgagcaaatcgaacaggttgatgtcgctgtcaatcggctccttgacgggattggtgaactgcttgacgatacgagtatcgtttatggccttatcagcgatgttttcagtcatactccccatgtaactccacggatgctacaaaacacgcgcgaaacaacggattgtccagaccaaatggccccggcaatccgttatttcgggcaaaccaggtaaatctgtcgcaccgtacattcagcagattactcggcggagtcattggcctttttcagctcgtcgcgaatctcctgcagcgtggcgagagtctgctcttcaacgctaggcccctgttcttcagcgtcagcctcatcctgggcagcagtgagatcacgaagcttattaatcggcaaaatcacacagaaatacaccgccacgccaacaagcaggaagctaatcagcgcgttaagaatcgcaccaaatgaaacagtcgagttgttgaacgtgatggtcagcagtccggaaagatccggtacgccgccaatcatgccgattaatggactgatgagattgtcgacgatggaattgaccacagcggtaacggcagagcccatcaccacacctaccgccatatcaatcatcgatccgcgcgacaggaatttcttaaagccattcaacggacctttatcggtcaaagcaacaactttgcgagcggttcctcccgtggccttggcaaagtcggtggcaatattcatgggattgtggttactcataacggcactccttacgaaattcagacacttcacttgtatccgactggttttcccacgactccattatgccgcttgttggaatatccctataccactgcggcgttcccgtacatgactatgtacgagaacgccgccacccctgtttgctgagaacctgttagagctgcttagaactgaatgtaatcgacttccgtatgttcgccggtttccaagtatttcgccacatcatcaggaccgacgaacaccagttcgaccgcttgcgcaatcatcagattgacacgatccattggcgtaaggttttcgaaatagccgtacaccgggattcccagcgcatgcgcatatccgatttcgaacatcgtgcccgggtcctcgtccataagattggcgaccacggctttagcagcattaatgccatggatatcgtccgcaaagcatccttcagggcctacttcttcgatctggctgacaaaccgcggcttgaacagtaccttgccatggtcttccaatatcttttccaaacgttccatacttgacgtttgttcaggatcaaagaacggaccggccacatagaagtcatactgtttgtcttcactcatggtctctagtcatagcgcagcaacgtcggacgccagccgttattttcactgtatggacaaggggtcgtatcgtgaacattactacgggataaccgtcaatgactacgtacgttgcccccgatcagcacactccgccactttcgcccccctcccgtatcgtcgagcacgcgaaccaagccgaccaaatagccgccatcccatgcgctgattaccgtatccgaatgctgcaatgccttgaacaaccgttcgggccactgcgccgattcccaaccaaccgacttgaacagcgcctcaacctgttcgacagtaaaccgcttctcttccgtgtattcgatagccatggaccctcacgataaccgtgaagccccacatgtctttgcatagtttcacatgacgggatgatggatggtggaacctatacgtttacacatgcctaatgcctatggctcatcaccgatgaatagaggctgagataccgtcatgtttccgaagccaagtgcccgagatcggattcgaaccgacgacacccgctttaggagagcggtgctctatccactgagctactcgggcaacgacgtttcattgtacacggccgcacgcccagtcgcatcatgttcgcgtggcagcctacataagacgcatggcagtctgtgtaagctacctggcagaacccgccaccaaggcatggccggttttcgtgctggtttggtgcgaactgctcttgcgcacggcgaaaagacaccgaaagacaagccgcacacggtacagtggcaaatcgcacgaaaagcaaggtaacagtaaacaagccggaggaaagggcagcatggcaaaggcacgaagtactaccacaggtgcaagcgtacgagctcgcgccgctgccaagccacgctctgccaaagccacggcacgcccagtatccaagtctgccgtgaagccacacaaacggcatcgtctgcttggttttctcgccacgatgttcgcgcttcttgcccttgccggcactgccgcccgcgcgctgcctgccgatttacaggaactgccatttgtgccgattgtggtatcggcaacgccctggttcacgttgcttggcctgattgccctactgttggccatcgtgtcgcggcgtatccttgccgcactaatcgccatcgccgcaatcgcatgcaatggctattggcaatatccgttcttctactcgaccgacccgctcccccaagccgcgcagaacgccgtggctgcggcctcccccaacaccagcgatgcctacgcgcgcgtcatgaccttcaatgtatacaaggggcaggccgacccacaagccatcgtcgaactagtccgcgatcagcgcgtcgaagtgctcgctttgcaggagaccaccgaggatttcgtcaaaaaactcaacgaggctggcattgagcactatctgccgtatgcgcaggtctcatcgtctgacggcgtattcggtaacggcctctggtcggccacgccacttgccgatccggccgacgatgacgtgaattccagcgcctcattcatgcccggcggcacggtggatatgggtggtcagcagattcgattcgtatccgtgcacaccaccgctcccgtacccggctattggcggcagtggaagcgatcgctggatgagttgggtccgatgcgcgggcatacggatacacggtatattttcatgggcgatttcaatgccacttacgatcacacgccattccgtgattttcttggcgaccggttcgtggatgccgcacgtgaatccggacatgggtttacgttttcgtggcctacgaaccgcgtgtatatgccgatgttcgccggtattgaccacgtggtgcttgatcagggcatgaaggccgggcaatgcaaggtggtcaaagtcgagggctccgatcatgcggcgttgttggctaccgtggcggttgggtgatttacgtagcgtgatcggctaccacccccagtcggcttcgccaacagcccccgccaacggaggcaagattcctcttaccggcttgtcccgctagcaggaagcccgtacgaactagaaaccgaggcgagtgcgaccgaactggtcgagccagcgcaggattgcgccttcgcgcagggcccacgggcagatttcgacttcctgaatattcagggccttcatgatctcgtcggccaccacgccgccgcccacaatctgcatcgtgcgttcaggagtgatgccaggcaaagccacgcgctgctcaggcgcgatcgccgccagacgcggaatccaatcctctagttgttcgcgggtcataatccacgaatcctcacggcccggcgcacgcatcaccgcaccgcacaggcgagccagcgaacggaaggtcttggaggtaccaaccgcatgattcgggtgcttggattgcgggaaaaccttgaccatcggctccagaatcttgcgcacgttcttacgcacgtcttccaactcgtcgggcgtggccatgccggaaggcagaaattcagtggtgacgcggcccgcgccagccggggcggaaagcgccacggtcggctcttcgtcggaacccatcgccacttcaagcgagccgccgccaatgtccagcaccagcagtcggccggcatcccaaccgtaccaacggcgggcggccaggaaggtcaggcgagcctcatccgtgccagacaacacggtgacgccctgaccaatcagttcctcgatcttgtgaatcaccttgttgccgttcggcgcctcacgcagggcggaggtggccataaccagcagctgggtgatttcgtattcctcggccagccgcatacactgggacacggcttccagaatcgcctcgatgccggacttcttgattgagccgtcatcctttaaatacttcatcaggcgcactgtggatttggtgctggcctcggggtcagggcgagcgccgggagcggcgtcgacgataagcatgtggatagtgttcgaaccgatatcaagcacaccaagtcgcgtggtgcgcgaacgcagattgaccatgatccctattcctgaccttacctaacccgtgatggccgaacaacgggccgaccatcgcaatcagccagccgtacgccaccatggcgagtcgttcggccggcaaccaacaccgcgaggccagccgaacatcacacaaactcgactaccgtacaacaatcacaccggctgccgcgccgttcacaacgattcgacgaacgttccgagacgttccatcccctcggtcagggcctcacgtgaggcggcatagctcaggcgcacatgcgtatccgctgtggccgcaccgaagtcgcggccaggagtcagagccacatgggcttcatccagcgcgcgttcgcagaacgtccaggcatccagaccagtacgggagatgttgaagtaggcatagaacgcgccattcggctccacctcaaccggcaaaccgatgcgcttgagcccgtcaatcacaatgcggcgacgggcaagcaattcctgacgacgagcttcacattcggccaaactctccggcgtaaaacaggcgagcgccgcatgctgggtgggcgtgtgggcgcacaggtagtagttggtggccaggtcgtcgaccgcttccagcacggtggggtcgtcgggcagaatagcccagccgagacgccagccggtcatgccgaagaacttggagaagctgttgcacacgatggcaccgggatcgcaggccagtacggacttgacttcggtgccgtccggctcacggtcggccaaatcaaggtaggtttcgtccacgatgcgccatgcgccgcggctggcggccagcttgcacacctcgtccaatacgttgaagtcgatggtggtgccggtggggttggacggcgacgtgatcattacggccttggtcctgcttgtccagtactggctgcacaggtcggcggtcaggtggaagcgggtggcggccgaggtcggaacgtcgatgacccgcccctcaaaggagcgcacaagttcgcggttgcacgggtaggaggggtcggccacaatcacatcgtcaccggggtccacggtcagcgcggtggccaacagcagggcggccgaaccgccggcggtcacgcagatacgcttggggtcgatgtcaaggtcatgacgctcgcggtagaagtcggcgatggcttggcgcagttcaggtaggcccatggcggcggtgtacggcagggcccggccgtcgtactgttcgcgcatggcgtcgcgcacggcgggcggcgcgccgaaatcgggctcgccaaggcttaatttgatgacgctgataccttgggcgatcatcttgtctgcttgttcgccgaataccatggcacggaagggattggcctcacgcgctcggcgggacatgactggagacgcggccggagattggggctgctgcgctgcttcgttttccatatttcggttctatccgcctcacgggacaaggtttcttcttctataatcactgtaggtcgattgagtgtaccaacccgtattcaaggaggaataatgagtcgattcaatggcaaacgcgccgagttcgaggccagcggcgaaaagatcaacgtcgcgattctgggtgcgggccgcatagctcacaccatggccgacaccctgacccagatggctgaaggttcactgtattcctcatggattcacccgtatgcggtagcggcccgtgatattacgcgcgcgcaggcttttgccgaccaatggcattttgacaaggcttatggatcgtatgaggagttgacggcggacccggatgtggatctggtgtatatcgccaccccgcacagtctgcacgccgaacaggcgatcctgtgtatgaaagccggcaagaacgtgctggtggagaagtcgttcaccgcgaacgccgggcaggcacgtgaggcgctggccgtggccgaggaaaccggcatgctgtgcacggaggccatctggacgcgctacatgcccagccgcaagctcatcaacgaagttatcgagtccggcgagatcggcgaggtgaaagcggcgagcgccaacctgtgctatccggtgtccggcaaggcacgtatgaccgatccggcctgtgccggtggcgcgctgctcgatgtgggcgtgtatccgctgaacttcctggatatggcgatcggtgccgaccatggccgcacgctggatcatttcgatacgtcgatgatggccgccgaaaccggtgtggatgcacagaattccaccacgttgtattacgatgatggcacgatggccgtgtccaccagttcgatgctggtttcctccgatcgcggcggctacgtgtggggcaccgaagggtatttggtggtcaccaatatcaacaatcccgagtccatcgatatctacaacaacgatcacaagcccgtgcgcagtgttgcggtgccgtcgcagttgaccggttatgagtatgaggtggccgatgcagccaacgcgctgctggatggcaagatcgaatgcgaggcgatgccgcacgccgacaccatccgcatcatggagctgatggatgcgattcgcgaccgttggggcctgaagttcccgtttgaggcctgatttcagctcccctccagaggggagctgaaattattccgctgaatctgcatctccttcaacaatctgctcatacaaccgtgcgaggcgttcgtcacgcacggctttcgttaattcgcactcccatacggtaattacacgccagccggcggcctccagttcagcccgctgcgcgatgtctcgattgtgattgcgcagtagcttcgtctgccagaattccacattcgatttcggcatcgaatgtttggaacagccttcatgcatgtgccagaaacagccgttgatgaacacgatggtgtggtatttcggcagtactacatccgggtggccggggtaacgcttgtcgttcttgcggaatcgcaaacccttgcgaaacagatagctgcgtaccagcacctcgattttggtgtctttgccacgaatatgcgacatcgtgtacgaacgggtgccccgctcatacttctccactggctgtttcttgcgattcacgcactccagactaccgtgacgttgcggcgaggatgaaagcctgaacgaacaatcacccatcttgcccgtccgtgtctcttatcgcgggcaatgatcatctgccggtcgagactgcacgattagactgaatcaaatggatgacatgatgattcgtagggccacggcggccgatattccccaaatcgacgaactgctgcggcaggtgctcgaagtgcatcatgccggccgaccggatctgttcaaaggcggtgtcaagaaatacacggacgaggaattgaaggcgattctggccaacgatcagacccctgtgttcgtggcggttgcgccatctgccaatgacggcactgacgtcgaacataacgccgactcccccgccaccgaccaagtgcaatggcatagcgccaagcgacgtctgctttgcgagatttgcgagagatgaatgcgataccagcgttcatggctatgctccttaatccaatatcaatggatgaacctgcactgccccgtatgtcaccatcataatatatcgaatatcaatataaagatatcgaaaatcactttcaccattcacccacacacaccgcgacgcgatcgaccgtccttgccttgctcgcagcatccacgaccaacacgggaaagtcactttaaaaaagcactttatcaatgtggataactcggaagctagaaccacatacccccgttcagcttgccaatcagaaacctcatcccataccgtcagatgcacccgcacgcaacgacgcgtcagacaacagaaagaaggaccaatgaacatctctacgtttacccacaactcccacccggcaattcggtatacgcattttgtctagtgcgagattgagagttatgatgacacgaagaaaactcatcatcaagaaacttcggcaagcggcaaagcagcgagggctcgatttctatttgttacggcaaggcagcagacatgaggtttactgcctggacgggttgaggatacccatcccccgccataatgaagtctcagaacgaaccacgctggatatcatcaacgagagcgagcagaaactcggaaaggggtggtggcaatgagcaactatgacgtgcttgtgcaacccgatggccgatattggtacgttcaggtaccagctatcgaacggtcgacccaggccaaaggacttgacgatatcgagccaatggctaaagatctcatcactgtcatgaacgacaacgacaatccggagctcaaggtgacgtttgtgttgccgaaacaagccaaacaacacgtaacagaaatgttccggcagcgcgaaatagcaaaaaaagccaacgcacaagcggctgccgaatcccgactcgccgcacgggccctacgcaacgagggactcacgtatcgacaaatcggagctttattgggggtctcctaccaacgagtatttcaattggtcaacggcaaaacaaagcacaaaacgacagcgtccgaatcgcctcagccaacaactgaatcacgctccccacgcacgcaccatgccacaccgctatcgactccggtctcggcttagcgaacgggtccacaaagcccagactgtttccatcaccaagctcaagagcaccgagcaggatcttctcatcccagcagattgaggagatcgtccttggtgagggtggcgatggaggcgggggcttcggtgagggcgctggcgccggtgccggcttcgtcggcaagcaaggaagcatcggtgaactggcgggcgagctcgctcttggtatgctgaagctccaagatgcgttcttcgatggtgtccttggccaccacctgatacacgttgacgtcttcggtctggccgatacgatgtgctcggtcggtggcctgatcctgcgcggcagcgttccaccatggatcggcgtggatgaccacgctggcaccggtcaggttcagtccggtgttgccggccttcaatgaaatcaggaaggcgggcgtatcgtccgcattgaactggtcgacgagttcgagacgcttctttttaggcgtggatccggtgatggtgtagtagcgtagtccttgcgcgtcgaaacgttcggcgatcagatcaaggaagctggtgaactgggagaagatcagcgccttcttgccttcattcacgcaggtttccaccagttcggtgatggcggcaagcttggccgactgatccttggcatcggcatacagcagccttggatcacagcagatctggcgcaacttggtcagctcggcgaggatgcgaatcttcgacgtgttgaaatcggcttcttcgctgtgttcgagctgcattctgagccgctgctcgtgggccgcatacagtttgcgctgttcgccggcaagctgcacggtcagcgtggtctccaacttgtccggcaaatcggtcagcacttgggacttcaacctgcgcttgatgaacacgcccaccaacgactgcaattggcgagacacccgggcggcctcaggattgacctgtgcggcggcccgaccttcgcccgtgctgccatctgcagcccgggcgttggagatgggcaactcgtagcgctcatggaatcgcttgtatgagcccaatagtcccggcatcaggaagtcgaagatgctccacagttcggagagtcggttctcgatcggcgtgccggtcaaggcgaaacgatggtcggcggccacggccttgaccgctttggctatcttcgtggtgtgattcttgatgtactgggcttcatccagcgccatgacattgaaacgttgctcattggcggtgtaatcatcgacatcccggcgcagcaggtcgtatgaggtgatgagcacggtgggttcatccgcccggaacgcgcggccgatggcggtgcggcgctcggctttggtaccggccaccaccacggcgttgaagctcggggcgaacttggcgaattcggcaccccagttgtacaccaaggacgccgggcacacgatcaatgatggatgcggcccgccatcttcggaatcgaaagtaatatgaccggttacggctgattcactattaacagcattaccggcatccatgccttgagcggtcggcatgccactagattcgttgtggtatcgcgacagcaacagggcgataagctgcacggatttgcccaaacccatctcgtcggccaaaatgccgccaaaacccttgtcgcacaacgtgttcagccattggaagccttcgacctgataagggcgcagaatatgcttgagactatccggcacttcatacgacttagggtcgatgatcttgagatcgtcgatgtattcggtgaacgaagcgtccttgactacatcggagccgtcatccggcagctcaccatccagtaggaatgctcgaccgcccggcaactcgatcagcccggagttgagctgctgctcgctcagatcaaggtcgctggccaatcggtccaacgtgctgagattcgcgccgctgagtttgaccagcgtgccgtccttcaaatgatggaatcgttgacgccgacgatacgaagacagcaaggcacccacttcgtccggcggtacttcatcagcgaggggtgatatctccaccaaattgcctttgatggacaatccgactttgacgcttggcggcttgggcgcgatcagccggtcaaaagccggtgtggtgaagacctcccctacttccttcagtgcgggcaatccctcgtcaaaaagacgaacaatctgcgtggtgtcatcgcgatcgatagtggccgcatcagacacgaattgtttggcggtctttcgcgcggccgacgttcggaacccattcaccgtctgatgagtggcggccgcaacgcgcttgcgctggtcaggcatggtaaagaattcacgcactacatcaatcgcaagatgctcagcgtcgaaatcacgcccaatcacgccccgagacaaggggatggaacgctcatccctagcatgcaccgtcgggccatcgggtagcaacgggacaatggcatcgccgtagtgtgccttgacctcgcattgcacaccatgctcatcacgatccagataaaactggaggctgcattccgtaggacttaattcagccagctcgcgaggaatctcactggcctccaacagtccggcaccaaccagctgaggcaatagcgtgcgtgcgaacagggcgatgtcatcaccggcaatgacctgcccctcgccatcgggttcaaacaggtctcccaatagtcctcgcaacggaatcaatcgtttcgggcaacggacgaatcggcatcccgctgcgcttttacgctgagagcccgccatcatggcggataccgcaccggccggattagtggaggcgagcaacagccatacatccttgccaccatcaatcacggtttccaccgccggcactccggcaagcaggtatccggcatccggaccatacgtattgaaatcacgccgcgcaatgcgcataagaaaatctggctcgccaccatcaaccggcaccgatgcaggctgcccggagaaccatgtgttcaacacgagctgtacgcctctgccctcacgtacggacagcaaccgggccacttccggtgctgaaagtgtcaggtgacgatcgatggcgatatgcccgtaataccggtcctgctgctcggccgcacgacgcacggccatcgcgtcgtcaaggaagcccagcagtgggcgcgaatcatcgtcgaacatatccggcgtatgggtaaaggcaagcttctgcccataatccgtatagtcgccgttcgccatggtaagcacaaattgcggaatcgatttcagtacatagctggacccattggaagtcgatccgatcttgaactccacgctccacacgccatcgatgaaactcaatatcggaacaagctgcacctgccccaagcccacagtctcactatcgccctgatacccgccgcctcgggtgccggcacgagagccgtatccgctattcgtacgtcgtccacctgcgccatttcgtctttttgcagtatcgaatcggcgcatgagcgcattgcggcgacgcgctttggcttgagcatcttgcctatcgacgtgctccatatagtcgatcagcgtccgagacggcctcacagccccggcacggtacccttcaaaacgctgcggatcatcgcagaatatgaaggcgagcgcaatcatgtgcttgcacatgccatagccacggccgtaagccgggcatgagcacttgccaccgacggcttctcccgtatcgaggtcgaattgcacgctggtacgatacctactcgatgggctggtggtgccacgtagaataccgtcaagctcggcatacccggttcgatgattttcgctgtataccggattgataaccatggtggccgctttgcgcgcaatgctacgggcacgagcgagcacggcattcgacgatgacgattccacatcgttgcgtaacgcaaggatagggacggcatgggcttcggcacgcttcgcagccccggcgaaatggccttcgtcctcatcttcgaaccatacggaacgtccttgcctgaaacgatagggcataaccgcatcggcggcggacaaactgtccgttccgccaaacgttacggctctactgccggcagcgcctgtgcccccaagcattccacctgcctcgccagagataccgcctataccgctgctcttgccggcaaagagacccctgtcctcattagtgtcatctgtgtcatctgcgccataccgatcatcgtcgtaatcggcaccttcgtcgcctccccttttccaaggattgcgacggcgcaacgcatggccccaggaaacgccggaatcatcatcctcataaggcaggaggtcatcgtcatccgcattatcgggaacatggccaaatacaccataccctttgctcatgggcgagcctcctttccagcgaatgcatttcagtccaacacttctatcctagacgaggcgcgcggtagccttaatgtatggatgcagacaagccggcgcaacgcaaatcctatgcagggaacaccaccctcgaaatcttcgaggtgctgtggcgtcacagctactttggacatggcctgaccgtgcggcaaatactcgatgaacttgcccgtaaacaccagctggaagatccaagcgagctgccgaccgagaaaaccatacgaaatcagctcaaaaagcttaccgccacggaatttctcggcagacatatcgggcatctcaccgaaagcgaccttgccggcatcgaatgcaagaatccacaacccggctggtatcttgacgcattcctatccaccgccgaaatgcgactgctgctcgacagcctcaccttgtctcgcatcagcctcgacaccatggacgatctcatcggtaaaatccgcgaactcgcaggtgccgctgggcaagcagtaggttaccttgagcacgtggccacctacacgcatatcaacggcgagttcctatccaccatcgaccaactgaatcaggccattgaagaaggccacggcgtaaccttccaataccgtgattacggcccggacggcaccctgataccgcataaaagccgtacgggcgcaggtcgaattacctacaccgccgacccttaccagatggtgtacaagaacggacggtattacctcatctgccatctacatggcgaggataatctccgcattttcgtggtcaaccgaatcgccaacgtcagcgccaaaggcaggaacggcacagttccactggaaaaaccagcgccggctgattttgacgcagtgaacttcatgcgtcaccgcccgtatcccgtagccgatgccccgattcgcatccgcatggccgtacgagacgaatccatgctcaacaatgtgttcgaatggttcgacgaccctcagatcaaacattcgccggacggcacacagttcgaagtcatcgtcgatgctcccgaacgcgccgtgttctggtgggcattgcagtattcctgggatggccgcgtagtgattcttgagcccgattcgctcaagcgcaaactctatgatgccgggcgtcgcatggccacagcctatgctcccgaatgatgcagcatcacatcgcacacctccttgccgagttgttcaccagcgaatttcaccggagaacctatcatcccatcgccaatcacgttcggtaattttttaccgaacaactcgatttcaagccattccacgaactatggcccccgcctagccgtacttgacgctaaggtggaaccatcacatgccgcgatgcacatgcaacgcaaacgcaacgatatgtaaggagcaactatgagcgaagagcgtaccgcatggggatggggtctggccagcgtagacgccgccggcaccaccctggacgtctggtaccccgaactgaatctcggtgaggcaccggccgaggccgatcgtccaaaccacaatttcggcactctggctcacgatgaagccgacgcccgtggcatccgccgcgtgccggtattcgtcgtcagccagttggacgagccgatcagcaacgccgcggacgcttacctgaaactccatctgatgagcatgcgcatggccaagccgaacacgctgaaccttgacggcatcttcgcccaactcgccaatgtggtgtggaccaactacggtcctttcgccgttgaggacttcacactacgcaaggccgatgtcgaacgcgcctccaccgaagccgctctcgctttcgctgctcaggccggactgcctgccgcagctcctgccaccaccgtcaacgtgttcggtgtggataaattcccgcgcatgatcgattacgtagtgcccaccggcgtgcgtatcggcgacgccgaccgtgtgcgcctcggtgcttacctatcttccggcaccaccgtgatgcacgccggattcgtgaacttcaatgccggcacgctcggcgtctccatggtcgaaggccgcgtttcgcaaggtgtggtcgtgggcgacggttccgatatcggcggcggtgcctccatcatgggcaccctctccggcggcggcaagctgcgcaactccatcggcgagcactcgctgctcggcgccaacgccggtatcggcatctccctcggcgataactgcaccgtcgaagccggtctgtacatcaccgccggcaccaagatcagcatctgggacaaggccaaggccgcagccggcgagccgctcgaagtcgtcaagggtgctgagctctccggcaaagacaacatcctgttcatccgcaactcggtgaatggacgtatcgaagcccgctaccgcaaggtgggaattgagctcaacgccaagctgcacaagaactgaaattgaaataatggagcgttatcttcgttgctcctcggtcgacgtacttccgtacgccttccctcggtgcgcttcgataccgcacacattatttcaatttcagaactagccctgctcgttcttatgcagccgtcgcagcatagctggtttgcgctgtacatatagaaagcgcctcactggatctccagcgaggcgctttctcaaaccaacaatcaccgctcgtccatcggcacgaaatcgcgctcgaccggaccggtgtagacctggcgcggacggccgatcttggtgttcgggtcggccagcatctcacggtactgcgcaatccaaccgggaatgcggcccagtgcgaacagcgtggtgaacatggccggatcgaagccgatcgcccgataaatcaagcccgtgtagaaatcgacgttcggatacaggttgcgcgatacgaaatactcgtcgttcaacgcaatatcctcaagctcggtggccacatcgaacaacgcacgctcgtcggacggcagcttctgcgtatcttcgcgctccatgatcttttccagatacttcttggcaatcgccgcacgcggatcatacgacttgtatacacggtggccaaggccggaaatcttctggccatcctccttggcatcacgcacgaactcggccacagacttgccggaatcacgaatcgccttcaattggcgcagtacggcctcattcgcgccaccgtgcaacggtccggacagggcattgacgccagcggccaccgccgaatacaggttagcgtgggcggaaccggcgatacgcaccaccgaggtcgagcagttctgctcgtgatcggcatgaataatcagcaaacgacccaaagcatgcacatacaacgggtcagattcgaacggctcgtacggcacagcgaagcacatgcgcaggaagtcgtccacatagccacgcgcgtaatcggggtacagcatcggctcatcgcgacgacggcggaagatgtacgacacaatcgtgcgggccttggccatgatgatcttggcggcctcatcgagctggtcggtgtcggagatatcggtggtgtccggatagaacgtggccagcgcattgatggcggaggcaagcacgctcatcggatgagcggagcgcgggaacgaacccatgaaggtacggaagtcttcgccaaccatcgtcttgtggttgatgtccgcgcagaactgctcatactcagccctgctcggcagctcgccgtggcgcagcagccacgccacttccagaaaatcggagttctcgcacaactgctcgatggggtagccacggtagcgcaggatcgaatgcttgccgtcgatgtaggtgattttcgattcgcactgtgcggtggtgaggaatccggggtcgagcgttacccagccgtcattgcgcagcttggaaacgacgatgccatccggccctgcactagccttcaccacgggcaggttgaacttgttcgaatcgacatcaagttgtgccgttgccattcgcgcaccttcctcttcatgaaccacttaccccaaacattaacgttcacgcgttcgcgaacgctagtgttcggtactttatgtcttctgtgttaccgccggcagacgccggtcgatacacgaaagccgaagtgcgctcatgctatcaaagcaaacgcacttcggcttgttacgtctcgaattcgcgggaaaaccgcgaatatatagacggttgatgagatgccgatcgcccatcacaggtcaatcagacacccgccatacgccaaacgccaatcagaggttggtgcgatcggtgaagatgatcgggccgttctcggtgatggcgatggtgtgctcggagtgggcaccgcgcgagccgtcggaggcacgcagggtccagccgtccttcggatcctggaagatctcgtcggtggtcttgaggaaccatggttcgatggcgatgaccaggccttcgcgcagcttgtagccgtggtgggcgcggccgtcgttcggtacgtgcgggtcgccgtgcatgatgtggcccacgccgtgaccgccgaactcgaggttgatcgggtagccgtattcgcgcgcgatgtcgccgatggtgttggagatgtcgccgagacggttgccgggcttggccacgtcgatggcggcggcgagcgcttcctcagtgcacttgatgatgcgcaggtcttcggggtccgggtctttgccgaccacgaagctgacggcggaatcggccacccagccatccacggagatggcgagatcgagggagacgaggtcgccgtccttcaggctgtaatcgtacggcacaccgtgcagcacggcgtcgttgacggaggtgcagatgtagtgggcgaacgggccggtgccgaagtcaggagcgtagtcaacatagcaggattcggcgcccttgcggtccacgatcttcttgtggacgaactcgtcgatttcgagcagattggtgcccaccttggtggtctcctgcagttccttcagaatgccgccgacgaaacggccggccggcttcatttcctcgatttcacgaggggtcttcaattcgatcatgaggttctttctaccttgttgagacttgttctcaactctagcccagcccggggtcaaccgccagagcatcacccgtggtctgcctagggtccgctagtagcctatcaacggccaaggccgagaaaaagcgcccggcagatacataatctgcacgggcgctttggattgattgtccggagattgattgtctggagcgcgagatcacttcctgcgcttgccaaaagtgaacgcgcgaatcactgaagtaatccccatcaccaccatggcacatccaccgaagataatcatgaatacggcggagctcagcgggctcatcagcaccacgaagccggcgataatcgagatgatggcataggcgatggcccagccggagcgcgggatgcgccatgattcgactagagccatcacgccttccataatccaaccgaaaccgaccatcagggtgatgagtaatgccaaggtctgaccggtcataccgtagtttcgtacgactacgacgcctccgaaggtcagcagaatgccgacgaacacgtccagcacacgccagccgcccggcagacccggctccacgagagcgctgacgatgcgcaccacgccggaaatcacgaaatacacgccgagcaacaatgcggccaaagccagcgtcttgttcggcaccaacaacagcgcagcgcccaaggcgatggcagccacgcccaccacgccgtaaatgatgcgaatcttggtcttggccttttccggcagccattcctcgatcaggtggaatggactgaaattgccgacataccagttggtctgctgccagccgggttgactttgatcgccccatgaaccattcggctgcccgtccgcttggctattcgattggccgtccgcctgataccgccgaccgtccggaccccatgctggctggccgttcgggccatagttcggattgtaggcgtacgggccgtagtacgggttctggttcggtccgccttgtggctggccgttctgcgcctgctgattctgagtgtcttgcgctcccggcgcaccttgcggaggatattggccgccatgattgctgtcatacgcgccatactgcggttggcccggttggcccgccggattcggctggctcggctggctctggttgggctggcccgtctggccattccactgaccctcgtttggattgctcatcgtaactccttaactcaaggtccatattcaggttccacataccatgttaggcaagttacctaatttgaaccatcactacagttaggcaatccgtctagttcactgacagcgcaatacccataacgcaatatctgcatcaccaacgcttctcccccgccgcgattaggcttagggccatgaccaacgaaaccgaaacgctgacgtcgggcatcgacccggcatcgttctcctccgtcatcaagccgaccaatgacctgttccgctacgtgaatggtccatggatcgacacctaccgcctacccgacgatcgttcgcgctacggctccttcgacaagctcgccgaagacgccgaaaaccaagtgcgcgacatcctcgacgccgacgactgcccggccaccaaatcgcaggctctgtatcattcgttcctgaacaccgacgccatcgaggccgccggccttgacccgatccgcgatgagcttgacctcatcgattccgccatcgacaaggccgctctcacgcgcgtgctcggcaccatcaacccagccggcggccccgacctgttcggcttggccgtttacggcgaccccggcgacccggaccgcaatatcgcccaccttgagcaggccggcctttgcctgccggacgaagcctactatcgtgaggaccactacgtccccgtgcgcgaagcatacgtggcaatggtcgccacccagctggtgaacgccgggtacgcgcccgccgccgaatccaacggtggcgatgaactgccggccaacaccggcgatgacgagagcaatgctcccaccacggttcccagcgaagccgcacttgatatggcccgacacttccttgccgtggaaaccaagatcgccgccaaccattgggacaatgtggccacgcgcgattcggtgaagacctacaaccccaccgattacgccgatttggccgccacgctgaagaacttcgatctcgcttcctggatcgacgcctggcagaccgcctatgacgccaccgaggccgccaaggctcagccgatcgatttcaagtctgtgttcgcgcgcatcattgtgcacgagccgagcttcctcactggtcttgatgcgttctgggccgaggccgatctggccgaccttaagctgtgggcccgtgttcacatgattctgggcttcgcctcctccctgtctcgcgacttcgacaccaccaactttgacttctacggcaaggtgctctccggtgccaagaagcagcgcgatcgttggaagcgcgcggtgagcctggtcaacggcgtctgcggtgaagatgtgggccgcgagtatgtgcgcctgcacttccccgaaagctcgaaacgccgcatggaagagctggtcgccaatctgattgacgcctaccgcgtgtccatcgccaattccgattggctgggcgaagacaccaaggccaaggctctggagaagatctccaagttcacgccaaagatcggctacaccaaccactggcgcgattactcggcactgagtgtctccgcggatgcgctgcccgccgagaacgccaaggccgcgaacctgtacgagaccggctaccagctggccaaggtcggcaaggcggtcgacaaggacgaatggctgatgaatccgcagacggtgaacgcctactacgagccgagcatgaacgtcatcgtgttcccggccgcgattctgcagcccccgttcttcgacccgaaggccgaggatgcggcgaattatggcggtatcggcgcagtgatcggacacgagatcggccatggcttcgacgatcagggttcgcagtatgacggcgacggcaagctcaacaactggtggaccgacgaggatcgcaagaacttcgaggcccgcaccggcgcattgatcgcccagtacaacagctttgtgccgctgcagctggcagagaagtacgctgacgagtctgataaggcgccgcacgtgaacggcgcgctgaccatcggcgagaacatcggcgatttgggcggcgtgaacatcgcgctcaaggcgtatgcattcgcgctcggcaaggcggcaggtaagcccgacgccgaagaagacggctcccccgccgccatcaaggcactgctcgataccgcccccgaaatggacggattcaccggcctgcagcgcttcttcctgagctacgcctccatctggcgcaccaagaaccgcgacgagctggccgaacagtacctgcagatcgacccgcattctccagccgaattccgcaccaacggcatcgccagcaacgtggacctcttctacgatgcctttggcgtgaccgaaggcgacgccatgtggctcgcgcccaaggaccgtgtgagcatttggtaatccccgttatgtaagagaaaaccgctgtgcttgcctcgattacaggcgaacacagcggtttttcatgatgtatggttggcactcagaattcggattcgctgggatcggaagattcggcgaaaccgtcgacgtaggtttgttgggctgcggactgtggctgattagcgccagcgtccggttgtgacatgacggcatcggccatggacgcagccgctgactcggttgatggcgacggcgattggccggaatcggaggtgaccccaaattcgacggggccagattccgacgaggtcgcatacgggtcaatgcccacaccggatgcggcaccgtccacactatattgcgttggcctcatgtgcggtgacgatgctcgttgcccgtttccgccatccatgccttcggcggcaccattggcattgccgttaccgttgccaccattgcctccgttaccattaccggcacgctgtggcttgatcagcgacgtggtgccgaaggtcaggtcatgcccaatgttggtggcttcgagaacggttctactgcgcggttcgccttgctcattggtccactgctcggtgatgagtgagccgaccacaatgatgcggtcaccgcggcgaaccgaactggcggcgttcacggccaaagcacggaacgctttgacgcccacccatgcggttccgtaatcctcccattgtctggtagtcgggttgagtcgactgcgggtgctgcccatacggaatgtcagcacgcggaaactctcagttccgcctagtgtcggatcaccggccacaaagccggtgacggtcactgctgcttgttgatttgccatgatcggtcctttcctcggcctgctggcctgttgtttggatgtggaccgccggagcctgtctccggcttcattgccggcttgcacgccccagcggtacctccactgtgaggcatgacgtttgaagtgcacaagggcaactggcaaatgtggatactgtgacgcagttgaaattttaagaatgtggataagtttcggttatccacaacaaagcgccattctgcgactgagcagaatggcgcttgatgcgattaacgccgaggctgagtaagtgggactcagctgagggcggcgaagcgctcggcgagcgcgtcggcggcttcggcggcgggcacggcgaccttgttttcgccgttgcggtcgcgcagttcgatggtgccgtcgttgacgtaatcgcggccgaccacggcgaccagcggcacgccgatcagctcggcatccttgaacttgacgcccggagacaccttcttgcggtcatcgtaaataacctcaaggcccttggcctcaagctcggcgaccagcttctcggcaccttcaaacgccacggcgtccttaccggtggccaccacgtgcacggcagccggggcaatcacggacggccaagccaagccggcttcgtcgtggtgtgtttcggcgatgcaggccagcacgcgggaaacaccgatgccatagcagcccatccacaccggcacggccttgccgttctggtcgagcaccttcaggtccagtgccttggagtacttgagacccagctggaacacctggccgatttccacaccacgctcgaagctcaacggaccggaaccgtccgggctcatgtcgccgtggcgaacctcaacggcttccaccacgccgtcggccttgaagtcacggccgtacaccaggttgtagtagtcgacctcgttctcatcggcaccagtgaaccaagcggaacccttgaccacgtgcgcgtcgaccaggtagcgaaccgggttcttcacgccagcagcctcggcctgcgggccaagcaccatcggtccgatgtagcctggcaccagttcggggtgctgcttcaggtcttcttcagtggcctcctcaagctcggcgggagcgaactgggcttccagtcgcttcatatccaccgtacggtcgccgggcacgccgacgacaatcacttcacgccacggctcgtcatgctcttcatcctcagggtgcttgacggtaatcaccacgttcttgaggatgtcggaagcctgccattcacggccatcagtacgcgggtggtcggcgttggcacgctcaatcatgttatcgatggtcttggcatccggggtggcttccttggaagcggcgggagtggcggaagcatcgatttccggcagctccggagtgctcagggcctccacattccatgccttgccggaaggtgccagcgcgaaggtatcttcgccgatcggcatcggagccaggaattcctcggatgcggagccgcccatcgggccggacatggcgaacacaggtacgtacttcaggtcgaggcgctggaagatacgctcgtaggcgccgcgctcgtcatagtaggccttgcgcatgccttcttcatcgatggtgaaggagtaggcgtccttcatgatgaattcacgaccacggatcaggccggcacgcggacggaactcgtcgcggtacttggtctggatctggtacagggtgacgggcaggtctttgtaagaggagtacatgtccttgaccagaagggtgaacatctcctcgtgggtgggggccagcaggtaatcggcctcgtggcgatccttcaaacggaagatgttgtcgccgtactcctcccagcgatgggtggcctcgtagggttcgcgcggcagcagggccgggaagtgcacttcctgggcgccgatgccgttgatctcctcgcggatgatggcctcgatcttgttcagcacgcgcagaccgagcggcagccaggtccagataccgggtgcggccttgcggatatagccggcgcgctgcagcagcttggccgaatcgacatcggcatcagcggggtcctcgcgcagggtgcgcaggaacatggttgacatacgaagggtattggaagtcatgtgttccaagatattcgcgtgaaccgacaagcccgcctgctattcgcactattccggccttcatcttggcattcggactcattcgtacaacaatgatggctagaagggtaggagggcacgatgacgcagccgaccgagcaacaggggaatcagccggaacccgtggagcaaccggtgtatcaaccggcccagcatgggccccgcaattttctgctgcaaccccgcaattcccaacggcagttccgcgacaaccggtatcgcaacagccaatggccatgccaccatttgcgcaatcgcctatgtcggtcccggaacaatcggcctacccgcatcaaccgcaacaaccgggcccggtctatgcttctccctacccctacccgaatcgggcaatggcacagccgaaccaaccatcagtcacgcaagagcgattcgggcgttcgtcgggacggctgaccgcatcacaggttattgagacatacgccaccatccttgccggtgtaatacttctcggcctcgcatgaaccaatccgcaaccgtatgccccggtggatcttatcgccggcctgtccggagcggccgcgctgattgtgggtgtgcgtttgctgcaagcaccgttgatctacggcacggtgattcttatcgtcagcacggtgactgtgctgtggccatggcgggccgaattctcccgccactaccggtgggtgtggcttgctttgggcggcatcattctgattgtggcagccgcgcgctatgaggcgagcctcaaatcaatgaggacgatcgccgcgcgtattggcgatctgcgctaaatcgcgcgggcgacctgaggcagattaccaacgtccggcgatagcagtcctgcatacggggcagtgcccattgccactgtatccggcagataaacggttggcaatgattcgataccaatcgcgttccacgagcttggccctgcattcagggtttgggcaatatgtggtatcgccttcacgatcatgcacgttgccggtgtacacataattgagtccctcttcgagggcgatgcctcgggcgcgggtcagagtctcgtgcggggtgggcgttacgtccatcatgcggtaactggagtggaatgcggaaaagtgcagcggcacgtccgggcccaagtgctcgcgtatccatgtacattcagcatgcagctgggcgtcgtcatcgttgagtccagggatgagtagcgtggtgagctccacccacacgtgttcgccttctggtgtgcgtgcctcgttgaccgcatagtcgatggtttcgagcacatcggccagatgcgtgccggtcactttccaataaaattcttcggtgaagcctttgagatcgatgttggcggcgtccatggcggcgtagaagtcgggccaggcttcggcgctcatgtatccggcagtcacggcgatgggatgaatgccgagcgctcggcaggcttcggccgtgtcgatggcatattcggcgaacacgatcggatcgttataggtgaacgccaccgaatcgatgccccggtcggccgcgacctgcgcgattttctccggactggcttccacgccgagccggtcgaaactgcgggctttggcaatatcccaattctggcagaatcggcaaccggaattgcagccagccgtgccaaaactcagcacgctggaaccggggtggaagtggttgagcggcttcttttccactgggtccacggcgaagccggagctgcggccgtaggtgtcggagacgatgagtccgtcgtggtttgagcggacgaagcaaaagccgcgttggccgggcttgaggacgcagcggcgcgggcatagttcgcagcgagcgcggttggtaccgtcgtggaattgcgtttgccagcgggctatggcggggttacgaacatctgtgactgacgccgtatgaccgcacgattctcggtgaccaccctctgattctcggtgaccaccctccgtcgcttcgcgccacctcccgccagcgggaggggacatggttgctgcgttagtgctcggcataggcggtcacctcgtagcgttgacagtcgatttcaccatcgttccagtcgtaggacgggcggataccggctttggcgagcaggtgagcgacgaaatcgtgcggattgggcagctcatcccacacttgtggcaggaatgtggcgctgcggccacgacggtcggcgagaatcagaccgtctttgccggggcgtaatacttcctcaagttcagtgcgcgaacgtaccgggcgttcgacgttgctgccgtcccgtttgacggcgtcggtctgaggtccggattgcagcgatgccagagtcgcggtcttcgagccggtatcgcgcgaatcggcgtcacaggagttcacggtaatcggctcgggctcgcccaagacggatacctccacgttgagcaacgggtattccgcggcggtgaccgggttgaaacgtgggtcacgggtggcggcgtccaccgcatgtgcagctatgtccttgccgagcgagcggtgggcggccagcgaaccgatgcacccgcgtagccggccaccctcggtcagggtaacgaaacaggcaccggactcgttcagccatgggtttgcggcaagaatggacgcggtcgaatcggcggctgttggatgttcaatatgcaaccgttcccggatagcggcacgggcgagtttcagcagcacatcaccatgggctgttcccgattcgcctaagtcatctgcaccggctggagcatctgcttctggtttggattcccacgcggcaaacgagacatatcccactaccggctcgtcggcgtctcgcattgcggggcgaggttggccggcaagcgccaccacgccgtcgtcgccggaagtggaacagccgagctcgaagagcttcatgtccttgcggccttttaacacatccagaaggccgttgatcgggtatgcgccacaggcccggcgagggtgaatcggcagatgcaaagccgcaatgtccgcaatggtctggtcatccaacgcgcgggcgacttcgtgcggatgatagtgcgagagatccgaactaatcacgatgacggtttccgggccaccccacaaagcacgcaacacatcacccgcctcttgtggcgtggcatcgcccgcgttcaacggcacaatagtgaggtctgggccgagcacggtttgcaggaacggaatctgcacttctaccgcatgttcttgtgcgtgggttgggccattgacgatcattgcgggagccgacgcgcccggacgggcatgtgtaccggagcgcaatggctcattgacagacaggcccagagccttacgctcggctgcaatgtctaccggcacagtgcccagcggcgtttcaaacgccgctaccgtggaacaggcgacgcctcgcacggccacacggtgagtcggtcccacgattaccgcgcgagtcacactcccccgccctcgttcgagcaaagcataggcaagcgcggccgccgtgccggaatacacataaccggcatgcggcacgattacagcctttggcactcccgctggaagcgtgggctccaactgttgcagaacctctcgactgtaatccaattgatgggtaatgagttgcttgagcgttgtgcggtcagcggggtagaacgaaccagccaccgctggcggacgtattgcgccagtgattttgccgctgccgtctgccgcgcttgctgcatctgacgcactagccacactaaccgtatcgatttgcacaccggcccgggcggcctcgcgaacctcattgtttccacgaaatatctcggatagcaccataactaccacctcttattccatggtagccgttcagttcctcaatgaagacaagttcgcagtgtcttcttcggcttcaaggggccgattccgcctcttggagacatctacttgcatttcgaggggctggtcatccgctcaatcgcacatagaaacggcttcataccaacgtcattccgccgtttttaagcgctgtctacttggacatcagccccttgaaacggaagtagatgtcccgaaaactcaaaatccgcccctcgaagtgcagaaacactcaaattagcggtcgttcgatatatcgaccgtcagaataacgcgtcctgggcgaagtcatcatcgggattgacaccgaattcgtccggctcggcgggtttgaacgcgcttgcaccttcatcggccaactggtcggaagccgaggccgaggcttcgcgcaggtcgccgtcgagcaccacggcatcgggcgagacgaggaacatgcgttcgttgacgccagccaaatacagtccgcccagcgattcgacgcgggacaacgccacatatcccatgcccggcgcgaaggtgcgcttcagatccatgaccgcacgatcaagcgtcatgccttgcgacttgtggatggtgatgccccacgcgcaacgcaacggcacctgcgagacggaggcgagcacggtgtcgccgtccatcatttcccatgtggcctgtttcatggtgacgatgttgccgttttcgaattccacgatcggccagccgcccttgttctcctgcgcgaagccgcgcacggtgccgagcgagccgttgacgtactggcgatcggtgtcgttgcgcagggccatgacagccgcgccttccttgagtatcaatcgctcgggggccagcatgttctttttgagccggtcgaccagattggcgggacccgcggtttcggcgtggaactcgtgcggctcaagcatgatctggttcaggcgcatgtcgttgagattgtcggcctgccggttcaccgggaataggtggacggcgacctggccgggctcgggcagtttgcccagacgggtgacgagcacgtcacggtcggactgggtcacgtcgccttcgcgaatgtcggtgagcacggtcagcagttcgccggtgtcctgacggtgctgttcggtcagatagcagattaccgggttaagttcaggccataccagcgattcggtgatgaagccttcggggttcaagccggcacgggcataccgttcgcgactggcgatgaattcgggggtgggggcgatgaggtcgcggttgcgcccggacaccgaaaccggcggcagttggaagaagtcaccggacagcacgacctggatgcctccgaacgggcgtgggtcgcgacgcacttcgcggcagacttggtcgaccatgtcgaacagccatgcgtgcagcatggagacctcatcgatgacgaggatgtccgtagcctgaatcttgcgtttgcgccgggatttgatgagtttgagcagactcgggctcagggcggtggccacgccgacgccactccacgaatggatggtttggccgttgatatgcgtggaggcgatgcctgtggacgcggtgactgccacgctggcgccgtcggcccgagcctggcggatgaactcgttcaagacataggtcttaccggcaccgggcgcaccggtcagaaacacgttcgcgccggcgttcagaatggctagggcttcggtttggcgcatatcaacctctctagactcccctcagggaggggagccaagtacggcggactacttattgagaatgctggtggccacgatgtcggcggcgatggccttggaggcggcatcatccgggccggggacgggggccatgaaggccttacggtagtagcgcaactcgtccaaggactcgatgatgtcggcgagggcacggtggccgccgttcttcggcggacggttctcgtagacggccgggtaccagcggcgggcgagctccttcaaggtgctcacgtccacgctgcggtaatgcaggtggctcatgaggcccggcatgtagtggtcgaggaacttcttgtcggagccgatggtgttgccggccagcagcgggcgcacgccttccggcgtgaagcgcagcacgtattcggtgaccttctgctcggcctcggccaggctcaggccattctcccactcgttgatcaggccggaacgggtgtgcatctggcgc

SEQ ID NO: 3815 - DNA, 19691 bp, Unknown
  R35_2m  MAG No. k141_6512
cttcttcagaccgcgctcatccagctcaggatcggcgatgaacatcagttcgtacttgtgcgcagacatcacccacctccttcggactattcggccacggacgttccgtggcaggagtgtgtatgcgtgttaatcatagggcgatgcagatgcacttcgccctgtgagcaacttacctatcttatggtcagggcgggacagtgccgcatgttcatcaacgattgcagcactcttacaacacagccccacttcacggcacgcgctgcggtggggtgctagtacactggttaaggctaaaaacactgcaacacaaaaggatgcgaaagcatgtcggcgattcttgaaggcactccggataaacgactcgtattggtcacgggccgcgcctaccccgagctagctgagaaggtggccgaatgtttgggaaccgaaatcctcgaaaccacgtcctatgactttgccaatggcgagatgtacgtgcgtttcaccgaaccggtgcgtggtgcggacgtgttcgtgctgcagtgtcattcgggcgatatcaacaagtggatcatggaacagctcatcatgatcgacgctttgaagcgcgcctccgccaagtcgattaccgtggtggcgcccttcctcggctactcgcgccaggataagaagcaccgcggtcgtgagcccatcaccgcccgtctgattttcgatctgttccacgccgccggtgcagaccgcattatgacggtcgatctgcacgccgctcaggagcagggtttcttcgatggtccggtcgatcatctaaccgccatgccggtgctgctcgattacgtgcgttccacccttgatctgggcaacaccaccatcgtgtccccggatgccggccgtatcaaggtgtccgaacagtgggccgccaagctaggcaatctgccgctggcattcatccacaaacagcgtgatattactcgtccgaaccatgccgaggcacatggcattatcggcgatgtcgacggccgcgactgcgtggtcatcgacgacatggtcgataccgccggtactatctgcgaagccgtgcgcaccctgaacgaatccggcgccaagtcggtgacgctggtcgccacccatggcctgctctccggcccggccgtggagcgcctggccaactgtggcgcgcatgaaatcgtgtttatggacaccgtgccgattcccgaagagaagcgcctgccgaatatgaccgtactgtcttgcgcaccgctgctggccgcgggtattcgctccgtgttcgaggaaggttccgtggcgattctgctcgacggcctgcccgaggacatgcgtccacgcaatatctatgcgtgattgatacgccgaaaatccttacgaaagaacgccgcttggctattgatcaagcggcgtttttccgtatagctccaatcagatgaaggcgcgctcgccgaagatggcggtgccgacgcgcacgatggtggagccttcttcgatggcgtaggccatgtcgtgggtcatgcccattgacagttcggtgcagtcggccgtgccttcggcaccggaggcaagaatctggtcgcgcgtgcggcgcagatgcgcgaagcccgcacgaatcgtgcgctcatcatccacatgggcgccgatagtcatcaatccctgcaagcgcagtccgcccatcgcaccgatgcgctgagccaagtcgatggcgtggctgggtgcacagccggacttcgattcctcgccggattcgttcacctccagcaacacgccgaccgtgatgccgcgcatggtggcacggcgggcgatcttttccgccagttcgatggaatccacggattcgatggtgtccactaccggcagcaccttgccgattttattggcttgcaattggccgatgagatggaagggaatatgcgttgcagctgcggcattggccgtgtcagcctcagcggcatcaatcacgcctagcgaataaccacgctcccccagtcgttttgccagaccgtcagccttgacagtaatctcctgtggacgattctcaccaatcacgcgaataccagcatcgatagccgccagaatctcgccgacatcgcgcgtcttggtggcagccagcaattggaccgaaccggcagcacgcccggctgcggactccgctgaggcaatccggtcaagcacgcgatgcacaccatcagtaatctcttgtgcgcgcgcctgatcgataacttcgttggcgagatccttatggtccatgtatgccgtcattgctgcccctgttcgtagattccccaccatcgtagtctcatacgcgcacataatgcttgttattgaacaaaagtgaagcccccgctgttcatgcgcgggggcttggtgatgctaggccgagcgagtgggactagcaggtaccggacttgcggcgcttgaggatgattacacccgcaacagcaagtaccacggcgaggatgccaacaccaagcacggctgcaccggtgtcaggtatcttcttgtgcttgccggagtctgcatcacccttgttctggttggaatcgttgccttggttgggcttgtccgtgccggaaccgggcttatcgccaccctggccaggcttcgtggtgctcttctcaaccagacccgcgatggcatcgctgattgcctcagtcgcagcctgtacgtcagactgggcggcctgaccatcactcgtcagcgcattcgccgtagcgactgccgaatcaagcacggccagcgattcatcagtccactttgtgcgatccacggcagcagcggcatcgagctgagcgctcagcgcggcacgatcttgcaccgtagctacaagcaccagcttcttcgctgcctgcttcagctgggttgcggcatccaccaccgcagcttcggtggcatcctcagccttatacacctgctgcgccgaatccaataccgccgcgtactccgcccatgaagtctcggtgtacttggaggcatcgtcagccttaggcgagtcagcgagcgcctgcttgagctcggtcttgtcgatcggtgtgggctcaggcggctcaggcgtactgtcgtcaatggcatgaacctgccattcggcaacagccggagaagccgagccggacgtgataaccatacgcaacttggtagtcttgaccggagtgttccacgtgccatcagaccaccccttggcatcgccggtggcccagccagcagacggtgaattggcggtcacagtgtaggtggcgtcgggaatatccacgaagttgccggcaccgttgttcgccaaggcgtcccagtactgcaattcccacgatgccggaatacccaatccgccatcatccgaggtgaattgcacgcggctagagtcgatagtcacttcacggtcccactcgtagtcgaggcgcatctcaccggtgttgggccaagtgccccagacatcctcgttggcaatggtgatatcgggaatgatcttgccgtcgttcaacgcggcggcacccttgacccagccggatgccttgccgtccacatcggtggcggtggcatcgccctcaatgtagccggtcagcggcacggaagtgtcggatggaatgtcggttttcgccgaagcggacacgttgccggccttatcggtggcgcggtagtacacggtggcgcgcgacgcgctcggtgcagcaatcggcttgctgtacgtggcccattgaccgtctgtgccaatgcggtattcaattgatgcgacaccggaaccggtgccgtcatcagcggtcaaggtcagcgtgcgctcctccttatcggcggcggcggtcacggttggcgcggcggagtccaccttgccgccggccttggccacgtcggaaacgttgccggcctgatcggtggcgcgagcccacacttcgacatcgccctgctgggaaagcgtggcaatggccgcgtttgcattcgcggcgatggtggtccagctcttgccttgatcagcggaaatctccagcttggcgataggtgcggtgtcgtccgtggcctgcacggtggcgaacggagcggtggtgagccactcgctattgcctgcgttagcagtaacggcaacggttacagtcggcttcgtggtatcagcggcaggctggtagccgtcctgcacggtgacatttaccgacacattgccctgctcgcttgcctcaccgggcacgccggcgaccacgccgtaggccgtaaacgaaccgaccttggcatacgaggaagcatcaactggacgccaaattactggggaggcaacggttgggttcccgtacttcacatccactgtggccggcagagtaggcgcagtaccggtggcggtggtcacgctcttcggcgcagtgattgccggcgattcgctggagtcggagccgacttcccattcagcaacggccacggaggcatagccgccatccacagcttgaccggtcatgtcgagctttaaggcagtagtggtcaccgcatcgaaggtgacggcgttggggttggccttgcctgtggtcgttgtataggcactcgggttggtgacatccttccatgtgccgtccgcgtccaagtactgaatcttccacgaggcgggcgcgcgcagagcgttggaatccacgtcgaaccaaaccttagacgagttgacgcgcacagtgccatcccattggtagaccagagaatcgccggactgcgattgcgggatagaacggtagttggtccagtgattcggcgggaccacagcggtttgcaacacacggccgtcgttcaccgaacccttccaagcaggcgtttcagtgaacgtggcgctcacctttgcgtacggagccacgttggtggagggctgcgttttctcggccttggttggatgggcggtggaaaccatctggccgtcggcggtccaatcgacttcatcaatgcacacggcacggcggaaatcggtgccgccttccttgtcgccggtgtgataggtcacataccatttgtcgccgaactggagcaccgaggggtgcatcgtggtggccgagccagaaggcacgattacgccttggtacttccatgggccgagcgggctgtcggaagtggagtactggatgcaagcttgatagttcgattccacgcaggtggccgtgcccgaaccgggcttaccgccgtcgtacacgttgtaataggtatcgcccttacggaacacccacgccgcctcgaagaatcccttcgggccgttcgcgttgctgtccgcgtccttcatggtgtggaggttcggcgtggtgccatcagccttggtttccacctcggtgtatgaggtgcggccggttgtggcgtccttcttcatcttgatggcgagctgagtgccgaacgtaccaaagtgcaaatatccggtgccatcctcgtccacaaagaatgccggatcgatggtttcaatctgggtttgcgatgtggtgagcagcggcttgccgatggcatccttccacgggccgagcggactcttcgacttggccacgccgatggcgaacgggtcctgtccagccgcctcagaagccttgtccttcaccggcacgtagtagtagaaccaatcatcggaagtgtcgctcggggtgccgttatcgtcggctacgacttggccggcgtacgcgccatcgccggtggcccagctgaacaggtctgccttggcgatggtcttgtaatgtgtccatttgccttgattcaggccgtcttcatcggtgacgtatacgccccagtccttcatgttgaaggagccgtagtcgggcgaagcctcatcgtgaccggtgaagacgaagagtttgccgtcatagctctgcgcggatgcatctgcagagtagtagttctgcgaaagatcgttcggggtgtcaataccctcgttctgcccgatggggttgcgcatgtagctgggcagtgcgctattgtcgatttgggtgacggtgacatcaggattgttatacggcagttcgttatacgcgtgaccggcaacgctgggcgcgttgtcagcggtggctgaatcggcggccattgcggtcggcgcaagggcaaggcctgacagcaatgtcgctgcggcgacgagtccaccggccaccgcgcgaaccgattgcgcggatacatggaaactcatagtgctcctcattgagtgagtgaaaagagtaatgatgggtagaaggaaaaggctagagccccctctgtgagggggctcactcggcagaatgactccgttgcgggtcaggccgagtggcgagccgaaccgtggtcgccggactggcgacgcttcaggatggtcacgcctgcggcggtgagcagcacggcagccgcagcaactacggaaaccgcggcaccagtcggaggcacacgatcacccttgttgtccttatcatccttatcagtgtcggtcacaccaggctgctgggagccgggcttctgctcaaccttggtggcccaaaatgccttgtcaagggcatcctgtgcggcatcgacatcggcctgcttggcatccttgtcgtcgtacaccttctgagcggcggcaatctggctctgcagagcctgccatgcctcctcggtgtacttcgacttgtcagccttcttggcctgctcgatggaagcctcgagggactccttcttcaccgtttcggcggcgggcttctcttccaaggccttgacggccttgttcagcgaagcggacgcttcctggacggcggcctgagtgacctcaccgacctcaccgaccttgagcacaccttccgcagcctcgatggccttgttcaaggcctcgacactcttatccgtgtacttgccggaagcggcctcggctttggccgcatcgatggccgcctgcaacgtggacttctccacgtcggtggcgagcgcaacgagtgccttctggccgtcctcgagcttggtcacctgctcggcgacctgttctgcggtggcgttggcatcgtcgtacacagcctgggcagcgtcaatgatttgctggaactcagcccatgaagcggcggtgtagcggcttgcatcgaggccgttggctgtgtcaagagccgactcgagcgcggtcttgtcgaccggggtaggttcaggctcggtgccgtcaataccatgcacgccccactcggccacggcggccccgaaggtgctgctgccggtgtgcggagtgagcacgagtcgcagcgacttggtggcgaccggcttgaaggtcacagtgctccaacctttggcatcggtatccgcacgagaagccggcgagttacgcacaatggtgtaatcctcggtgggctcgacatccttccaagaaccatcctcggcgaggtactgaatcttccaagcgtccgggacttccagaccacccttcgaatcgtcagtctcagcgaagttggcccagaactgggcgcggctctggtcaacggtcacggactgaccgaagtcgtactgggcgtacatgccgtcctttgccttgccccaagaaccccagaccttgtcgttgacgttctgatcatccgtggtcggccaagtatcatcgacgactacgccgtcgttgagcttgccttcggccggtgaccaggtcgcctcggaatcaggcgaaatggtggtcttggtcgccttgccttcaatccaaccgaccaacggctcaggctcaggctcaggagtggaggaaccgttcgggtcggcaaccacgtggacagtgagcttggcagctgcggaagacgaaccgtcgtcgacggtaccagccacctcgtagtcaccaaccttggtcaggtcgatggccttgatgtcggcatccttccacgtgaccttgcggtcgtcgttgtatccgttcgggaacttcaccggaaccgtggcgggcaggtcgatggacttggcgttctggtagacggtctgctcaaccggctgcgcattacccacggtctgcaatgcggtatcggaacgagctgcgatgtgtgcaaccgtaccgctcagcgcaccagcgacgatgcccttgacatcgaatacggcatcggcggccagctgagcgtcggtcaccttatcccacgtgacggcgaggtcacggcgagaaccgtcggtgtatacggcgctcacggtggagggcagcttcagatcatcggccttggaaccggtctgcaccagtcggttgacttcgtccacgctcaccggctcgatggcgtacgcctcgaactcggaagcacccacgatggcgcccttcgggaagaccacgcgcagcttgtcggtttcgacggtgtcggcgaacttcacttcgttgccttcgttctgattgaccgtgtaggactggccgtcagccagcttcacatcctgccagttaccgtcagcgtcagcgtactggagcttccaagatgaggccatcggcacgccaccgccatcggtccagaagaagaccttggccttcttcagtggcaccttgccggcccacttcagttgcagccacggctccacaccagtgttgtcgccccagttgttccaggtctcgttcggcgtgttggtgtataccacctgaccgtcgatgaccttcttggcgttgtccttcggctggtagccgttggtgtagctggcagaggcgctcgactgcggggctacgttcacggtaccgtcagaggggatgccgtgaacggtgatttccttggagccttccttctcgccatcggaagcggtgagcttcagaacgtagtcgccttccttgttgaaggtgacggtggtgctggcagcagtatcgtccacgaacttcgcggtaccgccctcggggccggaaaccagctcccacttggtggtgacgtcgccttctgcgggcagaccgtcatccttcaccgtaccgacgagcttggcaccggatgaggtgctggaagacacgtaagcatccacctgcggagcctggttctcggaagtgccgtcagccttgataccggtgttgtaggcttcgatctccttgacaccgacggccatgccggcctgcggcgtgaaggtgacgcggatagtcgtggtctccaccggagtgaactggatacggttgtagttcgcgcccgcgtagttcggggtgcgcacctgatccgcaatcggggcccatgcgccgtcatccttctggtactccaacttgtagttggcgggctcggcatagccggagatggtctggctggacgagctctggtagaagtacaagcggaggtcgtcaatcttctgcttgccgtccttgaacttgatattgagcgtgtcggtcttgttctcagaacccttggtaccccagaacgattccatcacggtcttgccgtccaccgcgttcttggccgggtagttggtgtccttctcggcgtaggtggtaccggtcacgtccgcgtccttggccacattcgtggtggacttggaagcggagtcgacgttggcaccggacttggcgaacaggtcggtcacacgctggtcggcggtgaaggcaacctggttggcggccttgatatcagaaccagcggcattggtgatggttacgccggccttgtcggcatcctcaacggtgcccgtggacggatcgtaaatgaggtgtgcgagcttgtcggaagtgaaggcgagcttgccccccacgtacaggctgtagccagcaggtccaccatagtggctgccgtccttatcccacacgatggaaacatcttgaccgtggtagctcaggttgttcaccgtgaagtagttccagccggggatctcaatcgggttcagctcaatcttgttatcctcgcgcggcaccataccggctacgtcctcgaccatcgtccagttcgtggtgccgagctgggtgtggtggatccaggagcggtaggtgatcttgccgccgttctgtgcggcgtcaaggttcttgtcgaggttgttgatcacgccgtcaccgtttacatcgccgacgttgttgttatcctcgttccagaactcgttttgatcaaggtagttgttatcgccgccctgatagtgcgcgaacgccacccagtacagcagtttcttgaactgctcattggtgatgtaaccgttcttggctgcatcgtaattgcggatgccggctgaatagacctgcagcagcggctgtgcgttgataatggagaagttgttggaaccggggaagttcagcgccgccttgtccgcctggttggcggtgaagaacgggaagatcgggaactcgttggaatcctcgaacaggcgcagagccttgttgtaatcttcgttgccggtaggcatcaggccttcggagtacgggtagtagttattgatctccttgtacttggcgaaagcaccgtcgttcagccacttgtgcttgagcaggttgtcggacttgtcccacagttcagtggtgacttctttctggatcttgtcggcgatggcctgcatcttctcggcgttggcggtatcgccagcggccttgtaggcctgagcagccgcattggcgttggcccacatattggcggaaccatcggcgcgatccatgcgctggccggagcgacccggctcagagaaggaaacggcgtcggcatcgttaccggtcatcgaccaccaggaccagtcaatcaagctgttgtcattgttgttctggttgtcgttgttgtccggctcgctcttggaagcgagtagaccttgcacgtcctcggcaccctggtcggccagctcctcggccacggtggacggaccgccgtgcaccttgtaggagtcccagccggcgcgcgtgatgtactgcgtgtagctatggttccagttggccgggtcgcccggattgtcgtggtagtagtaatagcccgccttgctcttcttggcggtatcgccggcggaaagccaggtgccgtaggagtactcgggattgcggaaccacttggtgtccatcatgaacatgccggaggtgagcacgatttggttgttgtagccgagcacaccctcgatggaggtcgggtactggaaggtgttgccaggcatgttggcgtcgagcatgttgaaacggctcagccaccagcggtagaccacggtcttatcgatattgtcttccggagtgtccacgtagggagcgttatcgacccaccacttgttgtaggtggtcacggaatccttgtaggaggcggcagcatccttaaggtcgccggtgtaacgggcctcatattccttggtggagtcaggcagttcgttggcgatcaggccgagctgaatcttgacggtctgcggttcgttggccttgaggctcaacgtgctggtgagtttgccaccgctgacgatccagttggaaccgtcctggttgttggcggagaagcgcggatagatggtcgtcaggttgttcttgacgttcacgcggccagtaagttcggtggcaccatcagcaccctcggcggcgaacggcgaggccgtggtcagtgtgacatcgcggtcctgcgtgctttccacggtgaggttcgcaaccatcacgttgttgtaggtgatgtacttgacttccttgatcttgaggctcttgccaccggtctggaacagggaggtgaagtagctcggcgtctgcttgcgctgggaggcgtcttcgttaagggtctggtttgatccatcagcgtttacggtaacggtgaagccgctcctgctggtctggtcccagtaggcggtatcacccacaaaaccgagctgattaggcgtgtgcgtgtacatgtaggcggcgcgaccacgggtgaacaggtagttgttgccgtcggagccttcatacgagtaagcacccttgtcgttcgtgcctttaccagttggctgtgcaccagtacgggtgagaatcttatcgatccagaagtcatggtcggtgtcgatgccggccaggttcttcacgtcgttatcgaatgtctcctgcagatagctgacggcagggttatatgtggtgttgttcgccgccgtcttcatcggatcatcagatcccttgaacgacggatatgccacatccgcattcttgatgacgggcgcatcggctgcctgcgcggtgactgcaccgccggtggccagtgtggcgaccgctgcaaccgcgccgattgacgcaagccaccgctttcgtgttgattgatgcattcctgcttggacctctccgccccggtctttcgcgtcttcgctcaggctacgtcgcatctatgcgaccaggacttcttctgtggatgctgggccgcagagcccgttctccgtcagtttcctttattggctattgggttcaccggaatgagtatcttcagtgaatctggtgtgatatccgccatggatatcacggttggagcaattcaccgaagctgattccacatcataaccgagcgaatacggtttcgcaactttccctcagcgatatcaaccatcttatacaacaaaaacccggcaatttctcagttttcgcatttactttcgcattagagcattactgcgtttcgccgtgtcgcagtacctacggcgcgccgattcagcctcgctgaatcaggaaccaacaggctcccgctggcgggagctggctcgcaaagcgagactgagggtggcttacacggtaccgcttatgaccaccctcagtcgactccgccgacagctctcacagcgggagcatataattaaaaatctcctgcacgggtattaccccacacaggagacctcattccccggatgtgttttcggctccaatcgatactgacatccggcctatgccgtcatcgacttattgcagacgatggcggcataagtattattttgccggccagttgcgcgcaggccggcatatcgccgatatttatcgacgctggaagacacgcatctcgcctatctcgcggttggcccacgagtagtacggcaccaagcgcagcgtcgcgggctcacccgcacgcggttcgtcggcatccacgtacagcggcgcgtcatcctcgtcggcgtgctcgcgcactgccggcaaatcaacggtatcgactccacccagcaagtcggcctggaaagccacagcggcatccgcaccggtgacgccatcggccagacgatagttccacaaatcaccgggattatcgacctgttcggcgcagtagaccagcggtccgcgcatcacggccacctgaccggcatcggagcgcacgcgggagttggcgcgcacgaacttcacggacatgtcgagctcgagcgcaatctccaacgtatcgccggcgttgaccacaaggtatacgaagccgtcttccagcgaacccactgcgggcttgccgttcacggtcagcgtgtaggagccccgcgaccagccggggatgcgcagtccgaaacggaccgagctgtcagtggcgctggcgggcaggctcaccgtgtattccacatggccatcccacgggaagttcgaacgctgctcgaccgtcaggccggaagcgaattcggctgtgttggcgatgaactggtggctcagcacggtcttgccgccgtcgcgctcggtgtagatgtagcggtccacggaggcgatgagtcgggcgatgttggccgggcagcaggcgcagccgaaccagtcgacgcggtgggagagcacgtggtgacggtccgggttatccagtccgtcaggcgtggtctccagtgcattgacgtagtagtactgcttgccgtcgagcgagatgccggcaatggaaccgttgaacagttccttctccagcacgtcggcgtattcgcccttgggctcgaggtcgagcatctgctgggcgaacatgctcatagccacggaagcacaggtctcaccgtacatcgtgtcgttcggcagatcatagtcgtaggtgaacgactcgcccacgtgggtggaaccaatcgcgccggtgacatacatacgacgggtgacgatgttcttccagaaacgcttggcggtgtcgatcagtccccgatcgccgagcagtcggcccacatgggccacaccagtgcacaggtagccgacgcgcacggcgtggccatccgcggtctgctggtcgcgcacaggttcggcggcctggaagtaggtgggcttgtagaagccgaggtcggggaagatgttgtcgccgttcagggccttcagctgcttggtgtagaactgagggtcttggccgcgcacgtcgatgaggtattgggagagcgtcaggtaacgcttttcgccggtttcctcgtacagtttggcgagggcgagttcgatttccgggtggccgtcggcgccatgaatcttgccttcttcgggcccgaagttggcatccaggcagtcggccatcttcttggcgacttcaagggcctgctcgttgccggtcacctgatggtaggcgacggcggcttcgatgtagtgacccatcacatacatctcgtggctttgctgaatcaggctgaagcgcgggcggtcggcccatacgccggacttgatctggtacggagtgtccaagtagccgtccggctgctgagcgcgggcgatgagatcgaccgtgcgatcgcacagcgccttgagttcgggatccggatggtaggccagcgcataagcggcttcctcaagccacttgtagacgtcggaatcctggaacaccatgccgtggaattcgtcgtccaattcgccggcggcaaccttcagattggcgaccgcgtggcttttgctgtcagccagctggttaccggccgggtcgtcgggcactgtggtgtcgatttcgtcgttcatcacgccccactggtaggggatgacggattcgacaatctggtcgcgacgccgcttccagaacggggaagtgattgtaacgttcatgatcagcccttcacggctccagccataaagcccttgacgtagtacttctggagtgcgaggaacaggatggcgcagggaatcagcaggatcacgacgccggcctcagtggcaccgtagtcgataacacccatggtctgctgacgcatgttcaccatcgccagcggcagggtggacttggacgaagagctcaagtacagcggaatcatgaagttgttccatgcttcaaggaaggcgagcaggccgaccgtaaccatcgaaggcttgaccacaggcaccagaatcttgaacaaggcctggaggctgttgcagccgtcgaccatggcggcctcttccatgtccttcgggatcgcgtcaaatgcgttacgcatgatgaacgtgctcataggcagctggaacagggtgatgactaggccgacgcccagcaggctgtcgttcagaccgatgtccttgtaccagaccatcagcgggatcagcagcgaggcgtacggcaccatcaggatggacaaggtgaccatgaagccgaggttacggcccgggtagtcgaagcgggagaacgagtagccggccagtgtgcagacgaccacggagaacacgaccgcgaccagggtcacgattatcgagttgaacaggtacttgggcagaccttcctgataaccgaacagggtcaggtagttggccacgccccagcccttggactgggccgaaccggcctgcgggctgaacgagcagatgatgacccagaccagcgggctgatgaagatgatggcgagcagagcctcaaggattcgagcgatgacgcgcttccacaatggggtagtcataatgtgttacctcccctttctcacttggtgttgtcgcgcatgccgcgcatctggatggagttgatgatgaccagggccaccagcacgatcagcgagagcgccgcggccatacccagatccttcttggaatcgaaggcgaagttgtagatgagctgcaccacggtcatggtggagttgttcggaccacccttggtcagaatgaagaactgatcgaaggcgaggatcgagccggtcacgcagtagatcaggcacatcacgatggtcggcttcatcagcggcagggtgatcgagcggaagatacgccaggaaccggcaccgtccatgcgggccgcctcgtacagatcaccggggatggcctgcagaccgatcatcatcagcagcatgtagtagcccgagaatcgccagacaatcacgataatcgtggcccacagggccgactggccggtggccagcaccgaaccgccctcctgcatcaggcccaacgagctcagaatcttggtgacagggcccacctgcggggaatacagtgcgtagaacagcagggacgcggacgccaggcccgtcgcggacggcagcaggaagcaggtacgcagcacgttgttccacttcgagctctcctgcacgatcatggccatgcccaggcccaggaccagcaggaagaccgtgacgatcacggtgtactccaacgtgaaccagatcgagggccagaacaatttgttctcgaacaccttgacgaagttgtccgggaagttcacgccgcggttgccgcccagcaggctccaacgcgagcaggccatcaccaccagcagcacgatcggcacgaagaacaggacgacgatcatcaaccagtccggcagcgagtacaacaggccgcgacgcgtctcggccgccttcgccttggacttatgcacgggcaccgccccggcgctcttggaaacactcgacatgtttctctctcctttggggaataactgtgaaatggtaatcacggaatccgaatgcaatccgatgtcagggcttcgaggaaggaggactccgaagccccgccaacacaccgcattcaagaggtatgtaatgatgaaggaagaaaaggaatgaagaagaagatagaagttcaattatgtggttgagccggcccctgccctcacaaggaagggaccggctcaatctgttcagttgttattcagttattgctgtgatttgatgagcgatggtgaggagcatcaccaccgaatcactgggcagacaggacgtcggtgacggccttgttgtcggccttgaggtcaccggaaccccacacggcgttctgcacgagcagctgccacggggagccagcggcgttgaaggcttcattgaaggccggggacttcggggtctggccgttgccgtcgatgatcacggagttgatggtctggatgcgcgggtcagcgtcgttgtaagcggtcttcagggtctggatgttggaggcggtgtcgccccggtcagcgaaaacttccttctgagtgtcagactgcatcagccagtagaggaagttccaggcctgagcaacgtgcttggagtccttggagatacccatggcatcgccaccgaggaacgtggaggtcttgccttccttggtgcccgggatcggagcgacgccgacctcgaagcctccgtccttctcagcatcgaacagagcagtggtggaggtgttcgggtaaggcatgacaccgatcttgccgttcgcgaacggagcggtccaagtggcaccggtctcttccttggagcctgcgcccaaaccgttggtggtgttggccagttccttgtaagcgtccagaacgcccttcatggagtcgttgtccagagtggcctcggagccatccttgttcataacggattcaccgtcagcccacacggacgggaagaggtcgaagaccagagcaccaccggactgaccggcgaggtaggaaccggcaacgccatccttgttgagggcggcgaccttcttggcctgctcggtgaactcagcgatggacttcgggccctgctccgggtccaggccagcttccttgtacagggccttgttccagaccatcacggaaacatcggtgatgaacggcagggtgtactcggtgccgtccacggtgccggcctcaatgtggccctgctgcaggtcggccttgttgtccagaccgtcgatctgcttggtgatgtcagtgaagatgccctcggaagcccagtacggaatacggaccacgtcgccggcgaggatgtcaggcagagagtcggtctgcgaagcaccgccgaccttgccttccatatcgtcgttcgggatgatctcgagcttgacctggttcttgtggctcttgttgtaagcctcgaccacgttcttggcctgacgctccagcggggaacgggtccacagggtgatctcggtgccatcgtcggtgcccttggccgggatgccttcggcggtggcggtaccgccattgccggagccaccacaggcggccagcggaacaatcaacgcggcggcagcgatgccagcaagagtacgggtcagtttattgaaagacaccatgttcgcttctttctctatttatccgctcaactatgagaggcggtggcggacggtccgcctccttggtcttcgccctgctcgctcctttgctcggaacaggtaacactgcgaaagccttttctcaatataaacgaacatcgccatttttgcaaaaacgctttcgcactttcgcatattttcgcatatcgaacaggtttgatatgcattttgcgcgattgtttgactcaaacaaacacttatttttagcgctttcttacggcgtgtcgccaaaagccaacatattcgaacgtgaacacaacgctttctttcattctcttttcaatcgcacaaaaatgatcactgcgccacgccaaaaaatagacttgcgaaagttttcgcgtcatgtctacaatagaaaacaatacaaaggggtatcggtacaatcactactttcgcacgaaagagtgcagcaatatactgctgagaaagaaacgaggaatcgaggcattatggcccagacattgaccggacgcgcggcacggctcgaagacgttgccgctttggcgggagtctctttggccactgcgtccaaggcactgcacaacaagccccgcattagcgaagaaaccaagcagcgcgttctggacgccgcccgccagctcaactactcccccaacaaactcgcccaatccctggcccgcggcaccaccggcactatcggcctggtcacctccgatctgcagggccgtttctccacaccgattcttatcggcgcagagaacgagttgcgagcacaatcgacctcagtattgttggccaacgctcgtggcgacgccgcgctggaacgtcagcatgtcaagaaactgctgtccctcaaggtcgacggcctgctcatcgtgcagtgcgaaaccaacccccggcccacgcttggccatgactggggcgtgccactggtctacgtctacggcccctccaccgatatcgaagattgttcggtcacctgtgacaatgtggacgccgggcgcatggccatcaaccatctcatctcttgtggtcgccggcacattgccattatcggtggcgacgaaacctataccgccgccaccgaccgcaccaagggtgcggtcgaggcactggccgagctgggcatcgaaccggccgggccaatccggtacggcaagtgggacgaaggttggggccgcgccgccacccgtctgctgctcgatcagggcgtcacgttcgacgccgtggtctgtcaaaacgaccagctggccagaggctgcattgatgcgctcaagcagcagggcctgcgcattccggatgatgtcgctgttatcggccatgacaactggtctgtgctgacctccagctcgaggcccgcactgacgtcgatcgacaatgaaaccgagaccatcggccgccgcgcggcacgatacttggtcgatgccatcgaaggcaacccccatcacggtgtcaactacgtaccctgccgccttatccagcgcgaatccaccctcccgctggactgatatcaatcgataccctaccgcttcttggttttgcggccctttaagtagatgtcgatgacgatccatacgccaagggcgaaggccacgacgtagcccatgaagcc

SEQ ID NO: 3816 - DNA, 12752 bp, Unknown
  R35_2m  MAG No. k141_6582
gacggccgagttgcccatgttggcgttgagcttggtcaggaaggcggatccgataatcatcggctcggcctcggggtggttgatgttgcagggcatcaccgcgcggccggcggccagctcggagcgcacgagctccacatcgcagttctcgcgggtggccacgtactgcatctccggggtgatgatgccgtggcgggcgtaccacatctgggtgatcgggtggtccttggcgcgcatcggctcatgcttgcgtccacgccattccttggtggcgcggccgcgcttgatggcgcgcttaccatcatcctcaaggttgcggcggcggccctcgtagtcttcgatgtcgccgcggtcgcggatccagtcgagacgcaggggcttcaaaccttccttcgggtcgcacttggggccttcggtgttgtagtcgtggaacggcgggttcgggcccacgccgggcgtgtcgctcagcttgatttcggtgtacggcacttccaggtcgtaggaaccatactgataggtgaacggtacggacttggtcttgcggatgtgcgccttgtcacgctgcttggaaccacgggcggcgatgtccacgcgctgctgcttggcgagcttctgggcatccttggcgtccttggcgttggtgaacttcttctcagtggcctcggagccaggctttgcggccccttcctgagcagcctgagtatcagcagcgggggtgtgggctacgacgcgcggcgcgtagccgtgcttcttgtcgccgcggacggccttccagccttcgaccatggtgcgcgcggcctcttccgggttctcggcacccgcgatggcggagaccgcgaaccagccggcggccttggtgccggcgagcatggccatatcggctgcggtcacgccgccgcccacgaccaccgggaactcgctggcagcgcagatggtgttgatctgggcggcgtccagtgtcttgccggagccgtcgttgccgcccacggaagcctcgggcttggtggtggagacgtgcagagggccggcgccaatgtagtcgatgcagccgtcgggcagctcgttgatgagctgaacgaggctttcggtctcagccgacagacccacgatggcctcgtcgccgagcagggcgcgggcttctcgcggctccatgtcggtctggccgatatgcacaccgtccaccttgatgcccttgcggcgggcctgccacaccacgtcggcacggtcgtcgatcacaaaggccacggaatcggacttctcattgtcctcgatgatctgcgcgatgtcgcgggccatgtcggtcagctcagaggcatcggcctccttggcgcgcagttggatgaaggttgcgccgccgcgcagagcctgatccaccacgtcggtcagcggacggcctttgcagtcctccggccccaccacgaagtacgcggacaagtcgaagttgtctcgcatggaggcgtatgggtattcattactcattattattcctacctttgttgtttcttgtggaagtcttattgggaaaaactgttatgagctccctcatcagagggaactgaaactactgcaccaaaatctcggattccgccacctgttcggcggtaacattccacagcgcgtcaaggaacgcgacctggaacgagcccggcccgtgcgaagtcgtatcggctatctctgccgcgcggttgtacagcagagatgcggacagagcggcggtcaacggatcggaaaccgccagatatgtggcagccacgccgcccagcgagcagcctgcaccggtgatcttggtcatcatcgcgctgccgcccggcagtcggtacacggtttcgccgtcggtcaccagatcggcgatgccggacacagccactgcacagcgggtggaagcgtcatgggaggaatgcttggcgtgctgttcggtcagatactgtgccagcgccatcgccgcaccggttgcggactccacgtcgtcgacggattccgctccggcggggcggtgctcggaagcgtcccccacggtttcggtattgagcccccacatgttcgccagcgcgattacctcggaggcgttcgcgcgaatcatggtcgggggagcggccttgaaggcctgaagaatggcggtgcgggtgtggccgatgccggcggccaccgggtcgagcacccacggcttgtccaagtagttgagtcgctgggcgatttcgggcagcgcatccttatagaacggcagcagcgtgcccacgttgatgtagttcgcgcctgcgattttcgcggtttcgatcacgtcgtccggcagaaagctcatggccgtagtgccgccggccgccagttgcgcgttggcaaccaaattgatggtcacgaaattggtgaacgactgggccaatggggtcgtctcgcgcacgcggcgaacggcatcgacgatatcttcacggataggtgaatcggctggaaccggagtcccggcggtacaaccgctggacataccggtaaacaatgatgcactattgctcatttactgctccctacgatggtcttaaccaacaggttctaagggtcaggctcaggcctttctcaactcgcgaaccacatgcgagtccccctgcactacagtgccgacgctatgcgccaacatggacattatcgtgacggatttgttcgatacgtgtcgtcaggtctggcgcgtcccgtccattcgtgatatgtggacgcctccgccgagcaacatctcccggatttgtgacgctgacgcgatgtcagtggtacaaattggggaagggcaaaacaacaggaacaatatggaggtgtttgcgatataggaatcgctgcgaacggctgctcgtgagacgcggaacatataccggacaatgccgcctgacctgtcaccatatacggctatcctgaagcggttgttattagaccccaaaccgttcaaaccagaaggtgcattgtggctcagtccaaactcgatgaagtcgtatcccttgcgaagcgtcgcggcttcgtgttccccgccggcgaaatttacggcggcacccgttccgcttgggattacggccccctcggcgtcgctctcaaggacaatatcaagcgtgaatggtgtcgctccatggtcgtcacccgtcctgatgtcgtcggtgtcgacacttccatcattctgccgcccgaagtgtgggtggcgtccggccacgtgagcgtgttcaacgatccgctcgtcgagtgcctcaactgccacaagcgcaaccgcgccgacaagctcgaggaatcctacgccgagaagcacggcgacaagatgccggaaaacggcatgaaggacatcgtctgcccgaactgcggcacccgtggccagtggaccgaaccgcgcgacttcaacatgatgctgcgcacccacctcggcccggtcgaggacgagaacagcctgcactacctgcgtccggagaccgcacagggcatcttcgtcgacttcaagaacgtgatgacctcctcccgttccaagccgccgttcggcatcgccaacatgggtaagtccttccgtaacgagatcaccccgggcaacttcatcttccgcacccgtgagttcgagcagatggagatggagttcttcgtcaagcccggcaccgatgaggaatggcaccagtactggatcgacgcccgcacccgctggtacatcgacctcggcgtcaagccggagaacctgcgccactacgagcacccgaaggagaagctctcccactactccaagcgcaccgtggacatcgaatacaagttcggcttccaaggttccgactggggcgagctcgaaggcatcgccaaccgtaccgattacgatttgagcgcgcactccaagcactcaggcgaagacctgagctacttcaaccaggccaccggcgagaagtacgtgccgtacgtcatcgaaccggccgccggcctgacccgctccctgatgtgcttcctcgtggacgcctacgatgtggacgaggccccgaacaccaagggcggcgtcgacaagcgcaccgtgctgcgtctcgacccgcgtctggccccggtcaaggccgccgtgctgccgctgagcaagaagcctgaactgcagaccgtggcccagaacctggccgacgacctgcgcttcaacgaatggatgatcgactacgacgagtccggtgccatcggtcgtcgttaccgtcgtcaggacgagatcggcaccccgctgtgcatcaccgtggacttcgacaccctcgaggaccacgccgtgaccatccgtgagcgtgacaccatggcccaggagcgcgtcgctcttgacaaggtggccgattacgtggccgcccgcatcggcgagaagcgcacccgcgtgcccctgaagcccgtggaaatgggcggcgaggcttggcctgagtccggcgttcaggaagccggcggtctgtactaaagacgggtctgtatagaggctcccctctatgaggggagctgtctacgaagtggactgaggggagccaaaactatttcagaacaggaaccacatggcagaatctgaaaccgaaaccaccatcaccgctactcacgagaccaacaatctcgacccgcgtacggacgcgccggcccggcccgagactccggtatacatcgcccccgtgcagctcggcaacattaccgtgccgaccccggtggtgctttcgccgatggcgggcgtgaccaactggccgttccgcgtgatctgcgaggaatacggtcccgatggtctttacgtggccgagatgatcaccgcgcgggccctcgtggcgcgcaacccgaaagccctgcgtctctgccatttcgccaaaagcgaaaaaattcgttcgctgcagttgtatggcgtgaatccgtccatcaccgaacaggcggcgaaaatcgtggtcgacggcaacatggccgaccatgtggacctgaacttcggttgcccggtaccaaaggtcacccgtcgcgggggaggctcggccctgccatggaaaaccgacatcttcaccgagctcatccagcgcgtggtcgccgtatgcgagccggcgggcatccccgtcacctcgaagatccgcgtcggcatcgaccataaccatgagaccttcctcgaagccggacacatcgcgcaggaggagggctgcaaggccgtaaccctgcatgcccgcaccaccgccgaatactatggcggtcattccgactggtcccgcatcggcgagctcaaggaacacctcaacattccggtattcggcaatggcgatatctggggtgccgaggacgcgctcgaaatggtgcgcgagaccggctgcgacggcgtggccatcggccgcggatgtcagggccggccgtggctgttcgccaacatcaaaaacgccttcgagggcaatcccgaacggctcaacccgaatctgggcgaggtctgccgggtgattcaccgtcatgccgagctgcttaccgagttctatgagggcgatgagatgatggccgtccacgatctgcgcaagcacatcgcctggtatctgaaagggttcccggtgggtgggtccacccgcaaggcctttatggaatgcgagagcctggccgatgtggaccgcgagatcggcaagctcgacccgaccatcgaatatccgccacgcgtggtcgacaaaccgcgcggccgcgtgcgtttcgccaagaaggtgcacttgccgtatgggtggttggaatcgcgtaccaccacccacgaagagcgtgaggcgctcttcggtgacgacccaatggacgccagttactgaaaaaatattgaaaatacacgcaacacgcgccattctgcgcgtgaatttccctccaagagtagcctgtttgcgctactcttgggtgtaaccgtgaagtgacaggagccaaacgtgagcgagatcgcgcagaatgagttcaacgacaagaccaacatcaaggttgttggcgtcggcggtgccggcggtaatgccgtcaatcgcatgattgccgagggactgcagaatgttgaatttgtggcggtaaataccgatgcgaaggatcttctgcgctccgacgccgacgtgaaaatctccctgtccgatcagtccagccgcggactcggcgctggcgcggacccggagaagggtgctaaggccgcacaggatcatcagtctgatatcgaggaatccctgaagggtgccgacatggtgttcgtcacctgcggtgagggtggtggcaccggtaccggcgccagcccgatcgtcgctcgtgcggctcatcagcaaggtgctctcaccatcgcggttgtcactcgtccgttcagcttcgaaggtcctcagcgttccgcttccgccgaatacggcatcgacaacctgcgcaaggaagtcgacgcgctgatcgtcatcccgaacgatcgcctgcttgagctttccgaccgttccatcggcatcatcgaagccttcaagacggccgataccgcactcctcgccggcgtgcagggcatcaccgacctcatttcgatgaattcctacattcacgtcgatttctccgacgtgaactccattcttcgtggcgctggtactgcgctgttcggcattggttccgcgcggggcgaagaccgcgccacccaggccgccgaaatcgccatcagctccccgctgctcgaggagagcatcgagggtgcccacggcgcgttgatcaacattgccggcccgaccgatctgaagctgcaggaagcttccgccgccaccgagcttgtacgcaaggccattcaccccgaggcccagatcatctggggtcttgctctggacgatgcctatggcgacgaagtgcgtgttaccgtcatcgcggccggtttcgatccggttacaccgcaggatccctctgccgccgctccggcgattgccgtaccggccgcccagccggctgccacgcaaacgcagcagcccgccgccgctccggccgcccagcccgtggccactccgcgtccggaattcaccccgacgaccgcagacccggcatccctgccctttgacgatccgactacctcgcatccgaacatcgccgtgaacgatcccgccggcgatctcgacattcctgatttcctgcgctgaaaggactgatccatggctgggttcatgaaaaacgcgatgtcctatctgggcatgagcgacgttgtggacgatgaggacgactacatcgaagaggacgaggagcagaagccggctccgaagtccgcattcgattccgaccatacggtcacaccgctggcatcaaccaccgcgcctgccgcatcgtcgactaccaagccgttccccggtggtcgcgtgaacagaattaccaccatccatccgaagtcatatgaggatgctcagctggtcggtcgcgcattgcgtgacggtgttccggtcgtactgaatctcaccggtgtggccgaagccgtggcatatcgcattgtggacttctccgccggcgtggtgttcggcgtgcgtggttccctcgagcgtgtcactccgcgcgtgttcctgttgagcccggcgcaggtgaacatcaaggtcgaagagccgacaaaaccaacctcggcacacgatttgttcgctgactgaccggttcagtagttttcgcattcgacgttatatcggtattcggccgactcccagcaaggagtcggccgattcttattgcgctccgagcaaacttttcatgcgcggttgttagtctgtctgcatgctttccttagtgttctctctgatcggccgcattcttgcatggctcatcaacgcgtatatcacggttctgttcgtgcgcatgattctggactgggtctccgttctcgcacgaaactggtatccacgtggtgtggtggcccagctgatcaacattgtgtattccattaccgaaccccctctgcgctggctacgtcgctatattcgtccattgccgctcggctcgatttatcttgatgtcagcttcatcgtgctgtattttgcgttggtggtactagaaagtgttgttctgatagtgttctgaggccgtttttgacccgccggaggcatatatctggcataaaaacccacgttgaatgttctgaaacgatggggtcgtgatagcattctgacttgagaccaacgtaagtgcgggcaatgccccaaagcgaggtgcaagatttatggctctgttgacgccgaaggatattagggagcataccttccagactgttcgattcaaggaaggttatgatgtcgacgaggtcgatgacttccttgatcaggtcacggaaaccgtcgaggctcttggacgtcaggcggtagccggcggtcaggccactcagtctctgggccctgacgtgaccaaccttaatgcgaagatctccgatcttaccggtcaggtgcagcaactccagtcggagaatgctggtttgaagaacgctgtggctcaggcccagcaggccgctcaggctggcaatgatcaggcggcgcagcttgcctctgccaagctcagcgaagccgaggaatccaaccgcgcgctgtcctcccagaatgagcagctcaagggtcaggtcgatcagctgaacgctcaaatcgatcagctcaccgcccaggccgttcaggcctccggtaaccaggaagccgtcggccagcagatcgccgccattcagcaggaacgtgatcagttccgcgcggccaacgaggagctgtcccgtcagctcgccgctgctcagcaggagggttccgccgctcagcagcagtccgctcagatcgctgaactgtctcgtcagctcgaagaagccaagcagcgtgaaaaccagcttcgtgcccaggtttccaaggtcgagccgagcactgagaccggttctctgcagaagatcgctggcgtcgcttccatgccgggcaccgagcccgagcgcgccaccgccatgctgactctggctatgcagctgcacgatcagtacgtggagaagggcaagaacaaggccaaggaaatcaccgaggccagccagaacaagtacaacgatttggtcaccaaggccaacaactactccgagcgtacccgctccgaggccgacgactactccactcgtactcgttccgacgccgacacctattcggatcgtacccgctccgaggccgacgcttaccgtgaccagattcacgcggatgccgagacctactcccagaacacccgttctgaggccgacgcatactccgtcaagactcgtcaggatgcggacaactactccaagtctcagcacgatgacgctgacaactacgagaaggaagtgcagcagcgtgccgccgagtatgacaagaacactcgttccgcagctgatgcgtacgacaagaacacccgctctgcagccgatacgtatgccgagcaggtgcgcgacaaccttcaggctcagtccaaggtcgtcgagggcaacatccagagcctcaagcagttcgagactgaataccgcgcccgcctcaccgagtaccttggccagctggcatcgcaggtttccgagtcgaacaactacgtcgaccagacctcgtccaagaccaactgagcgtaggcaggtacaggtcgtatgacgaaccaacagggacggctgcgcactcgcgtggccgtctttgcatgtgtggccgcggctgcgctgattgtcgatcagctcaccaaggcttgggcgatggccgcgttatccaacggtcagaccattcgcgtgattcccggactgctgtccttcaccttggtgcgtaatccgggcgcgtccttgggcatggggtcaggcgctacttgggtaatcagtctgttggccgttgtggcttgcgtggcccttgctgtggctggggtgcgcactatctccatgaaatggtcggtggcgctttctttcgcgtttgcaggcgctctgggcaacctgattgaccgtgttatgtacgctgacggcttcctcaacggcaaagtggtggatttccttaactatggctggtccgttggcaatgtggcggatatctatctggtagtcgccggtgtggtcctggtgattctgattcttatgggggagccgttctcccacaaggatcttatcgagcaatccgacgaatccctacagtctgagccggaggcggacgccaagtaatgagtcgaatggtccctgctcccgatgcattggtgggtaagcgtttcgacgtagccgtggccaaaatgctgggtatttcacgatctaaagccgccgatctggttgactccggacaggcgcgcgttttagggcgtgaagttgcgcggtccagcacgttgcaggcgggggagaccgtcgaatttgatttggcggaggaacaggccgggcctgagcctatcgcaactgatatggctgttgtctacgaagatgatgatgtcgtcgtagtcgataagcctgtaggcgtggcggcgcatgcctcggttggctggaccggtcccacggtattgggatcgttgcgtgatcgtggcgtgcatatcgcttcctatggcgcggccgggcgtgaaggcattgtttctcgccttgatgtaggcacttccggcttgatgttggtgtgcaagtccgaccttgcgtacaccgagatgcgtcggcagttcgccgagcatgaggtaaagaaaacctatcatgcgctcgtgcagggcggtcttaaagagaacaaagcgaccattgaggcaccgatcgggcgcgccaaagtgtccgatttccgcttctgcgtgactccggccggcaaaccggccgttacgcattgggatgtgttggagcgtttcggccatgaggccacactggtatccgtgaatctggagaccggacgtacccatcagattcgcgtgcatttctcctcgattgggcatcctctgtgcggcgaccctatgtatggtgccaatccggtgctgtctgaagctttgggacttgaccggcagtggctgcacgccatgaagctcgaattccgccatcctcgcacccgcgtctggaccacggtccggtcccagtacccggccgacctggccgccgccctcgatgccatgcgtgcccgtcacatcgaacccgctgaacctgccgagcatgccgaagttctggtggactaattccgcaacgtgtgcatcatgcgttttaatatttagattcagttccagcctcgccggattcatcccagaataatgagagatcggtcatgatggctctccgtcatgaccataccccaagtgactgcggatgctgagtaccgttcaggccaatggtcggtaaccgtacgtgaattaccggtatttccgttcaacgtgtctcggtactccagcgtgaagtgaacagaaatgagccaaagcagtaaggctgagtacgagtattcgtggccgtcatcaatcgatggtggtcattgggattcgcgccatgtactacgcagtatgttgtacgctctgcctggctgtgactggattctggggcccgctgccggttgacgaggctgaaggcatgtaaaacttatgcatactgatctgttttcttaaatttggctttatcaatggtgtcgcgcaggctctttacccgcgttcggattcgatcgttcgttttctccatggtcgtccgggctcgatcgagccggaccggtgccatatccggatcgcagatgactggcgattccggaagatctacgaaaacgtcatctttagatgacgattcaacgtttcatattgcaggtctccttacggggcgttacgtccgatcgcattctttgaaaaatgggccacctagatttccgaggagattgaagggcaacacgtgacttcggtagaccaaagctgccggaatatctccgtcaaaccgcctgtagctcgatggtgttgtcgcattgtgcggcgatgccaagatcgtgggtgacgatgatgagggtcttgccgtattcgtgctggaggcggagcatttcgtcgaagacatgttgggcgagatcgcggtcgagcgcgccggtgggctcgtcggcgaggatcaaatccccgggcttcaatatgcatcgtgcgagggcgacgcgctgctgttcaccgccggagagggtcatgatcttgtctcccgcgacatggccgagtccgaaccgggagagcatggccttggccttgcgctgcctgacctgtttgctgtcacgggtgaagcgcatgccgagggtgacgttgtcaagggcgctcatgtcgtggtagggggctgcggatgcgggcaagccatttcttggaagacgtttcgtcgagattggcgggagcttgcgtcagcaggcgtcgatgaaggcgctgaggatgcgacgttggttgctatcggcgtggtgagagaactcaggatgccattggacggcccagacgaaacgcttggccggcatccagaccgcctccacgatgctgtccggcgcagtggccatcggttccagtccctggcccagcgtgcgaatcgcctgatggtgataactgttgacgcccagcgtataggcgcgcggatgatacggcctgccgaaggaatcgacctcatcggcctccgcctcactcgggccgttgtctcccagcggccacaacgcgcgggccaacggcgaatcgggcgcgatcgacacttcgtggaccaccgggtcatacggcggcttgtcgccatgatgcacgaccgggctgggatgttcgtccggcagatcctgccacaacgtgccacccaaggcgacgttgaggctctggatgccgcggcagatgcccagcaatggcttgtccgccgcgatgacggaggggatcaggcgctcctccatccggtcgcgggccttgcatagtttgaccgtcttggggccggc

SEQ ID NO: 3817 - DNA, 39444 bp, Unknown
  R35_2m  MAG No. k141_6836
gatcctcggtctgtactacctgtccaccgtgctggaaggcgccaagggccagggccgcgtgttctcctcgctggaagaggccgaaatggccctcgaccgccacgagatcgacatgcaggccaaggtgctcatccgcctgcccgagagcttcgtactgccgaagaactgggagcccggcgaggtcaaggtgctcgacccgcgcgaaggcgaggacgaggtcgtcaaggaagagcgcttccacgacggcaccgtgctgttcgccacctcctacggccgcatcctgttcaacgagaccctgccgaccgactacccgttcgtcaacgagcaggtggccaagggccgtctgtccaagatcgtcgacgacatcgccatgcgttactccacccagcaggtggccgccacgctggatgccctgaaggatcttggcttcacccgcgcaccgtggtccggtgtgtccttcgcgttctccgacgtgaacgagccgcccgagcgcgacgagaagatcgccgagtacgaggccaaggccgacaaggtcaacgccaactacgagatgggtctgctgaccgaggaagctcgccgtcaggaactcatcgacctgtggaccgagtgcaccgccgaggtgtccaaggaagtcgaggagaagttcgacccgacctccaacctggccatcatcgtgcagtccggtgcacgaggcaacatgatgcagatcaaccagatcgcaggtatgcgaggcctcgtggctaacccgaagggtgagatcattcctcgtcctgtgaagtccaactaccgcgacggcctgtccgtgctggagtacttcatctcccagcacggtgcccgcaagggtctggccgataccgcactgcgtaccgcagaatccggttacctgacccgtcgtctggtcgacgtctcccaggacgtcatcgtgcgcgaagaggactgcggcaccaaggccggtctgcccatccgcgtcgccgagcgcgacaacgacggcaacctggtgctcgtcaaggccgccgacggtggcccgtactcccgtctgctcgccgccgacgtcatcgacccggccgacggacagaccgtgctgtacaagcgcgacgacgccctgtccatggacgtgctcaacgacctcgtggcccacggtgtcgaggaagtcaagtgccgttccgtgctgacctgcgagtccaagcgcggcgtgtgcgccaagtgctacggctggtccctggccaccaacaagctggtcgatgtcggcgagaccgtcggtatcgtcgccgcccagtccatcggtgagcctggtacccagctgacgctgcgttccttccactccggtggtgtggccgcggcctccgatatcacccagggtcttccccgtgtcaccgagcttttcgaggcccgcaccccgaagggtgaggccccgatcaccgagttcgccggcagcatcaagatcgtggagaacgatcgcggtcgccagatcatcctgaccccggacgccgattccggcgcgccgaaggaagacggcgtgatcaagccgatcacctaccaggtctccaagcgcgtgccgctcaaggttgccgacggcgaccacatcaaggtcggcacccagctggtcgaaggttccgtggaccccaagaagatcctcaccatcctcggcaagcgcgccgcccaggtcaacatcgtggaggaagtgcacaccgtgtaccgatcccagggtgtggatatccacgacaagcacatcgaggtcatcgtgcaccagatgacccgccgcgtgaccatcatcgactccggcgacaccgacctgctgccgggtgagctggtggacaatgcccgcttccgcgagatcaaccgcaacatcgtcaagaacggtggccgtccggccgtcggtcgtccggcgcttatgggcatcaccaaggcgtcgctggccaccgactcctggctgtccgccgcatccttccaggagaccacccgcgtgctcaccgaagccgccctctccgagaaggtcgacgacctcaagggcctcaaggagaacgtcatcatcggtaagctcatcccggccggtacgggcctcgcccgctaccgcaacgccgtggtcgagcccgacaaggccatccgcgacaccatctacccgaacttcggtctgggcggcgatggcgatctcggcgacgcgaccttctccgacgccgacctgtctgacctgaacttctcgaatctcgagttcggtgatctgaagctcggcgacgacttcaacccggatgatttctactccgatcagggcggtcagcctgacatcgaggagtaagcgagagggtcctagaaaggatgtcctttctaggacccagatcttgcgttaatcgcaataagatggcccggaactatatcagttccgggccatccgtatatttgccattgtgattttcctgttgaacaagagcaggcagccgctcgttgcttgattactcaggcctgtttttcggtgaactggaagaactgatcaccaatacgcaccgttgaaggtgcactgagcttgagcgttgtgcccttggtgacttgggtctcctggccattggtgatgatgtaggtgccgttcaacgagccatagtcctcgatccacagcgcgccatcggtgtcgacgctgatggcggcatggttgcgggacgtggtgcgggtcgggtcttcgatacgctccgccttggcaccttgcggcacatccatggaaggcttgcggcccagcaacgtgctcttatcgatcacaatggtctggccggtgacatcgttatgcatcaggtacgtcttcttcggtgccttggacgtgaacgaggaggagagcacggtgccgtcccaatcctcgatgtcgttttcggcggcgtgcggtgtggtgtctgccgaagcggtggcagcgggctcagcggcggcggtagcggcagtggcggcaggctctgccgcaaaagcggtattggccgcggtttccgcagagctgggctgcccatagtcgttctgaggttcggctgtgccaactgcggaatccggggtgccttccaccggatcgtcggaataccaacccagttcaggtgctggagggtagggaagtttggccatgatgatgccgtcctttcactgacgaaaagccagagcggcgttgattgccgggtcgccgagctggcccagccattcgatcagtgccggataggtgttgggattacgtgcgatgcaggcgcgtagttcaggcgcgtactgggcaatctgggcgattagcatctggtcggtggtggtcagggcctgttcggcggtgaagccataaggattggtggccacaggctcctcgaatgccgcctgagctgcgggctgctgggccgcgtactggtcggcggcagtctggacggcggcagtctggacggcggcagtctggacggcggcagtctggacggcggcagtctggacggcggcagtctggtcggcggcagtctgctgagccgcggcgtactggtcggcggcgtaagcgtctgcaggctgctgctcggcagcctgctgggccgcctgttccggagcctcctgatcctgaaccgggccgccgaatgcgtcggcggtgaacccgtactgtgccagggtttcgcgggcacgctcatcgccgaattcggcgatccaacgcttcaagccggggtagcaacgcggatttacggcgacgtttgcgccgaattccggattctcgtaggcgatttttgccaacagaatcgggtccgcgttcggatcctgtacggcagcgaccgcagcatcataatcaaccatgggattacctccttatgttcgctcggttatgccgaacgtatggtccgtagtgtttgcaatgttgcgtcttcaatggcgtcaatgtcctcgccctcgtccagtctaaaagcgctgaacgcgtgatgttcgggttcggtcagtggcatatcggccacaatcacagtgatattgtcggttccgcccgcatcgagcgcggccgccaccaaggcgtccacggcttcctgcggactggaatgcgctgcggcgatggccgcaatctgttcgtctgacacttcaccgtgcaatccatccgaacagatgatgaaacggccggtcagatcggcaacatatacgtcgggcactatgccgtccggatcgcccaggcattgggtgatgatgttgcgtggaatggtcgcctccgcctcttccggcagcatctgaccggaatcgatagcctcctggcgttgggaatgatcccgcgtgatgcgggtcagcgaggaggcgtcccacacggggatgatatccgtggcgggggcatcggcatccggcagcgggctgagatggtaggttcgggaatcgccgacattgaccacataggtctggtccgagaaatccggggagtcggcgtcgccaaacggagctgcgctgtgggcattgatggcatctgcgtaaggctggggcaaaaccaggccggagcaggtcgtaccggccacgccgccgagacggtcacccaaatcgagaatgtcgtgctgagcctgtgccagggtgtcgtcgatgtcatggcgggtgcgcgagggcatggaagccagctgcgcgaaatgctgggcagccaactggcttgcctgctcgccgcctttgccgccgcccatgccgtcgcagaccatgaacacgccctgttgggcgaatccggtgtcttggttgttcttgcgcctaagacccgcgtcactggtcatcgcgatacggatggagcctgtggtcatgacgtcttccccttcttacgcttgtgcttgactcgcgctgtatacggctttgctgcgtgtctatttgccaatatagacacgcttttcagcgaaagccgtgtacatatcctcctgaaacgcggcaaagaagcgagcattgccttgcgcaaccggtcgactccattccaatatgtggtggcttggcccgatgcaatgtcttgccccgagaacgtggcgtagtcggcttcccgaccgagttgaatcagtgcctgatcgtccgtgccgagctgactggcgattgcgccggcctgatcgcgacgagtgcccttggctgtgatgccgctttgctcggcaagtatgtgtatggcattccaccccgctgccacacgggctttcggactgccgtgccgtcgtgcacgtgccagcaatgcagctttaaatatcaggattagtccgcaaacgatgagcagagtccacagggggcttccatagatggctaccgcacgagtaactcgccagaaccgcacccagaacaggttggtcggcgaatcatcggcgtcggcgccggccaatgagctttggcccctggcttgcgtctgatcgcgcagcggatcggtcaacggcaccggtggttgccggaccagcgtctgcggattcggcggcgtcaggttctggttttcatcaggcaccttggtctccttgggcgtcggatagaacgccacccatcccaggccctgcaatttgatttccacccaagcggtgacatcgttgccggtgaattcgattttggtgccattgcccgaggtcttctccgtgcgggcatcggtgatttcgccatcctcgtttttcggcaggaagcccaggaccacacgggagggcagtcccagctcacgagccatcagtgccatggcggaggcatattgctcggagtcgcccaccatggccgtgcctgccagcagcttgttgatacggtagttgccatggccggcatcggagggataatcgccttcgagtccatgagagaaccatccggagtctttcaatgtgtcggccaacgccgtggctgcggcaccgcccgaggactgtccgccggcaatggacgtggccagtttgctggccgaatcgggaacatcctgggcttccggttgggtgatgcgggccgcggccgcactgctgatctgcttatcggtgggcttgcgggcgataatgccggattcggtataggtgaggcttttacgcgtgccggcgggaataatggcggaatcggtatccgtgttgtagtagaacgtgtcattgccgttgtcggcatcgttggcgaagctcacgccagtggccgctcccgccagcggcagccaggtgtcggtcaatccctgatcgacggtgaaggtcgcagtgaaggattcgccctgctcatccgccttgatcgtggtgcccacgcgatgataattcgaggagtccgtggcttcggaagaatcggacaggttccatactgtgccgtcgaatcgatccatcaccgcaagtttgactggtgttccggccggcagattatggacggtcagcaacacgtcttttttgtggtccttgatataggatcgcatgccgctgagcgggctggtgtaatcgtaggggcttaacggcggatcgtagcggtcacgcagcacgaaacggtcctgcggcaccagcaacgtgcctccgaaagcaaggccggcagcgagcacgacgatgatcagcgcggatatccagcgcccccattccagcagttcaagacgccaagacagccagataatcagcagcaaggcaaaggcaatgccgcagatggcacgttgccagccgctgtccgtacccagcagagcacatacggccacggccgccgcaaggggcagcactcccaccagagacaaccatgcgttggcattaatggcaaacacgccggtgaggaacgtaagccacaggccgatggtccataccgccatcagcacgccgtcttgcgtgcccagaggcggatcgacggaaataatgtacttgaacgagccaaacgtcatttcccaacctgaactcaaggtcttcaaggtgggaatcacgtaatgggacgtggtggaactcagcgttaccaccggaccgatgatgaattgggcaaacgccagaaacacgatttgccaccacagtcgcaacgccggcaacatgcccgccagagcgatgatcgcgcccagcaaggtggccggtacggcggcgatcgcccaagtggccacgccgccgtacacgtcgatgagattggcttgcgccagcaacatcatcgccgctatgagtacgaggctggtgattcgtttgccccacggctggcgactgaggcccatgccgcgaagcacattgcctctggtcatccagataaccgaatgtgtggagtcggcccaggagccggtggtggtggaggttccggtgtacgtgccggaggaagtgccggtgtatgtgccgctcgatccggcgtacgcagcggtattggtattggtgatactggactggtcgaaggtcatgcgagcacccccatgatcagtgggagatcatcgagttcgccgatggtggccaatgtgaagttggcgaatcttctgatgccgcgattggcgccggcgctggcctgcaataccacgcagctggccgatcggggcaaggccaaggtcatgcgcttgatttgctcgatgtctttcagcgatccaacagtgaaaaaatagaacgaagcatcaggactgtgcttcagcgtgccctcggcgagattcggattgtcctcacgatcaggctctatggcactggcgttgtcgaggaactccatggcgttgcgcggctggccgtgcgcgttgcccgcgtgacagaacagcgggcgatcctgcagcaggcatttgacgccgatggaggagtggatggacaccgccatctcgaattcctcgccgttgacgtactcatccgggttcacgctgatggtcaccgaggtgtcggtgcggcgcgtggcttcatattggcgaatcatcaacgtgccggttttcgcggagctcagccagtggacgttacgcacgtcgtcgcccggctcgtattcgcgcaatccgtagaagtcgagatcatcatccacgatctggccggatggttggccttccagatcgcggggcacgccggcattcagggtatcgagacgcacggtacgagggtggatgaatacgatgatgcggtcggccagctccttttcgtgacgcaccaggccgaacgggtctcccttgcggatgcgcaatggtccgatgggcagtattgcgcgcgataccgtacggaactccacatcggtttgcttggattgcccgggagccagcatggggatgttgaatcgttcatgcgcatcgccgattggcagatatccgcgtgccgtggttgtcggcgttctgccggtgttgtcgatgccgacgataacggatatggtgtctcccacggtcacgcgatgatcggatacggcgatggacgcgtggaagcgtgtgttgccgagggaaagcgcgattgccgcgagcatcatcaccatcgccacgatgccgaatacgagcagctcataccagcccagaggcaggaacgcaataagacatgcgatgcctgcgcccgttaccgcccagcccaagggcgagacgtaggatgcgaagaaccgtctgatgcgtcttaccgcgcgcttgaacatgcgttcagcgcgccggcgacggcgtaatgcggcggatgtagatgccatggtcggatacctttccaggccctatcaggaaccgatggtgggggagggaacgtcttcgagcacctgtgcgatcaggctttccggagtcgcgccatcgaaggtggcttccggagtcagcgtgatacggtgtgcgagcacggccactgcaaggtccttgacgtcatccggcaccacgtaggcacggccatcggccgcggcccagatacgggcgcatcgggtcagcgccaaagcgccacgcatggaggagccgactgtgatcttctcgttgtggcgggtcgcctcgacgagcctgacgatgtattcacgaatcgcatcatccacatagatttcggtggccacctgacgcagccgcatgacatcgtcaccgctcagcaccggggaaatggtctgcgcacggtcggtgatatcgacctgcttgaggatatcgacggacacatcatggcccgggtagccaatcgacgtcttgataaggaagcggtccatctgcgcctcaggcagcttataggtaccgagctgctcgatggggttctgggttgcgatcacgatgaacggctgcggtacatcatgggtgacgccgtcaacggtgactttctgctcttccataacctccagaagtgcggactgcgtcttcggcgatgcacggttgatttcatcggccagcacgatggaggcgaaaatcgggccctcgcggaactcgaattctccgcgcttctgatcgtagaaagtcacacccaccacatccgaaggcagcagatcaggcgtgaactgaatacgcttgaaaccggtggaaatggagttggccaagcctcgggccaactgggtcttaccggtgccggggttgtcttcaagcagaatatggccaccgaccatcagtgcggtgacgcattgcttgatgggaatggtcttgccgataaccaccttggagacattctcgaccagcgcattgaaggactgctggaaatcccggacctgagccgtgggctggggcagtagtccggaattgatgctggcgggcagtgccgatgcggctgcttgcgcggctttgctcgactgacgctgcggctgggattgcggctgggattgcgcggcggcctgctgattggctaccggcccgcgaccagccacggtttcggtgttggatgctgcggtcttgccggcggttgtggtcgtccattgacgggaggtctgggtggcgggggcagcattcgcagtagcggcctgcttgccggatttacgtccgaagtgcggaagcgcgactttgggcgtgctggtctttgccggcatgccgacctgctgcgggatggctggcgtcgcgtccttgcgcggcttgagcacggtgctgtcatcgcccgcaggaatggaggcggcatcagtagtaggagacggcttttctgacgacgcttgtgacggccgctgcggcaggttaggcaacgcaacgggttgctgtgccgtctcggtgttcggggtggtgccagtgtgcggttccgatgccagatgtgtggcatcggacaagtgcgtggcgtcggatagctgcgtgctgtcagacagctgcgtcgcgtcgtcgatgttctcgctcatggatgttctcctactgcttgtgaatggtggttgacgatattggggtattaccgaaaccaagaatccaagggttcttggccaaagtggtgacatcggtaccggatttgagcgactcggtcccctccgaggaatcagaggggcgtgtgcccgcgacgctgctgccgtccgccgtattgtcgagaccggagtatcccggcccgccggtgactttgacgctccacgtgtagttgccatcggcggccacggccaagtcggtgacgtccaatggctggccggggttccacgtgaacggttggccattgatgatgatttgtacggtggcctgcttgccatagacctcaaccgaaccgccggtgacgttaatgacgtgagcgttgtctgaccagcgcagctcctgcggtttgttgattgcagccttcttctcataggtgtaaggagcgccattgtacgggcctccggtggcggcatcgctggtagcgccgttgaacacctgttgcaccgatgcggtattgcatttggcccaaggactcattcggaagtcgagtgagttccggttagtagctgtaccggaatcgatgccatcggcagtcacgttgtaggactgcgcatgcccctgcttggtccaatgcacggtgcatgtactgccggatccggtggtgtagacgtcagtgggcggctggacattgtactgcgggacaaacctgctcttgcctgtgccggcggaagcatcgcgctgcggcaccacggtggccgttacggtgatttcccgggtgttcaaatcgttctcattgatatcgaacgtagcgccaccgtcactgcaatcgatggtgtccttgacgtctcctcccaaggaaattcgccggcagccggcattgcggttgttgccgagagtgactttcgccgttcctgtggtgtcgtcgttcgacagcgcaatggtcggcgcatccgggtctccccagatgtcctttggctgtgatgaggcggactcggcactccaattgattttgttatgggctttgacggtcgccgtaatggcggtgccatcggaaatgtcgttgttgttgaacgtaaacgacagctcggtggccgtattgccggtttccttggtctgcggagcacctgcaccggtgacggtcactgaatagttgtcgacggcgctgaaatcaccgctcggcgctttccacgtcactttggcggttttattgccacctgtgaccgtaacatcggtgggagcggacggcaccttgtccggtgtggcttcgacggcggtggacggtttggaccaaccgacgtcatttcgcgcggcgacggtgaaggaataggttttgccgttcttcagacccgtgacctggcatgaggtgacggcaccgcaatccttctctccggtggcggcgccggtccaactgaccttgtagttggtgatcgggctgccattggcggcaccgggcgtccatgtgaggctgaccgcgctgtcctgcggttccccggctacgggggagagcagtggcggctcgggcttgtcgatcacggacacggtaatcgatgcggtgacttcacgatccttggacttgctgccgtcttgcacggtgacgagcacggtgttcgtggaagcacccggatcggatgcgacggcgatggtgacgtttccggaggcatcgcatccggcgatagtgagtttggcggcgtcatccgccttgcagctgatgacggtcagcgaggaatcggggaacggattgtacgcgccggtaagcacgttcacggcatcgctggcaccggccttgatcttcagcgtcttgtcgccgacgcgtgccagcggacgggtggaagacactacgcgcacggtcacaccggcattcacggtgcccgcgccgtatgcgatttgcacgggaatggatgcggtggtgccaggagcggcatccttggtggcggaaacctgcaagctgccggaacgggacaggttagcggtgattcgcccggacgatgagcttccgccggaatacgtgtattgcttctcgtcgtcatacacgccggacggtgcatgggtgagcgccgtcagatcaacggtcttggggttcgcgcccgcctcgacatcaatagtggaggacgagaacgtgggcggcggcacatcgcggcctatcaccgtgatctggagagtgatcactgcggaattgatgatcttggtcttatccgatccctgcttgccatccacagcggtaaaggtaatggaggcggggcctgcgtagtcttttgccgcagtgaacttcagggtcttgtcgttcacgtagaaatcggagttggaagccttggtggcgctgacggaatcagcgctttcgatatacggttccttgccggcaccgacgcgaacatagtcattgatgttgatttcaatggtctcacgcgaattgaccttcaattccggtgccttgggacgcaacgtgggcggaaagacaccataggccggtacctggatgaacgcggtggaggtgatgttgtatttcgtattggtcaccgtgtaaggcacggctcgcgcctgtgacgtcaggtcgacggtgatggtggtcgaatgctcaccgcccttgacgtgagcgtgagcgctggcggagggatgcacgccgaccttgagctcattggctgtgccggaaggattggcgatccactgggaaacatccacatccacggacttcttatcgatggtggcggcggacggcacacgatagtcgtaggcggtaggcggctcgatggcggcattcggatccacgtttaccgtgagggtggccgtatcggacaagccggccttgtctttgaccgtgtaggcgatataggcggtggtggcgctgccgggcgtggtgaaggagatcatgttgtctttcacgctcaccccgtcgagaccttggacctcgacatgcttgtcgacggtcagattggtgttgtcgccggagatgtcgttctgcgcgaccggcacggttgcggccgtattgggcctcaacgtgatttcgtcatccctggcgtatacgccggagtcggacgatccttggaatacgcccacgcggatctgcgcctgtgcgcgctgaccggtccaatcctccacggcataggagaaggtgtcggtgccggacgaatccggatacgcttcatagaccaagtagtcggaaccgacttcggatatgcggcccagcgtgggtgccttgttgcccagacccaacagctgatcgtcgtcgccatccgtgtctatgccggtcagtgtgatggggatgcggaccttctgtccggcggcaacctgcgcttcggcgtcatgcggggttggcgcggccttgctcgctgcgtcgctcttatgcacggtaatggtgatattggcggaagccacattacccagattgtcttcaaccgtataggtgatggggaagttgccggtctcgctggatgcttggtagcggaccgtgtctccagagacgaaggccagacccttgaacgtctccttgtcgtattgcaggttgttcttgagcttgaccgtggtgccatccgagtaggccacatggtcaagcacatccacggacacgatgccgccggtgcgcacctgggcattgatattgctggccttgggcactgaattcgaggtggtcagagccggtggctgcaacacgatggtgcccttggcggttccggaggcgttggccacggtgtaggtaagggcgacgggtttcgtgggcacctgacgcgcagtgatatacacgcgcttatggctgacgagaccaaccttgatgccggagtcggccggtgcgctcaccgtggtgacggacagcacgccgcccatcggatcgacgtcattggtgagcggctccacaatggcggtattatccgcgccaagcagggcgacatcgttggcggcaaccggtttggcggcctcgccggtggcgggctgtacctcgacgcgagccaatccggtggccggaatcgagccttgagtaatggtgtagggcacataataggtgccgggattggtggccttgaacgtcaacgacatatccgccgcattggtggtcgtcgaagcgccgttgggcgtatccacctgagtcagctgtgccggctgcaaggaagtgccatgcacgtaagaggacagcttgacgacggtatccgtgttgggaacggtggttttcgctaccgggtcgatgaccgcggccaaggtgttcgcgggcttgaccgagaaatacaccatgccggtgccggtcgccgtgccatcggagacggtgacctcgacgcccacgcgtcccgacgccagcgcaccggtgttgaacgtaagctggccgtcggctcgggtggacacctgcaccgggtcggtgttctgggccacagcggagaccagagtgagcgggtctccatccggatcgttgaagctgctcagcgcattggcggtataactggctccctgctccacatcgatctcgggaggagtgtcgaactgtacgggagcgtggttgcctccatcattcagggttacggtcaccgtggcggaagaggtctggccgcggccatcggaaatatcgtaagtaaaggtaacggtgcctgcggatgtggcggaggcatcgagttgcagataccggccgtcgtaaatcggcgaaatggtgacgtctttgttgtttggtgcgccaaccttggtgattttcagcacggaacaatcggtctgctcgtcattgcgcagcacgtcgagaatctgttccgaaccggctcgtgcgccgatttcatcatcctcggctttgatttggccggattgtgcggaacaggtcttggagaagtcgtggtggttgttggccgagtcgttgttctgctgttctttctcggtctgctcggcctgtattttgttccactgtattttgatgactttggtggaatcctcagggttccacacattgccgttaaccgtgtcgttgagcactacaaggcgatggttggtgcggaacaccaattcggaagtagtattgacggattcgagggtttgcggcttgacgctggtatccgcgggggagcaggcgcgaatgtagttgctggccttctggctccaagccgagtacacgcagcccttggacgataccggtcgtgccggattcgccttgcccccgttggctatgaaattcgccttggcattggacttcaacgggataagcgcaaggcctctcggtgatgccgcggccacccaatcggactgtacgtcatcggtgggaggctcctgaagggtgagggtgccggtcgtgtcgacatcgacgcggccgcccttgaatatgacggttttgccggttgcgattaccggcgtgctcccgatgacggtaaagctttcaacggtctgctgcttgccgtcggtcagcgattcgagggttttggccttggcgctgctggaattgtcaagacgcagcaccataccgtcggatggacggtatccgtagaccttgccatcgtgggttactgcgatgcgcccgccctcgcccggcttcattttcggatcggaagtggtgggggccacggaatcaaggttttccgacaagccggtccacacattgccggtcttctcgttgatcagggctacggtatccccgccgaccacagtggtggtgttggctttgatgtcggtcttgacaccggtgctgaccgtggatgccttgatggtggaggctttggtcgtttcggtcaggatggtgtcgccattatgctgcgcgatgtcgaatcgtggggcggaggaggagacgccggcgtcggcctccttgttctttacgttgaatcgtgcggccttctggttcttcagcgaagtgacccatacggtgccatcgtccagttgcacatggcggcgcgtgacggtgctcatgatcaccgcgccggcaacaagtcccagaagcagcaggagcgtgattacgggaaccgtccacgtatgccctccggagggcataaggcggcgcaaagccgcgctgatgcgtcggcgacgatcgtatgactgggacgatgtggccatctgaactccctgaaccctggtttctctggttgctagtgtaatgacaacgctttacggttccaatacctgccgttcctgttgtccatttggtgaattcgccactgccgggcgcatgcctgatgcgatacgcaatgccaaggtggtatgcccggcagtggcgagcggatcactcttgcggcttggccgcacaggcgatggcggggctgacggacatctggcggttcttgcgcacaatggacacctgaatgcaggtctgcgagccttcctgcgcgttgacggtcaccgtgggatctgacgttgtgacggtttgcgcgctctggtcggtattgctgccctgcactatggcccacgtataggtatcaccgctttgcgggtctggattcgtccaggtgaacgtcacggatgacccatccgccgcataggtgccgttcagattctccggggaaggaatctgggcgttcgcggtatcggtgatcacgtcatcctgattattgcggttgttgtcatcatccttggtgccgggcgtcgccacctgtttggtatctgatccggtggcgctgtccatgcggggaacgaccacgaaggcgaatatcagtgccgctgcggtgatcgccgcaagtataccgacggtaatacccaccggtttgacccatcgccgtgacgaacgggtgatctgatctcgctggtccgtggcccggcgccgacgctcgatgtctttggggtaggccggcatcccttccacggtaacgggagtggcatgcccgaaatatgcgaattgcacacgctgcatggcacgtgcgaactccaacgcggagtagtaccgctggtcggggtccttgttcagggcccggcgcagcactgcttccacatcggccggtacgtcggggcggttgaggcgaggcaatggctggttgacgatcagcgaaatcagttccgattgcgaacgtggatgatattcgtgctggaatggcgagcagccgacgaacatggcgtacagggtggccgccagtgaatagatgtcggcggcttccgaaccattggtcagatgctgaagcacttcaggcggtgcccacggcggcgagaatccggtttcggtacggtcatacacatcggtggagataccgaaatcacccagaacaggcaagccctgcgaggtgatgagaatgttgctgggcttgatgtcgtgatggatgatattgctgcgatgcgcggtgaacagcgcgcttgacagcttgatgccgaggtcgagtacctgctcgcaggtcatggaccgggccttcatgatgctgttgtaggtgccgcccggcgcatattcgatgacgatgtagccatggccatcggaggtgacgccggcaccatataccggcagaatgtacgggtgggatgacagcttggccatgaagttggcctcgcggttgaacagggcagcggcccgtgggtcaagggttttggcgctgacctttaccgccaccgggcgtgcgggcatacgctggttatataggtacaccgtggcggtggcaccgcttcccaacatctggacgaaatcatatccgggcagcttcggcggcctcatcggaatattggccatctgtccctccctccttggaaaatgcgctctccctgcattcgttctacaggataccgtcaagggtacgattcttcgtcgggttcggtaaaatttttccctctgtgacggtcgggtttaggctggagccatgatgacgagacttgaacctggaacagtgctggacggcatcgaccgtgatggagcggcgaggctgattgtcggcacgcctggaagcggcaaaaccgaattcgccttatcggtgttgatggcggggctgcgccgctacggtggcacgcaggcggtgatggccgtatccggccgtgtggccgccgacgcattgggcaatcgggtgattcgtgagctcgggttttccgtgcaggccaggccggtcaccacgctgggtgccgtggcattccgggccatatcagcttcgcgcgagggaactggattgccgtcgcctcgattgttgaacggtgcggaacaggatgctttgctgcgtcaagtcatggccgtgcatctgcgccatgccgtagcgggagatgattgcggcacctgtgatttgctacgcgtctactttgcccaggatgactgggcgaaactcatacgcgatgccggtgccggcgagatgcccggctcggccgcttccgcacaatcaagcctctcgcaacaagggtcggattcgctgtctccgacgtcggcaggcggctcgaccagcgcggataggttcactcgcggtatttcagatgcgtttatcagccagttgcgcgatatgctggcccgattggacgagctcggtgtaggcgttcacgaagagccacgtctcttggacgccgtgacggaggacgcgcgattgtcggtgcaatggcgtttggctttcgcgttgcgccgtgaatatattgcagcccaaagcgcggcatatccggggcaataccgtttggatgcctcgtatttgctggtggcaggagctcgtgtggtgcatgaggcattcgccgccgatcacgcggatgattccgaccggcctatgcgtatggaggcgttgggcttgccccggctgctggttgtggatgatgttcaagacaccacgctggccggcatgcgcttcttggaggagttggggaatgccggcgtcaagttggtgctggtcggcaacccggatgaatcggtgcagaccttccgtggatcgtatccggaatatctgatgcgccgtgccgtggaagggtggctgaaagccaaggaagaacagctggttggcggcagtaccggcgctgatcagtcgcacatgacgatggctgatgtgatcgcgtctcgtatttcgctgtcgattccctcgccggaagacgagccgctgcctccggccgagcgtcccggcaagctgaccgccatgctgggcggagtcgatgcagcgaattatcagtcggacggcacggtgaccgccggcctgtaccgatcctcacgtgaggagctggatgatgtggtctggcgcatcaagcgggcgcatctcgaccggcatattcggtggaacgacatggcggtcatcacccacgacaatgccgccgtgcggctgttcggcgaacgactgcgccgagatggcgtgccggtgcggtattcgtcggtcacccgtcctttgaaggacgagactttcgtgcagggattgttcgcgcttgtggagcttgcccgattgcgtgccgagggaatggcggaatgccagatgacgttggcttcctgcgcggcatatataaggactagagtggccacgttgatgaacggcccgttggtgagtgccgggggcagacccggtcaagggcgtcctgcaaggctcgctccgattgaattggccatgagcgcgctggagtcgctggcgcatctcgccacggatgatgccatgctgacctctctgacgacggcatgggagacattgcgtgaaacataccatgaaacacggcgtgaaacaggtcgtgaaacatcctcatcagtggtttcgtcgccagtgtctgtcgaaatactcggtgaaccgtccgacgatgacttggcctttggcgttgacgcgctgtacgtgatgcttgccgttgatgatgccgccgcgccggcgcaggctgcgctcgcatccatccatgcggtgcttggcaacgaccctcaggcccgcgcttttgcgaacctgtggcatctggtgggcagcgttgcttccggcttggagcggctgtcggcaagccagcgcgtacagccgcgttatgcactgtctgttgcctggaacgccaccggtctggcaccggtctggcagcgtgcggcattattcaacacggcagaggggcgcacggccaatgaccggctggacgcggcaatgcgcctgttccagttcgccgatgattccaccgccagccgagacatcacgtcattcatggcacaggttcggggcatggaagtgcaggccgattccttggcccacatagggccggtggaagacgctgtgacattgaccacgccggcaggcgcggccggacgccactggggatatgcgtggataccggtggtccagcaagacgtgtggccgaacctcgccgggcgcaacaccatgttcggtggtgaagaccttgccgagctcgtgctgaggggagcgcttgaagaaagtgacaaaaccgggcatgatccgcagttcgcggctgtgctgtcgggcgagaagaagggtttcctggtcgcgctgacccgtgcacggcgaatcatgatcagcgcggtatggaacgacagcatgagcccctcggactttcttttcgggtatctgccggaatactatccgcgcaaccggcaacaggcgcctttcaccacagtgggggcgcatacaggatccgccgaatatgatctggccggattggacgccgacccacgtgggttggtcagcgccgctcgcgcggttctggccactgctcaaccgcagcaggctgccgcaaaggacgccgcggttgcgttgacactcctgtcggagcatggtgtgcgcgccgcaaatccgcagagctgggcgttcgtggaatcgccggcccaatcggatagcgcgtcatctggcggtgcgtcatctggcggtgcctcatccgacagtgcctcatccgacagtgcctcatccgacagtgcctcatccgacagcgcgtcatctggcggtgtacagtctgacggtatccaaacggggaaaggcaagacggatgcgcaggccgcacccatggtcaccctgtctccatcggcggtcgacagcctatgggcatgtccggtgtgctggatgctggagaaccggttcgccggtcctcgccccagctccgtggccaccagcttcggaaccctcatccatgcggttgcgcagcaaggcagcgaggaagggctggaccatctttcccacaatgcccagacgttggccacactgggcttggactccacggccggcacggaacgccgcatcgaggctgtcacggcacggcttaatgccatctatcagagcaaacgccccgatccgaatgccatagccgacacccggaaccgctatgaggccacccgtaaggacgagtccgcggcagatgccctgcgcaacatcgccgattactttgtgcgcagcgacgccgatccggaaacgtatcttggcaagaactccagcaacttcagcattggcgcattggccggtgccgaatgcgaacgggagtttgccgcacgattcgatgtgcgtgacatactcgacgcatacaatgccgtgcccggcatgcacccgatcgatcggaacatgctggtccgtctgatgggagcactggtcggagggtggccggaaggcatggacgagcatctgaccgtgagactgtccgggcgcatcgaccgtatggaaacccgcgtactcgcagacggcggcgaatgcattcgcctcattgactacaaaacaggcagaacgcccacggtcaaacagattttcaatgatctgcagctcgtgtgctatcagcttggcctcgtgttccccgaagacgggccgcgcggtgccaaggcacttgccgcaatgccgcatatcagccaaagcgcgctgttccatgtcgggcagaatgcggcaccagccagaagctacgccccggaaggtgccttccagccgccgctgttcactgatggttcgttgaatgccgaaccgttcacgccacgatactggtataaagaccccaaccgtttcttcgacatacccgccatagatccggctactcctcccgaaggtgtgagtgccgaagcgtgggcgcaattcgccgcgctcgccggtacgcagacgttatggtcgctgaccatgatcgcccgcgtattctatgccgcggcggccagcaggtcggccatcatcgaggcccatccgcaagacacccatatcggattctgccgtatgaagaacgtctgccctgcctgtgcgggccagatcgacacgattttcgaaacgaggcaagcatgagcacgttcactcccagtgcggaacaggccgccatcatcgatgcgccagtcgatgctgacgtactggtggttgccggtgccggttccggcaaaacctttacgatgacccaacgcatcatcgcgcttatcaatcgaggtgtggcacctgaacgcatccttggcctgaccttcacacgcaaggccgcaggcgaactgctggaacgcgtctccgccgcagtggccggtgatatggcgggctctacgaccgccacggtgtctgatcgggcattcctcaagccggccattttcacgtatgacgccttcttccagaccatcgtgcgccaatatggactgcttgtcggattcgatcagaacacgcaaccattgagcgcagccggagcgcttcaactggccaccgaagtcatcgacagtcacatggatctggcgttcagtgaggattttggcgccttctccagtttggcgaaccgtgttctggcgttgtcggatgccattggcagtgccatgatcggtgccggctgcaccagcttcgatgatgcgatcaatcaagtacggcaatgggattcggcattcatcaatcgattgcagcaagccgtcgcagacgaacccatgcccgaggacgagccgaaaatccccaagatcaaacgactgaagaaagataccgacgccagctggcaagccaagctcgatgaccgtgccgaacatttgcacgcccgctgcgcctatcattgcggtgcgctgctggagaccacacgcaaacgcgatattctgctccagctggtggaggcctatgcccaagccaagcgggaacgcaatatggccgaattctccgacttcaccattgccgcgtatcagcttatcgagcgcttcccctccatcggagagcgcacgcgccgcaggtacagccatgtgctgctcgacgaatatcaggacacctccaccacgcaggccgctctgctggcagcactgttccatgtggatgcgtcacggaggtccgccgtcaacgcggtgggtgatccgttccagtcgatttacgcatggcgtggtgccagccctggtgcattccgtatgttccagcaagatttccacctgcctgccggatacaagccattcccgttgtccgtcaccaggcgcaacagccgtatagtgctcgaagccgccaataatctcacgctgccgttgcgctccaatccgtcgcgtccctccagctcattgatgcgtgaggtcgatgtctcatcgctcgaccccatgcctgatgcccccgaaggaacattgggagtactgggcttcgccacggccgggcaggagatcgacgccgtagtgcgtttctgcaagacggccatcgcacggcaccgttccgcagccgaacaacaggaacagatgccgggcgaacagaaagcgccggtcgccgtgctgtttcggtccaaatcacatatgcccgaatatcaggcggcattggaacaggccggattgaccacattcgtggtcggctattccgcgctgctggaacgtccggaaatccgcgatctgatggcgttgctgcacgtggccgccgaccacaccgatacgggatcgctgatgcgcttgctggccacgccacgattcaccatgtccgcagcggatttgaccatgttggcccgttttgctgaagaacagaacatggaacaacgcttccaagcattggtgcaggccggccttgcccaaccggatacaccagcgaatgaatgggcggctgtggtgcgtgagtaccgcgatcaggtggccaatgcggtattcctgccagacgtattgctacgcggcgacctggtaaaactgcttgaacggttgagcgcacacgggcgcaacgccataacccgggccgcggtgatgctccgtcaggtgcatgatgccgtcgggcggccactgggcgacgtgattcgcgccggcatagaagcgttggatcttgacatcgacaccgtattggccggtgtgctgcataatccgcagcaccgcgccaatcccgctttggcgcatatgcctatggatgcgattgtggatttggtggatacgtacacgcaagagattgccgctgagcaaactccctcgttgcatgggttcatcacatgggtggatcatctggcttcggtggaggatgaagccgccagtctccccgacgctccggtggatgcggaactgatgaccgtacaccagtccaaagggttggaatgggatgccgttgcggtagtggggcttaccgccggcggattccccagcaatcagggcgaccatctcaagatcgtgctggacgaacaccatacgggaggcaccgagcaaggtcactggaccgcacccgaatatcatgagaccgccgactcctggctcaccaaccccaccgccgtgcccgtgcctatgcgcgccgatgccggcattttgccgcgattcccccatgatgccgatgtggaagccgaccccatcgcatcgttggcggctttggatgatgtggagcttatcgatgatgaagtgttcggctccatgcgcgaattcggcgatggcgtggaagaagtggatgcatccggctggtatttgacgcaggcggaggaatatgggcgtcggctgcatgccgacgaacgtcgattgatgtatgtggcgcttacccgtgcgcgggaagatgccctgatgacctattgcgcctatacgggcgaatccgggcgggacccgtcagtggtgcccaaaggctctcgcgccgctcagccatccaatttctggcttgaagtgcatgacgcgctccaagcccgtgaacatgcgatatcggctcaggactgtgtggaacggctgcaagccgccaatgccgggaagcccatgctgatctcggcgcaaggcgaagcgattgcccctcccgaagggttctttatcggagagcatgccgcggcatacagtgacgccgtggtgggggaggcgtggcaaacgccgattacgcagacgaatgccgccgccgaattgccgtggccggctaccctcagcgacgcggtgcatgaacagctgtcacgcggcatcgatgtcatcgccgcagattcctcgtcacttgagcagcaccaagacgccggcccactcctgcaacgggcacaattgctggtggacgacgccgatttgatggccgatgccgccagcggacagtcgcttgatgaggcagtcaaagccaaggcgcaacgcgttctggctgcaggacgccagaacgtgacaagcctgcaagcccgcgtaggtggcatgaacgaacgggaggagcgcctctactggcgtagcattatccgcccgattccgcgcatatcgtctccggcggccgaggccggcacgcagttccatgcgtgggccgagcaattcatcaatgccggtaagccggatgaagcggtactggcatatgaagccgaaccaagcatgccgcatacaggtcaggatgcgggattcgtttcccgggaagccatgttggtcgatttggccgaacgggagcggcaatgccgcaagccatccacacggcagcccgctgtcccacagcccacggctcaacaatccgtatccgccgtatccgccgtatccgccacttccataagcagcgacaatgccaccgagtccaagctggtggcgtggcagcgcagactggccgaatcatcgtgggccaagcgcatcccggcgtggacggagcgtgccatcgtcgtggacgtgccgggcgtgggcctggtcaatggcaaactcgatgcggtattcatcggtggacttgacccgtccagcaccaccgcacgctttaccgtggtcgactggaaaaccggtcgtcggcccaccaagccagacgacatcacccgcaaacttgcccagctcgacatgtaccgactgctgctggcagcggtcgaaggtgtggaattggacagtatcgacgccactctctactatgtcagtgagcccgacgagggcttgcgcgagcttcacgcccgcgcgaaatccaaacaggaaatccttaccgagttgagctccggcattcccgaacaatctgacaacgactgagcccaaaggctcatgacctgtacagcatcggacggccttcaccggtggagagaccttatgcatcgcaaggcatctccgacgatgaagacgactggccacgtaccggtccgcggttgaaacgcaccgcgtgacgttgctagggaaccgctaccctcggatggcacgtgtgggcgggcgcacgtgccggacaacgcaccagtaaggagttattgtgtccacgactcgcgcggtttcgaagtcgtccgctgtccactcgccctatcagcgcctgttcatgctgcccggagccaaggcgttctgcctgtccggcgcggtggcacgattgccgatctccatgatgagtctcggcatcgttctggcgctcaaccatctctacgacaattggaccatcgccggcaccatgagcgccgcctatgtgctggccatgagctgcgtcaccccgttctacgcccgcgccttcgaccgtttcggccaagcccgcgtgggccggcttgcgctcgccgtgcagatcgtggccatgctcgccttcgccttcgcggcgttggtgcgcgtgccgattccgctgctgttcgtcttggccatcatcatgggtctgacgcagttctcattcggcgcattggtccgaacacgctggtcctatgcgttgcgcggtgtggaagatggtgaacagctgctcaacacggcctacgccatggaagccgccattgacgagatcgtctttattctggggccgattctggcggcttggctggccacctccgtgcatccggtatcccaactgttcgtgcccaccgtggcatgcggtatcggcggcaccatattcttctcgctgaaatccacccagccaccggttatcgtggaacaggtcaccgtggccgcgcacgatgacggcagccctgctgcaagcgaagatgccgaccagctgaccctgcgccagctcaaacgcagcggcgccaagcccaagagcgtattgctctatgccggcgtactgccgttgctcgccgtgttcatcgtgttcaatatgagcttcacgtccttcgacgtgtccattaccgccaccatgaaatccatgggacttgagcccttcctcggtctgcaattggcgatgttcgcggtcggctcgtgcatcggcgcgctggtgttcggctcttgccgactcaaaggctcccattgggcgcatatggtgatgttcctatcgctgctgaccgtcggctacgtgttcttccggctgtcaatggacaatctcatcctgctgggcgtcttcgaaatcctcgccggcctgaccgtctcgccgacgttcgccaccggcaacctcatcgtcaaggatctggtgccggcggaatccctgaccgaaggactgagctgggtaaccaccgcaggcacggtcggcacatcgatcggctcgtccgtggccggcattgtgcttgacgcctccaaccctcatgtgggcatgatgctgccattcatcttcacgctggcgtccgtgccattggcgttggccggatgggccttggccaagcggcgtgggtgaaacggaatcgggctacgcctgatggatggttggcggcttcgccgggggtctctccctcagtccgcttcgcggccagctcgaacgcaattaaatgatggctttcagccaactgaattattgctcactgtcgttcgccctcacctaaaaacgcctccggcgttttcttcacggttcggctcatcagagggagctcgacttcacggttcggcttgtcagagggagctcgattctgtggacgggatattggcgtgagggcttggcggtgataggctgattgccgattggaaaacgttccgggtacattgccgggcaggtacgggtagacagggaagaagacatgatcaaggtttcggtggtcggagcaaagggccgcatgggctcgcacgtggtcgaagcggtgaacaacgccgaggatacgcagctggcgctcgcattggatgccggcgacgacctgacccaggtcaccaccgacaacaccgatgtggtcgtcgaattcaccgtgccgtccgtcagcctgaacaacgtgctgaccctgatcggccaaggcgtggacgtggtggtcggcaccaccggttggaccgacgagaaactcgcccaggtcaaatccgccatcgccaacggcccgaagcccgaaacccagaaggtcttcatcgcacctaatttcgcgatctccgccgtactggccgactactttgcaaccaaggccgcgaaatacttcgaatccgccgaagtcatcgaactgcaccaccccaccaaggtggacgccccctccggcaccgccattcacaccgcccacggcatcgccgaagcgcgcaaggccgcaggactcgcccccgtgccggacgccaccgaaaccgatggcggctcacgcggccaggtggtcgacggcatccacgtgcacgccgtgcgtctgcgcggcctcaacgcccacgaggaagtgctcttcggcaacgccggcgagcagctgaccattcgggccgacagcttcgaccgcaccagcttcatgcccggcgtcctgcttgccgtgcgcaagctcgccggcgacgctccggctggcctgaccatcggcctcgaccacttcctcgacctgtaatcgacccgcagtcgaccagtagtcgcccccgcatttcaggcagggaagcgcgccgggacgcgcatcacggcattgccaccggctccggccataatgccacgcattcagcaacaatcaaggtacgtagtataagagtccacaatgggaagtacggtgaacactatgagcgagcatgacatgcaccttcttgagccagcacctttcggccgcattctgccggctatggtcaccccgatgaaatccgacggcagcgtcgatttcgccgccgcgcagaagctcgccaaatacctcgtcgccgatggcgcggatggtctggtggtcaatggcaccaccggtgaatcgcccgtcacccatatggatgagaaggtcgagctggtcagggccgtcaaggaggtcgtcgacgttccggtgatttccggcgccggctccaacgacaccgcacacaccgtgcgtatggtcgaacagactcaggaagcgggcgccgacgcggtgctcgtcgtcatgccttactattcccgcccctcgcaggacggtatcgtcggccactacaaggccgtcgacgaatccgccgaaaagccgatcatcgtctacgatgttcccggccgtaccggcttgaaggtcaaggtcgaaacctacgaccgactggccgaacttgaacacgtcaaggctgtcaaggacgccaccggcgatcttgcagccgcagtggagaagcagcagcgcaccggcctcgcctggtattccggcgatgacggcctgttcctgccgttcctctccatcggcgccgtcggcatcatttcggtgattgcccacgtcgcctccaaccccatgcagcagcttgtccaggcattcgatcgcggcgatatcaccaccgcccgtcgcctcgccaaccagctcgccccccttgtccacgcgttgaatggcgacggctatcaggccgtcatggccaaggctgcgctcaaggtcaagggcgttatcccctccaccaccatgcgtctgccgaacatcggtcccgacgccactcagcttgacaaggctgaagagggcatgcgcgctgccggactgctgtaagcccgaaacgctgcatacgggttgccagcccgccgcccctgcatgacagagcagaggcaccacaacagaaatcccaaaaaggttatggcacaagaacaaaagaaaacaagcaagaacacgaattctcgccgtcgcggttccgcgcgcggccgcaacgccaacggatccaacagccgtacgccgtcccgtaagatcaacgccacccggcaggccaccgcaccccagcaggatgccgtgctgatcgccccgccgaagtaccgcaagggctccatgcgcatcacgccgctcggcggcttgggcgaaatcggccgcaacatgaacgtgatcgaatacaacggtcacctgctgctcatcgactgcggcgtgctcttccccgaggaggagcagccgggcgtggatctcatcctgcccgatttcagctacatcaagaaccgtctcgacaaggtcgacgccctggtgctcacccacggccacgaggaccacatcggcggcgtgccctacctgctcaagctgcgtccggacatcccgctgatcggctccaagctgaccctcgccttcgtggacgccaagtgcaaggaacaccaccagaaccccaccaaggttgaggttgccggccgtgagaagctcaaggtgggccccttcgacctcgaattcgtcaacgtcacccactccatcccggacgccctggccgtctacgtcaagaccccggccggctccctgatcgacacgggcgatatcaagctcgaccagctgccgctcgaccaccgcatcaccgacctcgtcgaattcggcaagatcggcgaaaagggcgtggacctgctgatgatggactccaccaacgccgaggtgcccggcttcgtcaagcccgagacctccatcggcccggcccttgaccaagcgttcgcccaggccacccgcaagatcatcgtcgccagcttctcctcccacgtgcaccgtgtgcagcaggtggtggacgccgcccacaagtacggccgcaaggtcgtgttcgtcggccgttcgatggtgcgcaacatgtccatcgccgccgacctcggctacctgcacatccccgaaggcaccgtcgtggacctgaagcaggccaacgacattcaggacgacaagctcgtcttcatgtgcaccggttcccagggcgaaccgatggccgcactcggccgcatcgccgacggcaaccaccgcgacatccacatcaacgagttcgacaccgtgattctcgccagctccctgattccaggcaatgagcacggcgtctacaaggtgatcaacaagctcgtgcagctcggcgccaaggtcgtcaaccgcgacaacgccgccgtgcatgtgtccggccactgcaacgagggcgagctgctgtacatgtataacatcgtcaagcccaagtgcgccatgccgatccacggcgagaaccgtcacctggtggccaacggcctgatcgccgtcaagaccggcgtggacccgcagaacgtggtcttggccgaagacggcgacgtggtcgacctgtatcacggcaaggccgcggtcgtcggctccgtgccgtgcggttacgtgtacgtcgatggcgattccgtcggcgagctgaccgatgacgagctggaaaagcgccgcattctcggcaccgagggcttcgtatccgcgttcgtggtggtcgacaccgacaaccacgaggtcgtcaccggcccgaagatctacctgaacgccgtggccgaggacgaaagcgagttcgacaaggtgcgtcaccagatcgtcgaacagctcaacgaccagatgatgcagggcgcgcgtgacacctacaagctgcagcagaccatgcgccgcacgctcggcagctgggttgcgcgccagctgcaccgcaagccgatgatcgtgcccgtcgtggccgacatcgctcaggacgtcgaaaccgtagaaaccaagtagtccggattatccagggacgaccgtaaggagtaattgaagtcatgcccggttctaatctcactcgtattgaagccgaagaacgtaaggccgttatcgaagcgccgattcactatcacgtcgaccttgacctgacggtcggcgcgaagaacttcggttccaagtcgctcatctgcttcaacgcgaagcctggttcgtcgaccttcctcgacctgattgccgacgaagtgacatccatcgacctcaacggcaagtccctggacccagccgtggccttccaggacaaccgcatcgaactgaccgacctcaaggagaagaacgaggtcaccgtcgaagccaagtgccgttactccaacaccggcgagggcctgcaccgctcggtcgacccgtccgatggcaacatctacctgtactcccagttcgaggtgccggacgcgcgccgcgtctacgccgtgttcgaccagcctgacctgaaggccaccttcgatttcaaggtgctcgctcccgccagctggatcgtcacctccaacatgccggttgccaccatcgaggacgatccgcgcgaaaccctcgacggcaccctcggcgacaagccgaacgaaagcacccgtctgtgggacttcgagccgaccccggtgatgagctcctacctgaccgctatctgcgccggcccgtacgccgaatggcacaccgaatacctgaacgaagacggtcgcaccgtgccgatggcccagtactgccgacagtcgttggccaaggccttcgcgaaggacgtcgactacctgttcgacatcaccaagaagggcttcgcgttctacgccaagacctggggcgtgccctacccgtacgccaagttcgaccagatctacgttcccgaatacaacgcgggcgctatggagaacatcggcatggtcaccatccgtgactcctacgtgttcgagtccaaggtgaccgacgcgctggccgagcgccgcgtggtgaccgtgctgcacgagctggcccacatgtggttcggcgactatgtgaccatgaggtggtggaacgacctgtggctcaacgagtccttcgccgaattcacctccacgctggccactgccgaagccaccgaatggcatgacgcctgggccaccttctgctccggtgagaagagctgggcgttgcgccaggatcagctgcccaccacgcacccgatcgtcgccccgatcaacgacctcaacgacacctacgtcaacttcgacggcatcacctacgccaagggcgcctccgtgctgaagcagctggcattctacgtgggccgcacgcagttcttcgaaggtatccacaactacctgaaccgccacgcctactccaacgccaccctggccgacctgctgagcgaactggagaagacctccggccgcgatctcaaggcctggagcgccaagtggctggaggaatccggcatcaacacgatcgccaccggcctgaccgtaaacgcggacggcaccatcgccgaattgaagctcacccagagcgcgccggccgaacacccggtgctgcgtccgcatcgcctggccgtcggcttctacaacgaagacgccgaaaccggcaagatcgtgcgcaccgagcagttcgaactcgacgtggatggcgaaaccaccatcgtcgaggccgcggcaggcaagccgcgcccggcattcgtgctggtcaacgacgatgacctgacctacaccaagattcgtttcgacgccgaatcccaggcattcgccgaagccaacctgcatcgtttcgacgatgccctggcccgcgccgtgacctggctcgccttctgggatatgacccgtgacggcgaattcccggccgaacgcttcgtggacatgaccctgcgtcttctggccacggaaaccgaatccaccaccttccgttacgcgctggcctgcatgagcaccaccgcccaccactacgtggcgccagcccgccgcgacgatgtgctgcgccacgtggccgccgagctgtggaccctggccaacgccgccgaagccggctcggacacccagttccagctcgccaccgcctacctgggctatggcgaggagggcgatgccgcattcgccgccaacgcacacggtctgctggacggcaccgtgcgtcttgaaggcctcgaaatcgacaacaacttcacgtggaccatcgtccaagcgctcacctccgtcaacgagatgaccaacgacgacgtggacgcgcagctcgccaagaaggagaccacggaaaaccgcgagttcgcctacggcgcccgcgcctccatggccacgacgcaagccaaggaatgggcttgggatcaggcactccacaacgacgagctgaccaactcccagctcgaggccgtggcccgtggcttctccgccaccccgcgccacgacctggccgagccgttcgccgcccggtatttcgaggccgtcgactggatctgggcgaacaagacctaccacatggccgaggccctgctcaacggcctgtacccgggttacgccgatcccgccacgctggtcaagctcggtgacgcctggctggacgagcacattgccgccgacaacgccctgaagcgtctgatcgtcgaaaacgtggcatcctcccaccgcaccctcaaggttcgcgaatacaacgaagcgctctgatttccttctggctcccctcgggtgcgaggggagttgtcgcctcaggcgactgagggaatcgcttccgcgaggagctacgtccacattccaacataaaacccgcaaccaatcctcaacagcgtattctcgctcaagaccggcaatgtgccggtcgatgagcgacaaggatacggggaatgattgcgggcttttccataacttcattactactgattctgttggccggaatcggcgcaggattcgtgggctatgcggtaggcgcatcgtcactggtctcatacccggccttgctcgcgttcggcattccgcctgtattggcaaacgcttctaacaccgttggcgtggtcggcacgggcatcggtggcgtgatgggcgcgcgcaaagaactcaaaggccaagcggtacgctccattacgtatgtggtcattggcgcgttcggcggggtggccggtgcgtttctgttgctcaaactcgacccgagtgtctttgaattcgccgcaccagtgctgattttgctgagctcgctgatcatcgccatcaatccgcgcggccgcatgcaggccaagcaggccgccgcggatgccaccgcgcaactcaagcacatcgaagccactgaagccaccgatgccactgatgccgccaagcgcgcaaccacccctaccgcacctcaccgcccgccggaacaactcgtgcagcccatgagccaggattcctggtgggtatggctgggcgtggtggcagtcgccatctactccggctacttcggcgcgggcgccggcaccctggctctcgccatgcttgatgccgccaaaatcgggccattccacaagatcaatgcattgaaaaccctgatcggcacaggcgcgaacatcagcgcctcagtggtattcatcatccaaggcgcggtcgattggccggccgccatcatgctgtgcatcggctgcttcatcggcgggtacatcgccccgcccatcacccgcaagattcccgcaaacatcatgcgcgccgccgccgtaatcgccggcatcattctcaccatcgatctggggctcaaaacctattgattcatgccttacactgatgcagtgaagcatacagcatggccgccaaccgcagcgtggccgcagaccccgataaggtggccaatgtctggcatttggcgactgcggaacctgagcgcctagaaaccaacgcggtaggcaaagaggtgagtgacttcctcgatccgccagacacgtcgcagattcacggcgttgcgtgccatgctgattggtggttcgcggcgcgagcaggtgctgttcgccggcgttatgaaggagctactcgcgcccatcaacaatccgcgatatgtcatcatcggcaaggaatggggcgtgcgcacgtacggtgtaagcttcccatgcccgtccatatttgcccgccgccagcaggacgccgaaatactgcgccgacagttggaccgctgcctgacgcattgcaccatggtatacacccgcactgaggaaggccggcgtacgctacttcgttgccaaacgcgttctttcctcaaccgtgacgaacaactgccgcgcatactgaccacaacatcggagtgatagatcgttgcatgcatagccgagaccactccggtagaggagatgccgttgggcatgttcaccgcatggctcagcgtgttcctcgccgtcgtgttgtatacgatcacgtttgccggcccattcgtgctggtacgccgtcttcgttcccgcgccagagcccatcgacctgcccggcatgcccgttaaccgatacttctcattgttcgtctatcgagcaaggtggcacgtacgctacttggtataggggagagtttctcgctgtctgtggtggaaaatccgagttttattatctgagtcagtgctttgggtttgcgttttgggctcgatttactattggacggcgatatccggggcgggcggctagctgttggggttcttgtcgcggctgtagatgtgtgttcggtctatcggtgatgcttgtcctgttcgtggaccgggcgaagtgcgggacgacgcgcggatttcgcggtttttcgtctgccgtcccgcagagagcccgggggatgattatggtccgtaacggggattggcgtgattgcgcggttctggcggttgatagtgtggaacgccacgaacgtcaaacgattgatttctctaccatcccacgttcctgcgggacgccgcgcggaaaccggccaaatccgcgtgccgtcccacaggcatgaggctgtattcggccggccactgtccatggcggacggacgaacagaccccactggctatcgtctgcgcttctgcagcgctcaccccggccttccacggaaatcatgacagcatgaaggtgacgaatggcctggcttgcctgtggacgccgatcaatgtgtgcgacaatgattcgcggtacatggcccctggccggggtggtcacggcatcattggtgatgagattgttggttgaggcgcgctcggtgtcaagacaactcaccaggaatttcgatacgagcctcgaccggttgggcagaatatccggtgcgcccacaatgcctacgctggagccgatgggaataccttcaagttcgttgtcgtctacggtgataactcggtattcgtctgaggggatgagcagacgtgcgctggtggtgttgattaccggatgcagcacaccgttgacgctgatgaatcgagatgcggtgtctttgcccacaatgagtttgttattgctccagtctgaaggcaggccagggctgatgatgccatagaacacactgatcagaaccatgatggcggtcaggccgatactgaccatcaccggcgtcaggcctttcttaggagtcagctccttgccatccggcataccggaagtgaaggcagtaatgagcctggcccgcgaatagttttgtgcgtcctgcaggtccttcttattcgccatggcccctcctcacaatcccaatgccacgtaggcgagcggcagggtggccaccacacagattacgttcgaggcgtcagccagacgggtcatggcgatggaatcgtgcttagacagctgtgtgccgatgacgcacagcaacgctcccagtgagaacaagcccaccaccaccgaagcccacgtggggtgaaacaccgtgcatgcggcacaagacaggcagatgccggcacctgcggtgataacggtgatcagcatttccgattgtgcatagatgcgcctggaatcaagcagcatggctgcgaacagaaccaaggtaagtgccacgcctgctgggcttgcactggaaacagccagaggcgtgccgaacacgatcagtgcgctggtggcagcgcgcaggtcgaacagcagcgtggagccgatacggtacttattacgcacttcgctgatatcgatgttcttgggcagcgcgaaaatctccgattcgctggtggggctgtccacagacaatcgtgcggaagacaggctgagccacggcagcgcattggcagccagaccgagcagagccactgccacgatccatacgcgagtggaccagtgcggcatcgttacacacacaatgccgagaatcaccagtgctgcgccgataatgacaggaatcaacgcgtacagtctgttcactgtaagcagcaaacatgaaatgccgccggccagcagtaaaccagcaccgataccaacggccgggaacccgtagaacgagggattgaacagtgaacccatgagatgatatccggtcacgccggccaaaagcgaggcgactagcgacagtgccagtgcctgccgatgcatatggcgcgaagccagtaccgtggcaatcgccagtaaagcggctgcggtaatgcccgctacgccagcattgatgatggatagtggggccaatgccagacaaatcgctccgacacccagtagcacacaactgaccaccattgtggtcactgtggtattggcactggtccacggtcgatgagaacgctccaccgaatcggccaccgcctcaaccacatcgtcgtagacgatatcctgatcgcccaaggcgttgacctcgagtttgagacgttcaccgtctcggatggcctgatcggccagcgaagcgggattattgatggcggtttcgtcgtcacgggtcagtcggtagccggcatacaccagagtcggatcgaacacacctagtttcttggcgatatcaggcagcagttcagctaccggaagtgtcgacggaacattgagtttcgcggagcgtttgccatacaccacagtgatggccacgcgcggggatgatgcggaaggcgagggctgattggctggcactcccatcgcaatcgaaggtacgggcgttggcgccggaacgtgtggtgctatgcgcggcggtgccggcatcatggacggtccggcgggcgtgtggcgatgcgacgatgccatagggtgcttcctcttctcaataaactcccaaaggtctactgtattcttgtattctctcacacattgcgggtatcgggaatgccattgtctggtcctagagcagattccgtggcgttttttgccgagtcgggtcctagggtggagcacaacgactacgatggtgcgggtaacgcgatacaaggagtggaacttcatatgccgaagatgtttggaaccgatggtgttcgaggactggccaatagggatttgaccgcacgtctggcgttggatttgggcgatgccgccgtgcgtgtgctcggcgacgccggcacccaagacgatcagcctgagggacgccgccgcgcgctcgtgggccgtgacacccgtgtgtccggtgattttctggcttccgccctgtccgcgggcatggccgccggcggcttcgacgtgatcgatgccggcatcatccccactcctggcgtggcctacctgacctccgtgctcaacgtcgaaatgggtgccgtgatctccgcctcccacaacccgatgcccgacaacggcatcaagttcttcgcacgcggcggcttcaagctgcccgaccagaaggaagacgacatcgaggccgtgctcggccaggactgggaccgcccgaccggtgccggcgtgggc

SEQ ID NO: 3818 - DNA, 59287 bp, Unknown
  R35_2m  MAG No. k141_7232
agatttgcggcggccatggcccaggagagacgcccggtcccattccgaacccggaagctaaggcctggcacggcgatggtactgcacccgacagggtgtgggagagtagcacgccgccgcaccacacgtacaggaagcccctcggagcacacgccccaaggggcttcccctatatccggaaccaacaagacataggctctcgcacctagggtgtggccgaatcgaaagcatatagaagagggaaccctcaaatgacggagagttccctctttgcgtatctggacctataaaggtctagaaattgaaattgtcaggatcagcaccgttgcgcttgccggtgttgatggcggagatggcggtcatatcatcgactgataggttgaagtcgaagacctcgaagttctgcttgatacgctcggcatgagtggatttcggcagcacgacgataccgcgctggatgtgccagcgaatcaccacttgggcaggtgacttgccgtacttggcactgatctcggccaatactgggttgctcagcaggttgccgccggtaccgccgagcggactccaagcctcggttgcgatgcccttggcacgcagctggccaatgagctcttgattggtgaattgtggggaagactcaatctggtctacggcaggtaccatatcgctgtgggtcagcagctcatcaatatgatgcttttggaagttactgacgccaatggccttggcacggccagaggcataaatctcctgcaagtcatcccaggcctgctgccagccgtctgccggccagtgaatcagatacagatccacataatccacgcccaagcggtcgaggctttcttggaatgcatccttgccgtggcgtgcgcgaatatcgtcattccacagcttggtggtcaagaagaaatcgctgcgcggcacaccagcacggcgaataccttcacctactgaggcttcgttgcggtaaatcattgcggtatcgatatggcggtagccattctccaatgcagtctgcacggcattcaccgtggtatcgccatccggcgtctggaatacacccaaaccaacttgcggaataaccgtgccgttgttcaaagtaatcgttgattgaattgccatgctgcctcacaatcggtaattatgcttcatctcatattgtagaaaagtgtcacgccgataagcggtgtttcgctggcgaagaattgcgctgaaatacatcatcgtgaagagtaataaaacgattggcaatatgccgtttgatatccatattgctagtgatgtccatatgatgcgtgttttttttgtatgtaataagtttgcgtgtattatttcgactgtcagtgaacaaatgaaaggggttcccgtgggacgtgcagtcggcattgacctcggtactacctactccgcggttgcagtactagatgccgcggggggggggtgtcgtattacagaattctgagggagagaacacgactccttcagtagtattcttctcgacttcggacggcaaggacgagcccgtagtcggaactatggcaaagcatatggctgctacgtctccagacgatgtggttcagttcgtcaagaggcacatgggtgacccgaactggcgatttgattcctcatcaggtcagtcatacacggcggaggaagtctccgcaatcattcttaagcgactgaagcaggatgccgagcttgcgttgggcgagtcggttactgatgccgttatcactgttcctgcctatttcgatgatgctcggcgtactgcgacgaagcaggcaggcaagatggccggcttcaatgtcatgcgtgtgctgaacgagcccacggcagccgctatctcctatggattggacgacgagaaaaacggtaccattcttgtctatgatctgggcggcggcacatttgatgtgacggcgctgcgtgtcaaggatctgaacttcgaggtgcttggcaccgatggtgatcgtaatctgggcggctttgatttcgacaatgcgttgatgaagctgatcgccgatgacgttgctaagcagggtggcgaaggcctgctcaatgattatgaggcgaccgccgatctgcgagaaaaagctgagatggctaagcgctcgctgagcaatgttgctaaaaccaatgtgttcattaccttccaaggcaagaactacaaagtctctgtcagtcgaaaagacttcgaaaaggccaccggatcgttgctgaatcgcacacgcgaattggttgaggatgttcttgacgagaccaatctgacgtgggatggtatcgactatgtgctgctgatcggtggctccacccgtatgcctatggtgcgggaaatggttgagaaaatatcaggcaaaaccccggagaacaatgtcaacccggatgaggcagttgccttgggcgcatccatccaggcggctcttgaagttgcgaatggctccggttccgtagatgttgacgacagtaacacccccgtggtgccggctgcaggcaaggacatcgttattcaggatgtcacgtctcaggccttgggtacgttgacctacaatcctgagactgataccgaacgtaacacggtggttattccgcgtaatgctaaaattccgggatcgtattcagaggaattctcgacggtatcggacaaccagactgagatccgtgttcaggtcactcagggtgatgatcctgatccgcagttcgtggtcattttgggcgaaagcacgttgcgtattcccccgtatcccaagcattcgccgattcgtgtcacctaccattacgacattgatcagacggtgcagattgaggtgaccgatctggtgagcaatcagtcgctcggtacattcgaaatcgatcgagccgccaacctgaacgaggagcaggttgccgccgccaccgacaagattggcaatatgacggtcgaatagcgcggttattcatccgaacagtcaatagactgtccattcattattagagtaatagaacaagagggggggccattgtggctttcgtgaattattatgagctgctgaatatccagcagaccgccgatgaagaaaccatccgacaggcgatccgcaccactcgaaagcgtttccgccagctggagggctctccggatcttgaccagcgcagcatggctgaaaagaagatcgcccaaatcgctgaagcggagaagaccctgcttgatgccgcagcacgtcagcagtatgacgcgggattctctcagcaggccgctgctgctcagcaggccgctgctgctcagcaggccactaccggtgatttgctggatgacgcacgccagtattaccgcaatggtgatattcgtaatgctatgtatgcagccaaggaagccactcaggttcaccgtgaagatccggatgcatggtacttgcgggccaacatcgatgtcgaagcaggcgattatggcgatgctaatttctcggtgaatcaggcgctgaagttcgctcccgacgcaccgaagctgtatggtctgctgggtgagatcgccgatgctgagaaacgctacggggatgcagaacagtccttccgcaaggccgctgaccttgatccgcagaatggctactatgtgggccgaatcgcttgggcattgatggaccagcggaagaatgatgattccctcaacctcattcgtcaggccagcaagtccttcccgggcgatgagtatgtgaagcgaacccacatcaatctgctgctcacggatatttcatggaagcagagcaataacgctgatgccacggtgttcttctactcgaatccgaagcaggtgcagctcggtaaggaccgtctgcttgagattgactctctcggtgctatcaatgatcctgagctgaaggccaatgtggagaaggaacgtgcatccgtgatggctgctgccgctcgcaagttccgttggcccggtgtgggttatctggccggtcgtgtggtgctgtggtttgtgatcttcttcattattggcctggtcttcagcaggagcgagggtgtcgcaatgcttggcatccttgtcgaaactggtgttattggctacttcgcttacatcaagatgttcccctatggctggatggttaataaggaactcggcggtgaagcttccacgaagactggtctgcaatgagcgacgaccagcttaaagagctgacgcaggaagtggcaggtctgcgtgacctgttcctgcgtcgcctcgcagatgacaaaaccactaaacaactcgtccagtccgtgaatgctagtctgaccagacgcgatgccattgatcaatataaggtatttgcgccgatgatcaaggagctgctgctcgcggtggaccgtttgaagtccaatgaccccagcgcggatctcaaccagtccgtggctgatgagctggttactgtgctctcccgctacggcgtggagcagatcgacacagacggaatcgtggatcccaaggtccatgagatcgtcggattggaccctttgacggatggtgtacagcccgacaccatcgtcaaggtggtacgcacaggatatttgctgtccggcagcgtgctacgaccggctcaagtgattgtggcaagaaataagtaaagaggtttcgacatggcggcggtaacgttggctactctgcgtgatcgaattgcacggcagtgcgaggagctcaagcaggtccatgcccagtatctgggcgctatcgatactcgtgatgcacagatgacgttcactcaggaagcgcgtattcgcaaagcgaaagcggatgcgaagaagcagctcatggtggcaaagatacgtgcttctgatgcgataaccgccgccgtcgccgatgcctcgtctagggccaagaccctaattagtcctaaactagacaattccgcattgcgtgtggccgaatatgtgcaattggggcgattccttattgatggtcgtaaagccgacatcaatgacgacattaatatgccgctcatcgccccattgctcggccatggcaatatcgtagtcatcggcaacaatgcctctgcggacggttttgtgcgtgcgattatcgccaaagcgttgcagaacaccgagccaaatcagctgcagctcatcgcatacgatcctctgttgcagaatccgctggcacctttttccgctcttgcggaagaagatcagaacatggtccgtaccgtgcaggcatcaaacggtctgggcaatagtttcgatggaattttggatgaatgccgggagacggtacagcgcgtcggcaatatcatgatgggtgtggaaagcacgctggtgaactaccgaaaaaaggtaggcatgcccgttgagcagtacacgctggtgacgttatgcgacattgccaataaggatatacgagaagaagattaccggcgaatcatgacgctggtatctgaggcgccgcgatacggcattagttttattattcgtgtacttgatccaaggaatctgcctgaatggtgctctttggatgagatcaagtcaataggtaccagttttgacctcaccaaacatacaccgacgtggaacgtcagtgatacgttccccattgaactagaaaagatgtcggctgccgacgctttgaaggccgtggctgagatcgctgaaaaagcacatagccttaaactgccgattgtggacttcaatgaggtgcagcctcggcatgattggggcatgtctacggcgaagggcattaccttcgtgctgggtcgtgagggcatcgccaatgctgaaatcaccataggtgatgaacgatcacagaaacacaacattctcgtcaccggtgccgtaggacagggtaaatcgaacctgctcaaggtcatgatttatagcatgtgttctcggtattcaccggatgaactggaactgtatctacttgatttcaaggacggcgttacgctggcaccaatggcgccaagtgtgaactctcccgcgttcctgccgcatgcgagaattctgggtttgcaggccgaccagaacttcggtttcgcggtattggactacatgcgcaaggagattgaacgtcgttcgcgattgttcaaacagtatgatgtggacaacatcgcgaagtaccgcgcaaaatgcccgaatgagaagttgccgcgcatcgtggtcatcattgacgaattccagatgctgcttaacggtggcaacgacatccttgaccaagacgcggcgaagaaactggaagaagatgtacgactcggacgagcctatggcattcatgtcattctcgcttcacaaacgatttccggcattcaggctcttgccacgtcggcacaggggctgttcgctcagttcccgattcgcatcggtctgaagaactctcctgctgaagcccaggccacgtttggccagaataatctggcagcatcgcgcctgcactaccgtggtcaggccatcgtcaacttggattatggcgcaccggattccaaccgaacgatcatggtcgccatggccaaggacgatcagctggcgaatctgcagcagcaatggtatgagcgtatcaaaagcaccgtcaatgagccgatggtgttcgacgggaccaggccggcaaatcttgtacgtgatttggctgagcttaagcgtaaacggatacttgagggccccgttacacgtgcatatcttgggcggccggttgcggtcgacccacggccggtttcgttcaaaatcgatgacggcatgggacgcaatatcgcaatcatcggtggcggcgtatcgcccaacgctttggatgaggatcaggacaacaatcttggtattggtttggttgaatcgatgggcttgtcgctggccgcttcgactcctgccggcaaggcacgattcgtggtcatcgactgtctgattgaccgggatcgcgaagccaaccatgttgatgcatggctgcagaccatgaaggcactcggccatgatgtggaactggtcaagcggcgcgccgctattgattggatcgataaatccgatcagttgcttagcctgcatcaggaaaccgatcctccggtgtatgtgctggtgtttgcgcttgaacgatgcgggaatttggatcaggctcctgtggtaccggctgcggctgctccatcgatgagtagtggatcaactgacagcaatgcctggaattccacgaccaattctgcagatgaggattggggcaccaaagacgattcgaatgatgcgtggggttccttggacctttcggttacttcgtggaattcgccgtcgtctgattcccctgcaacgccaaaggagaaattgttccggttgttctccgctggatcgatggagaacatccacatgttcatctggtggtcgagcttcagcggctatacctcgttgatgcagccgggcttggctccgcaaggtgttttcgatggtaaagtactgctttttggcactagcgaattggccaaggacacttcctttgatggtcctatgacttcttggaacggcgaagataaccgagccgaattcaaggatgtcgaaagcatgactgcatcggtcaagattattccctatcagccgcttaacccacaacagttgcaggagctggtgaaggagatgcgccatggcaacgaataagatcgcctcataccagcggttggttgaggacatcaacgtcaagctcaacagcgcggcgcgtgtcaacaccgatgccgaacggcaaatggacgcgacattgaaaaaaatcgatgccgatgcacaatcacaacgtaaacaggcggtggcgcagcgtcaggaagcgcaatccgaatatcgcaagatagcggacatgctggcatctgatgcgtatcagtcggtcaacgtgcgtattcctccaatggtccggcccataaacacgagtacggatatttcggtgttggcagctaagcagcgcaatatttctgggcaaatcgtctcgctattgtcggcatttgttcgccagcaaaaagccgaggcagaagcagctgcagcgcaggccgttgccgcagctcgagcgagagcggcagcagccgaggcattggcgcgccgtcgtgcaacgatgaacaaaccggtgcctacgcccaagaaaaaaccgaatatcgcattgattgtgggtattgccattggtgtggctgtagtaatcggcattgcggttgcggccgtattgcagatataaagctagccagagaataacgattgtcctttatcaccaacaactattaaaaaaggagcacgatatggcatctcagcttgatcaggtaaagcagagcgtaagggtattggctaacaattccgataagatcggaaatcagcttgcgccgtttactcagaagtttgcgcaggagtctcagaaggtgattgcggccatcggcgataccgcgcagggcaccgataagcagatcgcgaatatcctgcaagccgcatcccaatcgctgcagcagacggttgctgcattgaagcaggtgaagcaggccggcgatcagtgggttggaagggcctgatattggcatttttgttggttggcatcctatacggaatgccaaccaacaaaggatggagtgattgttatgagcagcggttcgaatgaggcgctcagaatagccgcggagctgattgcactgcaaaaggatatcgtggggttgcaaaatcgcgtatctgatgtcattggcaatactgcgacattgaaggataaacagatagtgcaaaggcttcgagcggcatctgccgaactcggattgacagcttgcttgctgcagcaaatcaggatatagacatctttcatgtttgtatgatttgtagggggagcgaacatgatggaggcgattctatatgggtgaatatgcagagacactagatctcaataaattggaggaaccggcatacgtctggattggcaaggagttgcctgcatttttacgggatgatgacgacgacgctatcccgatgatagttgcattggaccgttttagagattttccgccatctttttcagatgttattcggtacatggctacccctcgcgaggaatcggagcttaagaactggctacgcaatcagcaggctcctgatgatttcattccatggttggtgcaggaaaaagcgattcttagaattatgcccaaagaacggctatctgactcatttgccggaatacatcttgagccatatggcaggcgcttgcctgaacaaggacaagagatgattcctcagcctacattgagcaatgtcatgatgtcctcaaatccggaacaggccgataaagaactgtcgcaaattatgactaatgttcttttttccagcccgtggcaggatctgcctacggtaattcgtcaggtggcttcgtcgttgcatattgatgagtcgaaagtatcggatacgactatggcttcactgccggagcttctcgctaatgattatgcctttttgctgttgatggagtagcggatgagcaaccttgccaatgcacatgcggattatgttgaaaaccaacaacgacagcataatcatcatcagttctttcgctgtgttgatgccttttccgaattctcatcgaaagtggatgagaaattcgagaatgcggataatttcttaggaggcaaagcggtagagcgttttggtgcgctaaccgtactcccttctctgctgggtaaagtgtgggatcttgctgttattcctacgggagacgatgataataatcttcaatccctgggagatatgtttggcgatttagagccggaccaaatcaaatccttttttgatggacttccagataatccaatgcttaaaccgctgaaaagtgatttatttaaaggctttattgtacagtgtgctgcaggaggtcacaaaccaagcgaattattctcgctgaagagttgcaaggatttcgtctcggaatctcttatcagcaaagatggtgtcttgcatagtctgattttgggcggagctatggctgttaacccattattgggcactggagtcatgatcgctacttttgcatataacgctggaagtgcgttattgagtctacggaagacatatgtggaacggaaagcagcgaaggggcagcaaaagcgattagcgaaaaacattgccagaatgaatgccgcaaccggccatggttatgattcccatttggatggtgaggccgcggctagagagtttatggacaaacttaatggcaaaaagttatctgcagaagagatcgccggtatccgcgcgtatcttgaggaaaaagaggctaatcgcgttggacagtatatttccggtgatttggacggaaaatcagccaaagaactgaatggttatcggctggctatgggcgtggctgcaggtgctgcaggtgccgccgccctgcaattccttatgaatcatggtggaatacaggccgctggcgaatcgttgctagaagttgcgggagacgtctcaggcgtgggagggggaggctcttccgctgttcccggtgtcgtcgaggttagcggttcagcctccgtgagaagcattaaaagcgctctgctggcaatcgccaaagaggtgcagaactaccaaggtcgactcaacacgtatgaaggagaaatcaccaagttgggcaatgcgttgcattcctatactcgaggtactaatgactccgacatatcggcggctttatcccaactgcagacggcacgcactaatctgagaacagtgagtcagaagtatttgcctcaagtcattcaactgactaaggaatacgccaccatccaactgtgagccgtgcggtgacggcatgatgggggctctcaccagaacgactgatgaaagcccccatttcatatatctactacgctcccgcattgagcaactgctcgagtaccggcttggctgcggagtagaaacggacatctggatatgttgtatccggcaaggaaattaccgcgtgactgcgttccaaagtagcggtcggattatcccgagtggagaaacgatcacctagaaccgctgttgcagctaaggaatcaaccgcgccgaaacagatacgcatctgacaagcatccatcagggctttcggcaaaccgtactgactgggctgctgcccagacagtacgacgatgataccggcctgtcggccggactcgatgatctcttgcaaaagaagtttgattgatttgattgcgtcaagatcctcctcggaaacatagccgtcgttgggatccggattgaacaggctgccgcattcatgaacgaacaacattactggtttgagacgcttgctggtgggcattgaccaatagtcgccattgggctgcaaccgcctgatgaggaacagccgagaatcgaccagctttctcaccgcttgcacctcgcgcaatatcgcgccgaagccttgagaacgagcagtgaattctttgaatgcgggtttgtatgcgtcaagataagctgtgttcttgcaatcgatgaatcgcacgaatgcatcagctcgcttcgccatcagaacggttgcgaacaacatatgtgttatctcgccattaccggccatgccggctgccgtcactccggagacgccttggaaagctagccgtaccggtttcccctccgggtcaagtccgcagtcatagctcaattcggaggcgttcacctgcggcacttgcgtgagcgtgtactgggagtttgaggctttcggaccattcttcgttggctgcgcggtatgacgagatgtcggggtggtgtgcgccgtacgagatgaagtggaggccggcgtgggctgagatggtgtgccatcaggccgggcaaagggatcccattgggaggctgccgggcgtgaggctgatttcggggtctgcgcggtatgcgaagcactggaattggcggcacgagacgcttttgatggaggtacccaatcgtcatcatcatccgtatcgtcatttccccagcccttgggcaacgatgatggtgctgtgctggatctgctcgcagaagatcgtttgggagttgggccggatgattcagctgcatgtggctgatgggatgttgaggaatccgagcatgacgtgcgtgggctttccgtatccgtagaagatttcgcacgcgaaggagaggagctccgcggtgggcgggatgtactgcttccggcagcacgtttgtttgatgacgtctttcgggagcgggagcctcgctgatcatctgacgaatcgccgccagtatgctgtcctttatcgcttttgctccgttcgctgcgagagcttccggcctttttgccgctgttcagctcatcgacgtccctatccgcatcaaaggtcggcttcggccatgcggattcgttcaccggagcctgagcgtcgatagctgggcaggtataaagcttggtcattgaggcaaggaacccttccagcgaggttctgggcacaaaacctcgattggcaggaagcattcgattgacgatagctaaaaatgacgaataggaatatgcgggaatgccgccgggccaagtgatgtcgctgtctagtgtggcttctcccgattcgccgggaaccagaacgacgaacgtgtcgatttgcagatcagagtagtgcggaagcaggtatttgttgaggttttcgcgtgcccagttcatgttcacggagaaaatatacggatcgtgagccactacgcgagccgcgggatagacgcagaacatcgccttgtctggaatcaacgtgtgatatgcgagaccggcacgataattctttacgtcgataagcaacaggtggttgtcgatgagcagcacgcagtcgatgtccgcgccaccatcatcgcgttgcccttcctgcgtagggcgggacaatgaccagaaagaaacacaacgatcgagaatgccgtcacgactaagtagtttggcgaatatctgctcgcctgcagcgccagaggcgacttgttgatgaccgaagtcgctctcgccaagaccggaaccgggcttgccgtagatacggcgcccgtggatgggaagggactttattgagtagaacttctttctttgttccgacgtgattcgtggcactagagagtcgtctatttgcggagaccgggaattgccttggatggtttgcagctcgtaacggctgatagcggcgggccatgccgcacgaatctcttcttccgtggcgcgtttgatgtattttgctcccgccccggccgatgtcggggtatatgggagagaggtggtgaaaggcgtatcctcgaacggcgaagagccatagggagagaatggccgctgcgcgtgtgagaacggcggttggctcttggtatcgccggatagaaaatcaaacaggcccatactcgctccttctcagggacacaatattttcagaatacatcgggatggtgcagggtggggaatgaaattcaattatggatgcaatgtgccggtttcactgccggaactgcggtatatgcggggcattggcgacgcgggagccaccacgttcgccagtaatgcgcgtcacactagaaatctcacgatacgggtgaacatgggcgttcctcgacgcttaggaccctcacattggtacgatggggctttatgagtgagaacatcatgcgaatcattgacctgcgtggtcagaaactgtcccgtgccgaactgctcgccgcgatgccgcgtgccgcaatgggtacttccgaagccaccgatctggtgcgtccgattctggacgatgtcaaggagcgcggcgccgctgccctgcgcgacttcgaggagaagttcgaccacgttcgtccgaagaacctgcgcgtgccggccgaagcgatccagaatgccctgaccacgctcgaccccgaagtgcgcgccgccatcgaggaatccgtgcgccgcgcccgcgccgtggcggccaaccaggtgccgaaggacttctacaccgatctggccgaaggcgctcgcgtcgccgaacgttggattccgatccagcgcgtcggcctgtatgtgcccggaggcaaggccgtctacccatcttccgtgattatgaacgccgtgccggctcaggccgcgggcgtcgaatccctggccatcgccaccccgcctgcgcgcgatgatgcggagggtctgccgaacaagaccattctcgccacctgcgccatcctcggcgtcgacgaggtgtacgcggtcggcggcgctcaggccatcgccatgttcgcctacggcgccaagggcagcgagccgcaggacggcgacgtgctgtgcgacccggtcgacaagatcaccggcccgggcaacatcttcgtggccaccgccaagtcgctcgtctccgcattcgtgggcatcgacgcggtcgccggcccgaccgaaatcggcatcatcgccgacaagaccgccaacccgagcctgctggcagccgacctgattggccaggccgaacacgatgagcttgccggctccgtgctgttcaccgactccaccggcatcgcggacaaggtacaggagaacctcaactatcgcgtgccgaagaccgagcacgccgaacgcgtccacacatccctgtccggcacccagtccgccattgtgctgaccgacggccttgaccagtcgatcgacgcggccaacgcctacgcggccgaacacctcgagatccagaccgaggatgcggatgcggtcgtcaagcgcatcaagaacgccggcgccatcttccgcggcccgttctccccggtgccgctgggcgactacatgtccggctccaaccacgtgctgcccaccggcggcaccgcccgcttcgccgcaggcctcggcgtgcacacgttcatgaagccggtcgaagtcatcgaatacgacgaggagggtctgaaggccctggccgcccgtatcaatgcgttcgccgtttccgaggacctgcccgcccacggcgagtgcgtgctctcccgcttcgtcaaggatccgtatgacaaggccaccctgcgcgagcaggagaagggagccggtctgcgatgagctcgattcccgaaaacctgccgctgcgcaacgacctgatcggtgaggagccgtacggcgctccccagctggacgtgccggtgtgcctgaacgtcaacgagaacccgtatgcgccggccccggccgtatgcgacaccatcgccaagcgtgtgcgtgaaatcgcccccacactcaaccgatacccggaccgtgagcacattgaattgcgtcaggcattctccgattacctggcccgtgaatccggtacccgtctggacgtggacgagctgtggggcgcgaacggctccaacgagatcatgctccagctgttccaggctttcggcggcccgggccgcaccgcactcggtgccgacccgacgtactccatgtacccggagtacgctcgcgacaccttcaccggttggaagctcgcccaccgcaacgccgacttcacgttgaacgtcgacaaggtgcttgaggccatcgccgaggtcaagccctcgatggtgctgctcaccagtccgaacaacccgaccggcaccccgttgccgatggaggatatcgagcgtattctcgccgcctgcgaaaccgccgaagtggccggcgcgggtgagggcgtgcacccgattctcgtcatcgatgaagcgtacgtggaattccgcaagcccggcaccccgagcgccgtgagcctgattaaggaccacccgaacctggccgtaagccgcaccatgagcaaggcctttgccttcgccggcgcgcgagtcggctacctagccgcatccaagggcatcatcgactgcgtgcgcatcgtacgtatgccgtaccacctgtccgccgtgacccaggccgccgcactggccgccttcgaacacaccgatgaacagctgagccgtgtcgagcatctgcgcgaaacccgcgaggccaccgccgcatggctcaaggaacagacctacaaggaccagccgcttgaagtggccgaatccggctcgaacttcctgctgttcggcgggcacttcgacaagcgcgaagccatcttcgacgagctcctgaagcgcggcgtactcatccgcgtggtcggaccggacggttggctgcgcgtgtgcatgggtaccgacgaggagatggaaaccttccgtaacgcccttgttgaagcgcttcgtatagtggaagcagcataagggacgtttctttccgattgcggcgagacccgaagcgattcgagtcccgccgcaatccaatatgacgaatcacacaggagacatgatggcaagaaccgcgcacatcgtccgcgaaaccagcgaatcacacatcgacctcgaactgaacctcgacggcaccggcaaaaccgatatcgatacatccgtgccgttctacaaccatatgatgaccgcgctcggcaagcattcgctgatcgacctgaccatccacgcccacggcgacaccgacatcgacgtgcaccacaccgtggaagatacggccatcgtgttcggcgaagctctgaagcgggccctcggcgacaagaaaggcatccgccgcttcgccgacgccaccgtgccgctcgacgaggcgctggccaaggccgtggtcgacatttccggccgcccgtactgcgtgtgcagcggcgagcccgaaggctacgaattctgcatgatcggcggccacttcaccggctctctggtccgccacgtcatggaatccatcgccttccacgccggcatctgcctgcacatgcaggtgctcgccggccgtgatccgcatcacatcgccgaagccgaattcaaggcgctggcccgtgcgctgcgcttcgccgtggaaattgacccgcgtgtagacggcgtgcccagcaccaagggagccctgtgatggccgacgacaagttcgatccggacgaatcgcacttctccgacgaggagcttgaggccgcgctcgccggattcgagaaagaattcgcggacgattcggcatccggcgatgccagtgataccagtgatgccgataaaacggcggacgctgcttcagcgaagtccgattccgacgcgaatgatgatacggctgataaggctgccgctgattccggccagcctatgaccgacgacgtcaccgggtcggtcgctgatgcggtgaatgaggccatggccgacgtggtcgacccctcgctcggcttcgacaacgaactcgctggactgttgggtaacaaggcgaaggtggcgctgatcgtcacccgtcttgcctccgccgaactgttggccgcgttctgccagctgtcggacatctccgccgcatgcgtcggtgccaatcagggggccgtcgcggtgctgaagaatctggacggcgacggcccggaagccgcagccaaggacctgaccaccgtggtatccggcatggccgtgattcttgcagtcaatcgtgccgacaagctcgaagtggccatgtacgtgcagggagaggccggacagagtttcgcgccgcccgtgctgttcacctccacaccgcgcttcgtcgaggacctgatgctcggcatcgtaaccctgaaccaactcaagacccaagggttcgaagtggtggattccgctggactcgaccatgaccaggcgatgcagattctcgccaaccataccaagcgtgggcgtggcggacgcggctcccgcatcgaatagacgccaaccaaccagtaggggataggagagaatatgaccacagcggttgttttcgattacggtttcggcaatgtacgttccatggtgcgtgcgctcgccaatcttggcgtcgacaccaccctcacctccgactaccggcagtcgttggaggccgacggtctggtcgtgccgggcgtgggcgcgttcgccgcatgcatggaaggactgaagaaggtcgacggcgaccgtgtgatctatgatcgcatccgcgccggccgcccggtgcttggcgtgtgcgtgggcgagcagatcatgttcgaacacggtctggagcacggggcccatgccgcgggcatcgggctgatcggcggaacggtgaacctgctggacgccgacgtggtgcctcacatgggatgggacacgatcgaggccgcccccgattcggtgctgctcaacggcgtggagaatgaacggttttacttcgtgcactcctacgccgcgatggaagtgaagccggcggatacgtcccgcttcgacattgatctgagcggtgcgcccgaacgcgtgagctggtgctcgtacggccggtcgcgtttcgtggccgcctacgaacacggcccgctgtccgccacgcaattccacccggaaaagtccggggacgctggctcccagctcctcaagaactggatcgccacgctgtaaaaagcatgaagctcccctctgacgagagagctcaaattatgtataagtaactgaagaaaggctcttcttatgtcgttgactctgctgcccgccgtcgatgtacgcgatggcaaggccgtgcgcctgcgccaaggcgaatccggttccgaaaccgattacggttcgccgtttgaggccgcccgtacctgggttgaggccggtgccgaatggattcacctggtcgaccttgatgccgctttcggtacgggcaacaatcgcgatcagctgcgtgagatcgttcatgagcttggcgaccgcgtgaacatcgaactgtccggcggcgtgcgcgatgacgcttcgttggacgcggcccttgaggccggtgccgcccgagtgaacatcggcaccgccgctttggagaacccggattggaccgcttcggtcatcaagaagtacggcgaccgtgtggctgttggtctggatgtgcgcggtcacacactggcggcgcgcggctggacgcgcgaaggcggcgacctgtttgagaccatgaagttccttgactccgtgggctgctcgcgttacgtggtcaccgacgtggccaaggacggcatgatgtccggcccgaacatccaactgctgcgtgaagtcgccgaacgcaccgacgccaaggtcacggcctccggtggtatctccaagctggacgatttgcgcgccatcaaggaactggccgagatcggcgtcgattccgccatcctcggcaagtcgttatacgcacgtgcgttcacgctccaggaagcgctcgcagtcgcgaagtaggcaaaggactcgccttagcgagactgttaagctacctttgctcagctatcgcttcactcaggcctcgcctacggacagcccaccgggctgtccgcttaacggctcagcaaggaaggtcgccggatttgaggagctttttgaagacggtgtagtcttcatcattctgttcggcgtagctgacggcgaacgaggcaatggcctgatcgaattcgtcggtgccacccatgtaattggcgatcgcgatcgaatcgccggtgcgggcgtgggcatgcgccaacgaccatgcgcacatgcgcgacagatcgctcaatcccgaagcgttgagattgtcgatatcaatcgaacccttgccattccacaactggcgcacgtaatagtcgcgcggtcggccatcctcggccataaagctcgaccaacccaacagcacatcggccgtattctgaatcagcttctgcccctgaaccacgcgctcaccgtgcgtggcgtacggcgacgcgccgcagtaatgctcgagcacggaatacgtggcctccttcatctgaatcatcatcggatcgtcgatatcacgcgcgatccacaccgacgtccacgcgcgctggcccaccgagcccacgcccaccaccttgcgggccgcgtcctgatagcgcaaatgatcgaacacccaacggcgatcgtcgtacagggaatgccggtagctctcgaacagcgtgtctatacgtgcctgcaacgcatccaagtcggcgtaatcatccagctgatatcggcaccagctcgggcggattggcggatggggtgagatgatcttcgctcatagtcactaccatagtgccgtgccggcatgggcccgaaccatgcctgacatgcggaccggggcatgttgatgaaatctcgcgactcgcaggtgacaaacagtgagatgttaacgcccctcgtaacacggttatggaacgataggcgactatggataaacagcaggagtttgcgctgcgcacggtcgaagaacgcgacgtgcgctttattcgtctgtggttcacggacgtgttgggaacactgaagtccgtggcgattgctccggccgaactggaagccgcgtttgaggagggtctcggcttcgacggttccgccatcgagggcatgacccgcgtgtccgaagacgacatgatcgttcaacccgatcccgcgacgttccagatcctgccgtggcgcggtggcccgcaaggtaccgcccgcatgttctgcgacattctgaccccagacggcgagccttcgctcggcgatccacgtcacgtgttgaagcgtacgctcgccaaggccaaggacaagggcttcacgttctacgtgcatccggaaatcgagttctacctgttcgaaagccaggacgactggtccaaggccccgaccccgatcgacgagggcggctacttcgaccatgtgccgcgcagcccaggcatggacttccgccgcgccaccgtgaacatgctcgagcaaatgggcatctcggtggaatactcgcaccatgaggcggggccaggccagaacgagatcgatctgcgatacgcggacgcgctcaccatggccgacaacatcatgacattccgtacggtggtcaaggagatttccttggagcgtggcattcacgccagcttcatgcccaagcccctggccgacgcgcctggttccggcatgcacacgcacctgagcctgttcgaaggcgattccaacgccttctacgaggccggtcaggagttcaacatgtccctgaccgcccgccagttcgccgccggcatcctgtaccatgcggccgaaatctgcgcggtcaccgaccagtacgtcaactcgtacaagcgcctgtggggcggcaatgaggcaccaagctacatctgctggggccacaacaaccgttccgcgctgctgcgcatcccgcagtacaagccgggcaagggcaactccgcgcgcatggagttccgtgcgctcgacccggtggccaacccataccttgcctactcggtgctgctggccgccggtctcgatggcatcgataagcagatgcagctgggcgaacccaccagtgatgacgtgtgggagctcaccgacggcgaacgtcaggctatgggcattcagccgctgccgcgctcgctggacgaggcgctgaagatcatggagaaatccgacttcgtggccgacgtgctcggcgaacacgccttcggctacttcctggacaacaagcaccaggaatgggaggagtacaaccagcaggtcacgccttacgagctgaagaagtatctgccgaagctgtaatcgcaagcgttgcacatgtgccgaaccctgtcgatgattggtcatcggcggggttttctatagcgtgtcgtgatggtgggtagcgggcagaggtgggaatagtgttgtcgctgagttgatacgaaaaacgattgacgtaaccgacgaatcagcttgtagtacgagcgagagcactcaagagagcacccatgacgaacacacctgcgaacaccgcgcgcaccgaccgcttcttcaatctgccggtcaccatcctgatcttcgccagcttcatgctgggcatgagcgaattcgtggtagtgggcatcctgccggacatcgcatccggacttaaggtctccgaagtgaccgtgggtaatctggtggccatcttcgcattcgtgtacgcgccctgcacgccgctcggatccgcattattcgcccgattcccgcgctttctcacctatctgacgttgatgggcgtgttcctcgtcggcaatatcctgtgcgccttcgcgccgaactatccggtgctgctcatcgcccgactgctcatcgcctcggtgtccggcacgctggtggccatctccatgaccttcgcgcccgacgtgaccaccgacaaataccgcaccaagttcattgcctgggtattctcgggtttctccatcgcctctgtggtcggcgtaccggccggcacttgggtggccaatactttcggctggcgtgtcacctttgccttggtttcggtgctcaccgccgtgctgatggcatcgatggcagtgtctctgccacgcaactcacatccggcgaagatcggtttcctgaggcaattccgtctgttcttcgaccgccgcatccagctcggcgtggcggatgtggtctttggcgcagccgcctcctacgtcttctacacgtatctctcgccgatcatgcgcgacgaaatcggtgtgcccgaacgctatatcagcgtcggcttggtggtctacggctgtgcctgcctgtggagcaacctgtacggaggcaagctggccgatcggggcaggggggtcgagccgctgacccacattcgaccgatctactgcgtgcaggccgtctgcctgtgcctgctggctttcgcctcgctggtgccggccggcggcgcactgctgctggtggcgcttggcatgctcatgtatctgcagaattccgcttcccaggtgctgtatatggatgtggcctaccaatcccatcccggttcggtgaatctggccgcctccctgaattccatgtcgttcaacatcggcatcgccatcggctccgcggtcggcggcctggtcaacgacctccttggcctgacctggctcggcccgttcggcgcgattttcgcgctgctcgcggtcggcaccacgaccctgctgcgtccgtacgtcagcccggtcggggaatgacgggtggcgtgacgcgcgggaacgaagggtttttcccgcatgtccccgcggcatgccttatccgccgattgccgtccattgataacctgctatccaaataaccgataaagccacagcatgtcatcctgctgcgaaaccttaatgttaggacaccggctgcagggggacccggctcacgggcgcccacctgcgcggattgatgattatcggcatgttcagcgtgaaaatggggatgacaatatgacggatgcgacggcgaaagccgcgccgaaggcggaaagacggcggcgcgttctccgttccggcgctcgctcatcgatagtggtcggcggcgccatcgtgctgttcttcgtgctgctggcgccgctggccgggccgttgtcggccatcaccggcaacgacccgtacgccgagcatcccgaggccttgggtgccgggtcggtgccggccggattcggcggcggcatcagtgcccggcactggttcggcgtcaccccgctgcgcggcgtcgacctgttctccatcgtggcgtacggctcacggatctcgctgggcatcggcgtcgtctcgtcggtcatctcgctggtcatcggcgtggcgctcgggctgctggccggctatttccccgggttggtcgatgcgctgatctcgcgcacgatggacgtcttcttcggcttcccgttcctgatcttcgcgatcgcgctgtcggcggtggtgccgcagggcttcccgaggccggtgctgctgacgctagtgctcggattcttcggatggcccggcatcgcgcgtcttgtccgggggcagacgctgacgctgagcaagcgcaatttcgccgtcgcgtccaaggtgatgggcgcctcgcctgcccatgtgctgtggcatcagatcctgccgaacctcatgccgctgctcatcgtcaacatcacgctgtcgattcccgggcgcatcggcgccgaggcgggcctgtcgttcctcggcgtcggcatgaacccgccgacgccctcatggggccggtccatctccgacgccgtgcagtgggccctggtcgacccgatgtatctgatcttcccgggcgccgccctgttcctgctgaccttcggcttcaacctgcttggcgatggcctgagcgacgccatcgacccgcgcaagggggtgcgtgcatgagaatcctgcaatacatcggcaagcgcgtggcgagctcgatcgtcgtcatcctgctcatcacgctggcgctgttcctgattttcttcctgctgccgaccaatccggcgcagctgtcgtgcggcaagccgtgcacgcccgagcagctgcagcgggtctccgccttcatgggcaccgataagccgtggtacgagcagatgggcaattacgtggcgggcatcttcgtcgggcgcaccttcggcagcggcggcggcgccgtggtctgctcggcaccatgcctcgggtattcgttccgtctcaacgaatcggtgagccagctgatcctcgaccgcttcccgatcaccgcgtcgatcgcggtcggcgcggccgtgctgtggctggtcatcggcgtggcgaccggcgtgtgggcggccctcaagcgcgatacgctgatcgaccgcacgctgctcgggctgtcgatcgtgggcgtttcggcaccgtcatacctgatcggcctgctgacggtgatcgccttttcgctggtgctgcagatattccccagcggcgggtacgtgaacttccacgacgaccctgtcggctggttcacgcatctgctgctgccgtggctggtgctggccgtgctcagcgccgccggctacaccagggtcacccgcacgcagatgattggcgagctgagccaggactacatccgcaccgcccactccaagggcgtgcccgaatcggtgatcatcttcaagcacgcgctgcgcaacgcgctgctgcccgtgatgaccatgttcggcctcgatctgggcgggctgctcggcggcgcggtgctcaccgagaaggtgttctcgatgcaggggctcggctcgctgctgctcgattccgtgtcgaacctcgacctgcaggtgctggttggcgcgacgatgttcgccgccgtgctggtcatcgtcgccaacctgatcgtggacatctgctacagcctgctcgaccccagggtcgcgctcggcacgaagtagtgcggctgcggccgcaacacgcgatacttgccggtctgctccacggaccggcaccgatagagaggaaaaccatcatgaagaacaacgcatggcgcgtattcgcggcgggggcttgtgccgcggtactggcgctgtccggctgcggcgcgtccaacgacaacgccgccaccggctcggcgagcggcaccaccgtcaagggcggcacgctgaacgtgctgctgtccagcacggagatggatctggacccggccaagagccagggtctgccgaccaccacgaacggcaacatcttccgccgcctgaccgcgtggaagatcaccgacaagggcgagacgaaggtcgtgcccgatctggccaccgacaccggcaagtcgagcgacgacggcaagacgtggacgtacacgctcaagaacgggctcaagttctccgacggcacgcccatcacctccaaggacgtcaagtacgggctggagcgttccttcgccgactcgctgaccggcggcctgagctaccacaagacgctgctcgagggcgcgcaggactaccacggcccgttcgacggccaggagctcagctccatcgagacgccgaacgacaagaccatcatcttccacctcaacgcgccgttcggcgactggccgtgggtcgtctcgctcgccgcgttcacccccgtgcccgacggcaagggcccggcgtccggctacggcaagctgccggtggcctccggcccgtacaaggtcgagtcgaacgaggccggcaagcaggccgtcttcgtgcgcaacacctactgggacaagaagaccgatccggtgcgcaccgcgggccccgacaagatcgtgttcaagatgggacaggacacctcggtggccgcccagtcgatcatgcagggcaccggtgaaggcaagaactcgttcctgtccggattcgtgccggccgcgcagctcgcgcaggcgcaggccaacccgaactacaagaagctgctgaccaccagcggcgacggcgcgctggaatacctcgccatcaacacccaacacgtgaagaacgcgaagattcgccaagcgctgcagtacgcggtcgacaagaaggcctaccagacggcttccggcggcgagatcgccggcaacttcgccaccacgctcattacgcccggcatcgagggccgcgaggactacgacctgtacaaggccgatccgaccggcgacgtggacaaggccaagcagctgatcaaggagtcgggcgagcaggccccgaccctcaagctcatcgccacctccgctcaggccgaaaccgcctcctcgatccagacgagcctcaagcgggccggcgtcaaggtggacatccagacactcaacgacgatgtgtattccgatacgctgaccaacgacaagggcgactacgatctggccatcagctcgtggcagcccgacttcccgtcgccctacgccaacatctccccgctgttcgactcctcgcagatcggccacggcaactacaacctggcccgttacgcgaacccgaaggtcgacgagctgatcaagaaggccaccgagaccatcgatcagaccgaggccggcaagatctgggccgaggccgacaagacgatcatggccgacgcgccggtcgtgccgctgatctattcgaagaacacgttcatccacggatcgaacgtgaccaacttcgtcatcggcaacttcccggcgtacccggactacacgcaggtctcgctcgccagcgcgaactgagccggcatccgcatccggcgcgcgccggcggcatggtccgctggcgcgcgcgccggacgcattccaacgcttgtgcatccaaggagcttccaatgagtgaaccacgcgcgatcgtgaccgtggacggtctggccgtcagcttcgacgagcgggaggtgacccacggcgtcagcctcaggctgttcccggggcgcatcaccgctctggtcggcgaatccggctccggcaagtcggtgacggcgatggcgctgccccgtctcgatccgtcggtggccagcgtgaagggccacgcgtacctcgacgacgcccttgtggatgacgggccggactccggtccgggcggcgacggcaaggacgccgccggccgcggcatcgatctgctggccgccgacgcgccgctgcaacgcatccgcggcgaatacatcggcacggtgttccaggaaccgtccaccgcgttcaatccggtgttcacgctcggcgtacaggtcgcggaatcgctcaaataccaccagaagcagctcagcgccgccgagcgcaaggccaaggtgctcgaacagctgcgcgaggtcgggctcgacgacgccgaacgcgtgtggtcgtcgtacccgcatgagctgtcgggcggccagctgcagcgcgtgatgatcgccatgacgatcatcaaccgacccaaggtactcatcgccgacgagccgaccaccgcgctcgacgtgaccacgcagaaggcgattctcgccctgatctcctcgctggcggtcgacctcgatctggccgtgctgctcatcacccacgacatgggcgtggtgtggcaggccgcgcaggacgtgtacgtgatgcacaacggcgtgatcgtcgagcaggggagcgtcgcgcaggtcttccgccacccgtccgacgactacacgcggatgctgctcgacgccgtgccgcgcctgcgcatcgacgagcatgcggcagacggcgaacgcatcacggaaagtgacgcgctcggcggcggcaggcgcatcacgcaggtgaacgacgtggccgtgtcgtacaaggccggcagcttcgccgtcaaggacatctcgttcgatctggtggccggcaggacccgcgcgctggtgggcgaatcgggagccggcaagaccacgatcgccaaggtgatctccggccagctcgcgccaacctcgggcacggtgctcatcgagggggaggatctcgccaaggcgcatggcaggcgcaagcgcgagattctgaagcatatgggctatgtgttccaggacagcggatcggcgctcaacccgcgcaagtccgtggcatggagcatcggcgagccgatgctcgtgcagggcgggctcagcgagacggaccggcgcaagcgcgtccttgaattgcttgatcaggtggagctgcccgccgatgtggccggccggttcccgcaccagctgtcgggcggccagcgccagcgcgtcggcatcgcgcgcgccttggcgctcaacccgtcgctgctcatcgccgacgagccgacgtcgtcgctggacgtgaccgtgcagcgcaaggtgctcgacctgctgcgccggctgcagcgcgagcacggtttcgcatgcctgttcatcacccatgacctgggcatcgtgcaggagatgtccgacgtgatcacggtgctgcgccacgggcgcgtcgtggagagcggggagaccggccgcgtgctcaaccatcccaaggccgagtacacgcgtaccctgctcgacgcctccccgaagatcgacctgtgagccgtgccgcccgtcatccggccggttctccggccgtgcggcggggcggcgacggcgcggatgacacctagccttaccgtggtttcggttttttgccgttcccgcccctatcggcgcgcggcaccgaaccagttggtgtatatgagggcgaagttgcggttgccgtagctggagcatgagtcgccctcgccgaacccggccgccagcgaggcgtcgttcggctggtagggcgtgtagatgtagagcagcgcggtcgccttgttctcgatgtacacgttggtgccgccgcacccggcatccgggtggtactggatgtagttcagcgcgttggcgtgatagccgtaggcgctttcatgcgccacgtagtattggtagcggtgcgccgccccgtacacctgtctgaagaagccggcataggccggatcgcagttcgcgttgtccgggcagctcagccccatggcggccttgtactggaagtccgtcggatcgacggccgtgaccaggtgctgctccttctgcatcacggtgagcagcaccttctggctgatgccgcacgcgcgcgccgacttgtcgatgatcgcggccgtggtctcctttctcgcgccctcgtacgccgcgcaatactcgttcgccgcctggtcctcggtgtcgaagatcatggttttcaggcaccgggaaccgctgcacgccgcgccctgcttgtcgaggaacgactggacctcggcctcgctcatcgcattggcgttgaagaactggccgtccgagatgatgtcgccgggattgaagtcgtattgctgcgtcagctgcagctggcgggcctcggcctcctgcacgtcgcgacgccactggacgacccgcacagtgcccacgaccagcgcgaccacgcatgcggccgccaccacggtgaccagcacagccgcgacgcgctgcgccaacccggcccgcttccaccagcgcgccgggctgagcggatacctgcgattgcgcgggcgtttgcccgggcgacgtttgcgattgccgcctgacacgccccgccccgcgacaatcacgttcgccctgccgcgcggattggccggcttgcgccgttgcgtcgtcgccatcgctacgccagtgccttcttgatgcgctgcaggctcaccggcttggcggtgccgagttcctgcgcccacagggacacgtagaattcctcgagcatccagcgggcggcggtcgcctgcttcatcagcgtctcgtggcgggggccggccggctccgccttggccttggccatcgccttgtcgaccagcgtgcgggcctcgtcggcctcccacgcccatcgcacgtcgcggttcttgtcggtcttcgccttggccaggcgcatgagatcggcctgcaggtatcgggagatgttcgccagcgcgtccgggggagcggcgccgacgaatccggggaacaccagcgtggcgatgtgctcgcgcaccgactgcagcaccgacagcatcggcaagtcggccttgccgccagtggccttgtcgacttcggcataagccttgagcacggcgatcacgtcatgcgccacctgatagacggtgtcctcgtacacttcgcgcacatcgagcaccgcattggccaacgcctcatcgtccgagagcctgtcgacattcggcatcagccgtttgaccgtggccagctgcaggtcttcgaccagatccttggtggacttgtacggagcagaagccagcatcaacgcctcggtacccagccagcgcgacgaaatgcgttcggccggcaaccgcagcgcatccaatgcgccacgccagagcatcgtggcccgggactcggtggtggcacccgccttatgcaacaggttcgcctgactgaccagcttgccctgttctccagcctgatcggcctgcttcttgaccatttgacgggccgacgcctccgcctgcgcggcgaacttgcgttgcagcgccttcagatccttggacacactcagcaccttgacggggccgcgtgcatgccggcgtccacgagggtgcttgccggccggcagttgctgctccaccgagaacgtgaccctgagatacggggaaagacgctcgaccagttccggccccaacacttcgggatgaatctgcgcacccttggtggcgatggccgccttggtgaacacatgtgccagatcgggccagccaacggtcgtgccatcctcatccaccggcggcagattcggcttctgctgcgagcccgagcccggcagatccgggtaatgctcgtcgatccagtcacgaatcgcacgcgcggcatccggggccggcacgaactggacgcgcagctgcttgggcagcgccttgatcatcgacagaatcagctcatccaacaggcccggcacattccatgtgaactggtcgggcgtgatacgcgagagcgccttcaacggcacatgcacggtgacgccgtcggccgggtcggccggatcgtatacgtagctcaaacgcaggtcgatgggttggccgtccgatccggtcgtatgccaatggtcggggtaatcgtccagactcaccgaatcgctggatgccagacgctccaccttggccgggtcgaaatcaagcagattcggctgacggtcatgctcggacttccaccatttcgccagatcggccacgctggtcacatcgttgggaatgaccgcgttgtagaagtcgaacagatcctcgtcggacacggtgtccgccagctggcgggtgcggctcgcgtcatcggcggcatcctcgagaatgtcacggtttttgcccacaaagtcgtcgtaactgaagcgctgctgaatatcgccctcgaccagaccctggcgaatcaggaagtcgcgcgcctcaagcggattgatgcgtccccactgcacggcacggtcctgtacgatcggcagaccatacagcagcacgcgcgcggtggccacagccgagccacgcgaacccgaccagtgcggctccgcatacgtggtgcgggtcaattggccggccaacggttcggcccacgccgggtcgatggccgccgaatagcgggcccacaggcgagaggtctccaccagttcggtgctcatcacccatgacggggtcttcttggccacggcggaggcggggaacagggcgaaacgggtgccgcgcgcgccctgataatcgttcttcgactgcttctgggcgcgtttcatcgcacgggcgcgcgccgcaccggtcagccccgcgaaatcggaggccttgggctcacgcaccacctgcatgcccatcatcgacagcaatccggcgagcatcgacttgtggatgccatccgcatcccacgagcagcacagcgaatgcgcggcctgctgattcaacggcagctggcgaatctccaagcctgggcgggaggcgggcaacgggtcgccgaccttgaacttcagctccttgcacatctggcgtagctgggagacgagatctttccactggcgtatcctcagccagctgagatactcggttttgcagatacggcgcagcgcgttgttgctcgggtcgccgtccgcttggaacacgcgatcccagatgttcagggccgtcaggaagtcggaggtctcatccgcatatcggttgtggatacggtcggcatcctcacgcttgtcgtccgggcgttcacgtgggtcctgcaagctcaggaacgccacgaccacgagcacctgggccagaagattcggcgaaccggttttcgcggcctcgataaccatacgtcccagacgcacgtcgatggggatgcgcgccagctgacggccggtatgggtgagcgtcacctcgccgcgctttcggccgatggccttgagctcggtgagctcattgaaaccgtccgacacggccttcatatccggcggatcgatgaacccgaagttcgtgacgtcctcggccgtgcgggccacgcccaccgacagcatgtgaagcaccacggcacccagcgaggtacgcaggatttccggctcggtgaagcgcggtcgggtctcgtaatcctcacgcgaatacaggcggatcgcgatgccgtcggccacgcggccgcatcggccggacctctggtcggcactggcctggctgatcggctcgatcggcagacgctggacctttgcggtcttcgaataccgggagatacgggcggaaccggggtccaccacgtagcggataccgggcacggtcagcgaggtctcagccacattggtggcgatgacgatgcgctgatgcaaatgcgattcgaacaccttgtgctggtcggcggcggacaatcgcgcgaacagcggcatgatctcgatggcgtccggtcggcgcatgtcgtcggcgcgcggaccgtaatgatgccgcagtgcggcctcgaactcgtggatgtcgcgctcgccggaagcgaagaccagaatatcgcggggaccgcgctcatgggaggagtggatcaccagttcggcgcaggctcgagccacggccgtgggcatatcggtgatgccgtcatcggcataggagtcgccggaccggccgcggggccggtcggaatcggattccgcgatggcgctggccagctcgtcgtaatcggcgtcgccggggcgggcgcccaccgcgaatcccggcacttcgcgcatcaacgcgggcgcggtgccaagcggctcatagaccacctgcacggggaaggtgcggccggaaacctcgattaccggcaccttctcatgcaaggcgtgctcgaaatgctcctggaacttgaccgaatcgatggtcgcggaggtgatgatgagcttcagatcgcggcgctgaggcagcagtgccgtcagatagccgagcagaaagtcgatgttaagactgcgctcatgcgcctcgtcgatgatgatcgtatcgtattgggtgagtttcggatcgcgctggatctgggcgagcagaataccgtcggtcacgactctcaatcgcgtgctgggcgagctttcgtcggtgaaacgcacctgatagccgacctcgtcaccgagcttcacgcccatctccgaggcgatacgttcggccaccgtgcgcgcggcgatacggcgaggctgggtgtgcacgatctgcttgccgtgcgtgccacggccaagctcaagcaggatcttcggcagctgtgtggttttgcccgaaccggtctggccggacacaataacgacttgggaacgtttgaccgcgctggctatctcatcacgcgcggcagatacgggaagttctgcaggatactcatatttcatgacgaacttcaatgatacggaagcccttggagctcgcgtatttgctcgcagtgaacccctcgccgagcgcatcgtccagccaggggatcagcgaatcggagccgagattcttctgcactacgagataggcggcgccgcccaccttgagcttcggcagccaagccataagcaatgtatgcagcgcttccttgccgactcgaatcggtggattcgaccaaatcgcatcaaacgtgaggtcgcccggcaccgtctcgcagaacgccggctggttctcggcgggcaggggagtgctggactcgtccacctgagccgtatgaatgttcgtgcggccgttcgcctgtgcgttggcatgggtcaggtccagcgcgcgctcgttgacatccaccgcccacacgttcgcttcgggcgactcaaacgccaatgtcagggcgatagggccccagccgcagcccaaatccaggaaatcgccggtaagcggcggctcgggcgcatgcttcagcaataccgacgtaccgaggtccacgcgcgagccggagaacacgccgttcgacacctgagcggtcgcctcatggccgcgcaacgttacgttcaatgtgcggcgcacatccttcgacgcgggttccgcagagaaatactgttctgccatggtcgctccatttctgcgggattcgccgctctcgtatgccgacctgtatcagccggcctatgccggtacgtgccgatctatgccagcatgtcacctcatgtgatgataataaaggaccatagaagaatcgtgaaccattccaaccaaacgaggcgcacttgaccgacaacacccagtacaccgacatcgaccgcggcaacaacgacgttacccctgaaggtgtgctggccgggcagtccgaagtgctgctcgacgacagccagcgcgcgaccggctggcacgaggacgccaaccaggaatgggaggagcgcgaggcccgcaacgagctcaagcatgtcgccggtctcggcgagctgcaggacgtcaccgaagtcgaataccgcaaggtgcgtctggaacgtgtggtgctcgtcggcgtctggtcgtccgccgtcaccacgcaagccaaggccgaggaatcgttgagggagttggcggcgctcgccgaaaccgccggtgcggtggtatgcgatggtttgctgcagcatcgctccaagccggatgcagccacgtacgttggttccggcaaagccaaggagattgccgacatcgtggcgcgtgaggaagccgatacgattatcgtggacgacgacctgccgccgtcacagcgccgtgcattggaggacgcagccaaagtcaaggtggtggatcgcaccgcggtgattctggacatcttcgcccagcacgccacctcgcgtgaaggtaaggcgcaggtggagttggcgcagctcgaatacatgctgccccgactgcgtggttggggtggttcgctgtcccgtcaggccggcggtcgcgcggcaggcgcggatgcgggcatcggatcgcgaggcccgggcgagaccaaaatcgaaatggaccgtcgtgtaattcgcacgcgtatcgccagactgcgccgtcagattcgtgagatggctccggcacgtgaggtcaagcgcggttcacgccgtcgcttcggcctgcccacagtggccgtggtcggctacacgaacgccggcaaatcctcgttgaccaaccgtctgaccggttcggccgaactggtggaaaacgcgctgttcgccacattggacacggccgtgcgccgcgccaaaacccgcgacggacgcgcttacgcctacgtggacacggtcggcttcgtgcgccgcctgcccacccagctgatcgaggcgttcaaatccaccctggaagaggtggccgaggccgacgtgatcctgcacgtggtcgatggctcccaccctgacccgttctctcaggtcgacgcggtcaatgacgtgttggcggacatcgaaggcacggcctcgattccgcgtattctcgtattcaacaaggccgatcaggcggacgaggcgacacgtgaacgactcgccgcactgcagccggatgcgttcatcgtctccgcctataccggtgagggattggacgagctgcgtaccgcggtcgaaagtctgctgccggtcccgcatgtgcatgtcaacgctctgctgccgtataccgctggctccctgatctctcgtgtacgcgaatacggcaaggtggacaaggtggagtaccgcgatgatggcatacagcttgaagcggacgttgacgcccatcttgccgctcaggtggtcgaacagtccattgactaacgtgataaacatcacagtttgtttgtgagcgctaacaaccgttggaaacattaccataccgttatcagacagggtggtgtgctggtagcaaaacgtcttagcgggtttatagagtgaaaaccgttagttacaaggcctgccattcatcagcagaccgcctttgaagagaggttcatccatcatggcggaaactaccgttaagcccacgaagcttgctgttattggtgccggtgccgttggctccaccctcgccttcgccgctgcccagcgtggcgtcgctcgcgagatcgtgcttgaagacatcgccaaggagcgcgtggaagccgaagtgctcgacatgcagcacggctccagcttctacccgaccgtgtccatcgacggttccgacgatcctgagatctgccgcgacgccgacatggtcgtcatcaccgctggtccgcgtcagaagccgggtcagtctcgtcttgagctcgttggcgctaccgtcaacatcctcaaggccatcatgccgaacttggtcaaggtggctccgaacgccatctacatgctcatcaccaacccggtcgacatcgctacccacgtggctcagaagctcaccggtctgcccgagaaccaggtcttcggttccggcaccaacctggactccgctcgtctgcgcttcctgattgcccagcagaccggcgtcaacgtcaagaacgtgcacgcctacatcgccggcgagcacggcgactccgaagtcccgctgtgggagtccgccaccatcggtggtgtccccatgtgcgactggaccccgctgcccggccacgatccgctcgacgccgccaagcgcgaggagatccatcaggaagtcaagaacgccgcttacaagatcatcaacggtaagggtgccaccaactacgccatcggcatgtccggcgtcgacatcatcgaagccgtcctgcacgacaccaaccgcatcctgcccgtgagctccatgctcaaggacttccacggcatctccgacatctgcatgtccgtgccgaccctcctcaaccgtcagggcgtcaacaacaccatcaacaccccggtctccgacaaggagctcgccgctctgaagcgctccgccgagacgctgaaggaaaccgccgcccagttcggcttctgataaaaaatcgctgtacggagcgcctttcacaccgcacaaggttcgaactacctttgtaggccttcaccttgtgcggcacgaaaaatcgcacacgtacagcgattttttataccctgctgaatgcttccagagggagcattttttattcgtggaattcgttggaggagggggagctatagccctcgggctcaagctggaaggtggtgtgggggaccgagaccgggaagtgctcgcgcaggcaatcctgcagttgggtgaggattgcggcggcatcttccatggtgaggtctttgtcgactaccacgtgggccataagaatcggcatgtcggtggacaccgtgctggcatggaggtcatgcacggcaagcacatgcggcacgtcttccagatgctcgcgtaccttatcgagatcaagaccatccggtgtttcctccagcagcaccttgaccgcgttgtgcagcagcttgatggcgcgcggaatcatcatcagtgcgatgacggcaccggccacggcgtcgaagccattccatccggtggagatcattaccagggcagaggccaccacagacaccgagccaagtgcgtcgttcattacctcgaggaacgcggccttcatgttcatgttgtcttcgcgctgcgaggcaaggatgaagatcgagatgatatttgcgacaagacccagaatgcctacgaacagcagcaagccgatatcgtcgatttccgctttggagccgccgaacagacgcatgccggcctctaccaacgcatagatgccgacgataagcaatactacggcgcccgcggcagcggtgagcacctcaagcctggcccagccccaagtacgagtgttgttgggcttgcggcgcatcagtatggcggtgattgtggatgccaccagcacggacatgtcggtgagcatatgaccggcatccaccagcagggccagtgagccggttaagacggccgacaccacttcgatgaggaagaccgaaccagtgacggtcaacgtggcaatcagcctgcgctggtgcgcggcagggtttacggatgtggatggtgcgggtgtatgggtatgggccatgtgtactccttcgctctatcgagttgaaaccgcttctcaataccatttgcgatatggtctgaatacgacgaaaccccggcgcgaggccggggtttcgtaagcagtgtgcgactatagcacgaccagcgcgattcagcgcacgctgatcagctggtggcgaacaggctataatttgcgcagtacggtgaccaccttgcccataatcgtggcatgtgtgccgtcgatgggcgagtatgcggggttgtgcggcatcagccagacatggccgttttccttgcggaaggtcttcaccgtggcctcgtcatccaacagagcggcgacgatatctccgttgacggcggaattctgttcgcgcaccaccacatagtcgccatcgcagatagcggcatccaccatggaatcaccgtggacttccagcatgaacagggtgccggagccggtcagccgttcaggcagacgcatgacgtcgtccacatgctgttcggcggtaatcggcacgccggcggcaatacggccaacgagcggtacgtcatgtgattcggcaatggcttcggcggggaattggtatatctccgccacattgctggcgctggttgcctcttcgctggcttgtgatggcttttcggcattcggggcggatcctgccatcacctcgatggcgcgacccttgttcgcgttcatgcgaatgaagcccttgtcttccaaaacttgtagctgatgcttgaccgaagacggacttttgagcccggcggcatttccgatctcccggaaagagggagcaaagccttgttcgtcgatatgcgtgcgaatggcgtccaacactttgcgctggcggtcggtcagggtggactcgtccggcttctgcttgggggagaggggaatggtgctcacgtcagggctcctttcgttatgtcaccagcataacgtgttgttcgtgtgaaatcaaacatctgttcgagcttcgacttgaccgtgtcgaacatttgtgccattataagaacagttgttcgatagaacatctgttcgagagaggtggtcgtgatgactggttcaatggtgatggccccggcccgtagcgcacgtgtagctatgcagcatgctggaacgtcccgccggaatgtgcgtgggcggattatcgcagtgatgatcgccttggcgctggcctggtgtggtttcggcgcgcttaccgctcagcgggcccaatcagatacgggtgccacgcaggtgaccagctatatcgtgcggccgggggatacgctctggtcatatgcttcggctattacacctgctggccatgatgtatcggaaacagtggatgagctgattacgctgaacaatctcgagtccggaacattgcaggccgggcagcgcattattgttccggttgagtaaatgaaacccgagcggcatggtttttccgcccgtacacgttattctggagagcatgcattgccctttttgccagaaccccgacaccaaagttattgatacgcgcattagcgatgacggtcattccatccgtcggcgtcgcgtatgcccgaaatgcaacaagcgttttaccacggtggaaaccagtatgctgctggtcactaaacgttcgggtggcgtggagccattcagcagagacaaagtgatttccggcgtacgtaaagcctgccaggggcggccggtcagagaagaggatctgaagctgctgggacagaaagtcgaagaggatcttcgctcccgaggccttgccgaagtcacctcagatgaagtgggcaaagccatcctgaaaccgttgcgtgacttggatgtggtggcgtaccttcgattcgcgagtgtgtaccagaactttgcaggtctggaggatttccaaagcgccattgatggtttgcgtgaataatatgcgaatgccatgcaccgtgatatgcgagtgattcgcaaaccatggtgcgaaccaatcatgaagccctgcacttatgaaagagacccgtcagcgacgggtctctttcatatcaatcgaggatgagctgcgtcagctgatgacacgcatgcgaacggtgccctcgatgttgcgtagtgcttcaagcgtggcggcgctgggcttctgagccacgtcggtgaccacatagccaagttcgccttcggtggccaacgactggaaggaaacgttgatgttctcttcgccgagcacgcgattgacatgagccagcacaccaggaagattgtcgtgcagatgggcgatacggcacacgcccttgcgttcacctaggttgatctgcggtaggttcacggacaatgaggtagaacccttgaaccagtaatcctcaagacgctgagagacgaaatggccgatggattcctgagcctccaaggtggagccgccaatatgaggagtcagaatcatattgtcttcgttggccagtgaggtctcgaacggatctccgctcttcttcggctcaacggggaacacgtcgaccgccgcgccagacagatggccggaatcgaggtgctgcttcagagctcccagatcggcgacgaaaccgcgcgaaaggttaatgaaaatcgcgtcctgcttcatgtgggcgaattggtcttcgccgaagaagccggtgttcgacttgcggccatccacgtgcagggtcacggcatcggactgttccagcagttcgttgagggtatcgcaacggtgggcgttgcccagtgccagtttctcctcaatgtcgtagaacaccacgcgcatgccgagggcctcggccagtaccgacagctgggagccgatgttgccgtagccgatgatgccaagggtcttgccgcgcacttcatgcgagccggaagcggacttgtcccacaggccatgcttgatgtgatgcgtgtgtgcgggaatgcggcgcatcaagcagatgatgtcgcaaatcaccaattccaccacggaacgggtgttggagtagggggcgttgaacacggcgatgccacgcttgccggcatgtgccagatcgacctgattggtgccgatgcagaagcagccgatggcgcttagcgtaggacgcgcatccagcacgcgggctgtgacgttggtcttggagcgtacgcccaccaagtccacgccatccagcgcgtcgatgagttcgtcctcgctcagggctcccttcatggtctcgacttcgaaaccgtgatcacgcagcgatttggccgcgtcggggtgaatgttttccaataacagtgctttgggcatgcttcataccttagatgttcagggacttttcgtccgttcttgtccgaactataaccagtttctgggtcggcctggtcattgccacgtacaggtccgaggcggcgaccaggcggctcggcgcgtcatcctcgatgagaccgggctcgaccaccacgacggcatcgaactccagacccttgaccgtttcggtgccgcagacgctgatttgctcatcccattcgggctgctcgatgagccttgcgtattcggccgggtcaagaacggcggccagtttgcggcgcacggcgtcgcgcaccggggcgatgagatcatccggacagatgacggcgatgcggccggtgccgtctgccgaaacgaattgttcggcaagctgcgccgcctgctcggccgtcgtttccagcaaggacgacatgtcgggcaccacattgcgggacaccgaatcggggatggtgcgcaccgcattgaccgtggagatgtagaggccttccttctcggcaaatcgtgaggcgagttcggaaacttcctgcggattacggtagttgatggtcaactcgttcagatcccagtggctttcgccgaacaggcggttcatcgatttgctccagcgtcgggtgccacccagcgccgaggtctgcgccacatcgcccacgatggtgaacgagcgggaggggcaacggcggatcaacatacgccagtccatggcggtcagttcctgcgcttcgtcgaccacgatgtgcccgtaggtccattcacggtcggccgcggcccgctgcgcggtcagctcggcgtcgtccccgttcatctggtcgagcagcatctgactggagacgatgcctccacccagaccggtcgcggccagcgtgtctttggcatactgctcttcggcggcacgacgtgcgtcggcggcggactggcgggccaccgtcttgggatcggggcccagcatatccatcgcttcgtcgagcagcggaatatcggagcgggtcagcggggagcccttggggcgggcaagtgccgcgatgtcgttgtcggtcagccaaccagccagagacttcagacgttcgggatgggcgaacagctgatcgatgagccatggggcggtcatcggcagccagcacaggttcagggtcttgcgcacctgctcgttcatacgcagcaacgacatcgcgcggttcagctccgcctgatccggcgtgtaatcaagctgttcggcataacggttctgcatgctggtcagcatcgaacggataaaggtctcgcgggccttgttatgaggttgccgggtgcgcttcgcgtccgcctgcgcctgctcgatatcagtggccagcattggtacctgaatgccgctaatggttactgtcggcagaacagcgggaacacgcacgcgcgcggcgatggcattggccactacggaggtcatgcgtcgatcgcccttgagcttggctgcataaggggagtcgaccgccgtggcggtgatgccgggaatcagatcgctgatggtgcgtgagaccacgccggtctcgcccaaggagggcagcacctgatcgatgtagtgcaggaacgccgagctggggccaacaaccagcacgccggaacgttccagcgtgcgccggtgcgtgtacagcaggtaggcggcgcgatggagcgccacggccgtcttgccggtgccgggaccgccctgcaccaccacggcacgattcatgtcggagcggatgatgcggtcctgctcggcctgaatggtggccacgatatcggtcatcttgccggtgcggcgtgagctcagcgaagccagcagcgcaccctcgccggtcaacgtgccggcggaagacgcctggccgacttggtcggaatgcacgtcgagcacctcatcctcaacgcccacgacttcgcggaaactcaaggtgatatgcctgcgcatcacgatgtcgccgtgattggagggggtcgcctcatagaaaggacgtgcggcttcggcacgccagtcggtcagaatcggctcatggtccgggctcgacaggccgatgcggccgatgtaatgacggtcgccgttcttggcgtcgagacgaccaaacaccagccgatcctcaacgctgcgcaattgcgtgaggcggttttcgtacattgtggcaaaggagtctcgttcgctgcgttgcgtgggggatccgtgggagccggcggcgcgtacggtgtccaggcgttgccacatttcggctcgcagatcatccaatcgtccataggcgcgatcgacggcctgctgctcctcatgcagctgggaggcgtaactcgacatgctgttctcttcgttccatttccgtggggcagaaaaaacttaaggcattcaaatttaccgcacaccccctacgtcagtgatgcggacaacccggaataggtgaattcagcgtgaattcgccatgctgctcggtcggtggagtgcgcaacgtggattggatgtgcggagcgcccattcgtgcgacagtcgtggccgacacgcgcaatccatcggtaattgccctaaaagggtgagcaaatcgtgcatgagtggggagaaatggggaatcgtggggtagagtggtgaaccagttggccgaagtgtatcccacgtaacgatgaaggaggtggagccatggttgccgatcagacgattcgcgacgctgatgccaacgcacaaggctccaccactatggctgatctcatggctggtctgccgccgctgcttctcggcacatatacgccgaagatcgacgccaaaggccgtatggcgctcccggccaaattccgctcccagctggggcagggcctggtcatggcccgaggccaggaacggtgcgtgtacctgctgccgttcgatgaatttcgccgtatcgcctcgcagattcagcgtgtgtcggtgggaaacaaagccgcccgcgaatacctgcgtgtgttcctttccggtgccgtcgatcagcagccggacaagcagggccgcgtgctggtgccgcagatgctgcgcgattacgccaatctgggttccgacgtcgtggtgatcggcgttggcacccgtgccgaactgtggaataaggacacgtgggagtcctacctcgccgagaaggaagagggatattccgatattgctgacgatgtgttgccggaggtggaattctgatggttgatgtggcgaatattcatctgccggtattgctggacgattgcgtgaacctgatggcgcctgccctggaacatgagaacgccatcgcagcggattgcaccctgggccttgccggccattccatcgccttcctcaaagccgcgccgcaggctcggctcatcggcattgaccgtgacagtgaagcgctggggctggccaccgaacgcatggaacgggaggggctcgccgatcgattcatcccggtgcatgccgccttcgatcagctcgatcaggtgttgacggaccgaggcatagaacgtgtggacgccgtattcatggatctgggattatccagcctgcagatcgacgaaaccgatcgtggcttctcctattcgcatgatgcgccgctggatatgcgcatggacgtcagccagccgttgacggccgaacggattcttgccacctatgatgcggcggaactggtccgtatattcaaggaatacggtgaagagcgtttctcgcgtcagatcgcccgcgccatcgtggcacgtcgagacaaggagccgtttaccaccaccgcacagctcaaccgtctggtcgatgaagtggtgccgcaagcccaccgcccggcgggcaatcccgccaaacgcgtcttccaggcgttgcgcattgaagtcaacggcgaattggacaagctcgcctccacattgccgcaagccgcgaaccgactgcatgtcgggggacgactggtggtggagtcctatcattcgctcgaagacaaaaccgtcaaatcgttcatggcacaagggctgcgagtggatgttccggctggtctgcctatcataccgccggatgcccaaccgtttttcacggatctcacgcgaggtgccatcaaggccgacgaacatgaaatcgcagccaacccgagatcggcttcggtgcggttgcgggcggtggaagtcagccgtgagattccgtcacgatggaggaaacgctttacgcaaaccgcgcagggcctgaatgacgtcaagatacaaggctccgcgtctccgggcagagccaaaaacacagcgcgaattcgtacaaggaggggataacggcatatggcaaccgcacgtaacattcgatcgaacgcggctccggcctcgaaccgaccgcacaccaagcatcagtcctcctcccgacctgagctgcgggtggtctccaacccgcgtggagacgagcggggcaatgtcgtcggacgggtcatcgaatggaccagaacaagaagcgcaccgctggtgcacgtggccatcgcagtgatcttcctcgtcggcaccttgttcggcgcgctgatgttgcgtacccagatggtgcagaactcgtttgaggcggcacagatcgaaaccaatatcaacagacttacccaagatgtcgaagacgatcaggccaaactcgatcaattagtcgcgaacctgcccgacaaggccagcgacatgggcatggtcccgcagcagggatcagtgtccatcgacttaagcggataccagtccaacaaaggcggaacccagtgaacaccattcgtcgcatcgtagagttcgccaaggtcaagaccttcgcgttcaaatgcattgccatcggcgccgcattggcgttggtggcgtcggcatgcgtgattcagctggcctccacccagctcatcggcggccgtcaaaccgcacaagcggccacggctaaccgcaccctgaccgtgacgttgagcgccaagcgtgggcgtatcctcgacgccaacggctccgtgctcgctcaaagcgtggagcgttatactatcgtcgccaatccggaggctgcacaggagttcgagccgattacttgcaatgacaacacccgtgattactgccacgaaattgacggcaaacccgtgggtgctaccggagcggcggccgtgggccgactgctggccaaagtcctggatatgaacgccatggaactgggcgctgatctgtccggtaccgggcagtatgtgattctgaagaaagacgtgaccccacaggtcaagcgcagcatcgaggcgttgcacctgggcggtattgtctggggtgagctgagcagtgaaagactgtatgcggatggcgatctcatgggcgcgctgcttggcggcgtgaacgacaacggcgatggtgtcgccggcatcgagcaggtcgagaacaagacgcttaccggaaccgatggccatgaaacctaccagcgtggtaatggcggcgaagagattcccggcaccatgaccgaatcggtggcggccaaaaatggcgacgatgtcaccctgaccattgaccgtgatgtgcaatggtatgtcaaaaaggccttgaaggaggccgaatccaagtatggcgcagcgtgggcgatcgccgtggtgcaggatgttcagagcggggagattctcgcactggccgatagcgatgaagtacaggctggtaccgatgcggcgaagatgagcccgtctcgggccgtgtctgaaaccttcgagcctggttcggtgggcaaggtcatctccatgtccggctatctgcagacgggactgcataagatgagcgatcaattgtcggtcccggaccacatcacacagaagggccagacctacaaggactcattcgaccatggcactgagcgctggacgctcgccggtattctgcagaactcatcgaacgtcggcatgattatggccggggagaactatccggatgagcaacgctacgagtacctgaccaaattcggcatcggacaaccgaccggactgaacctgcccggtgaatcgagcggtctgctcaccagcccttcggcatgggatctgcgtacgcgcaacaccatcctgtttggtcagggctacaccgtcaacgccctgcagctcaacaacgtggtggccaccatcgcgaacaagggcgtcaagcagcagcagtcgatcatcagatcaaccaccgatgccaatggcaagaccactgagaccaagaagggcgaagccactcgcgtggtggatgaaaaggtcgcatcggacatgatgaatgcgatggaatcagtggcggagagctacaacaagttcgtcaaggtcgatggttaccgcatggccgccaagtccggtaccgcagaggtgcagggttcggatggcgcgctctcgtccattatctccgattattccgtggtgattcccgcggacaacccgcgctatgcggtcaccgtggtgctgaaggatccgaatggtgtgttcggcggtctgacggccggccctgtttccgcacagatttgtgagttccttatgcagaaatacgaggtgcctgtctccagtccacgcaaaaatgctattccagtcacgtggtaaggatcaggggagaaaggcgatagcccatgagtgcagtgagcgaatccatcgcccagcgggtgaccttgggaatgctggtcgaacggtacggttttgaagtcgatccacccttcgccaccaatgtcaccattacctcactcagcgatgccgtggataccgtgattcccggctcgctgttcatctgcacgcatgagcaggaacccgatgtgctgcatgccgcacaggccggtgcctatgcggcgttgctgccacgcgcgtccaaaggacagatcgccaatgccgatataccgttgctctacggcgatttcgacgatcgcgtactcggcgatctggccagcggcctggccggcggaccatccaacgccatggcggtgttcgcggtgaccggtgcggatgagcaggccgttgacgcaggcgtgtcccagctctccgaattcctgcacatgctgggcaatccggtggcggtaatcaccgcatccgggtccacgtcgatgacacgtaccatgaacctgaactatcctctgggcatcctcgatatgcagcgcgcgctgtccgtgtgcgccgaagacggtgtggcggccgtgatcatcgccatggatgaccgcacattggccgagcatgcgttggaatcggtgaacgtggatgtgctgggcacggaagatgtcaacgcaagcgcaagcttggacgaattgaagacacgctacgcattcgttgcggaacatgacatgtccatgacctcgtcgacacccgaatcggatgaaatggctgcggattcaccggcaatgtacgaccgcgtccgactcgggcacatgtccttggccatcgccatggtactggccgccggcgtgaggaaaaacaacatacgcagtgccctgcatgtggccaacaatctcaattaagtccgtggatgcgggacgaagcgtaatcgtaaaggagtttgaaacaccatggttccgatgagtgtggaggagatcgccaaggccgtcgatggtcgattgatcggagacgccgattccgagtctcgagccaccaatacggtcagcgactcgcggcaggccggccccggatcggtgtttgtggccatccgaggcgagcgtgtcgatgggcatgactttgtggcgaaaaccgccgaacagggagccacggtggccatcgtcgaccatgaggtggagtccgatggcctgccgcagatcgtagtgaaagacacggtcgacgcccttggcgagctcgcccgacacaacatcgttcgccgccgcgagctggacggcgacttcgacatcatcggattgaccggttcggtgggcaagaccaccaccaaggatctgctctcctccctgcttgccaccgtaggtccgaccgtggctccggtgggatcgttcaacaatgagatcggtctgccgctcactgcgttacgggtcgatgagcacacccggttcttcgtggctgagatgggtgccagccatatcggcgaaatcgcgcgactgacccgtatcgcaccgccgaacacggcaatcgtattgaaggtcggcgtcgctcaccttggagaattcggctcccgcgaacgcatcgcacaggcgaaaagcgaaatcgtgcagggactgcttcccggaggcaccgcggtactgaacgccgatgacgaacacgtggttcccatggccggcctggccagcggcgatgtgctgtggttcggcttgggatcgtcgcaggagcccgaggtgcgggccattgatgtcactgccgaccggtccgatcatgctgaattcacgttggtcgatgcggacggcaaccatacgccggtgcatctgggcattcctggacgtcacaacgtgatgaacgcgttggccgccgcaaccgtggcgatgcgttacggtatggcacccgaaacggtggcgcggattctggcctcgcagcacaccatcagccctcatcgcatggcattgtccacggtgaatcgcgaggggacttccttcacactgatcgatgattccttcaatgccaatcccgactccatgaaagccggcctgaacgggttgaaggcttggaactcaaatgacggcaaggatccgttccgcgtggcgctgctgggtgccatgctggaactcggcgccgatgagacggcattgcacacctctatcggcacgtatgcggccgaattgggcatcgacgcgatcatcgcggtcggttccgcccaagaccaacatctcgatgcactggcacaggctctggcggacggtgcccgtcagagccaatccgcgtcggtggattgcgtacacgacatcgatgcggccgaacagctggtcatcgacttggcgcgcaaccattccgacgctgtggtactgctcaagggatcgcacgcgtcaggcctgagcgctttggctgaacgctgggcaaagaactgacccgataaccaccccaagaaaccgacaagaaagagaagctgcacgtgattgctctgatcattggaatgctggtgtcgctcatcgtcaccttagtcggcaccccgctgctgattcggctggtccacaagctgcactatggccagtacatccgccaggatgggccgcagtcgcatctggtcaagcgcggcacccccacgttgggcggcgtggtcatcaacttcgcgattctgctcggttgggcatcctccgcactgtaccgatacctgcgttcgggcgacgtgccctcctggtccgcggtgctcgtactgttcgccatgctgtcgatgggtctgctgggctttatcgacgacttcgccaaggtgcgtaagaagcagaacgaaggcctatcggtgggcggcaagttcatcggccagttcatcttcgccaccatctacgcggtacttgcgctgctgattcccaccaaatcgggattccccagtgcgcaggcgggcatcagcttcatcgaacagccgttcttcaacttcgacttcgccggccgtgccgtaaccatcatcctgttcgtcatctgggtgaacttcctgatgaccgcatggaccaacgcagtgaatctgacggatgggcttgacggtctggcggcaggttcgtcgatgatcgccttcaccggttttggcatcatcgcattctgggaaagctaccacatcaagggcggcagccatggcggctattcctatgccgtgtccgatcctctcgatctgaccgtcatcgccgtatgcgcggccgtcgcctgcttcggcttcctgtggtacaactcgaaccccgcatcgattttcatgggtgataccgggtccctggccttgggcggcctgttcgcagccctgtccatcgccacgcacaccgaattcctggcggtggttctgggtggactgtacgtcatggaagccatgagcgacgtcatccaggtcgggtacttcaagatgacccacaaacgtgtattcaagatggcaccgatccatcatcatttcgaactgaagggttggaccgaaaccaaggtggtggtgcggttctggatgatcgaactcatcttcgtgctgctcgccctgacgattttctacggcgactgggtcacccgctccggcctgctgttcagctagcggaaatctgggtgggattatgctcacccacggaattcctatatcaggaggaacaatgcaagtagcggataagacagtggtgatcgctggactgggtgtgtccggcacctcgttggcggaggtattgagggaatgcggcgcccacgtgattggcgtcgacgagaggaagcccgaggccggtctccgctcctttgatgacgtggactgggaccatgtggactacgtcatgtcgtccccggtgttcaacccccgcaccccgttcgtgctggaagcccaacgccgtggcatccccgtgatgagcgaggtggaattcgcatggcagctgcgtgtgaataacgagcgcaccggtactccggctccatggatcggcatcaccggcaccaacggcaaaacctccaccaccgagatgacctcggaaatgctcaccgcctgcggactcgacgcgccgaccgccggtaatatcgcctccggagacatgagcatgagcctgtctcgttgcgccaccaatcctcagcacgacgtactgtgcgtggaactgagctccttccaattgcacttcaccgattcgctggcacttgactgcgcggcgatcaccaatatcgccgacgatcacctcgactggcatggcgggcgcgagaattacgccgccgacaaatccaaggtgttccacaacgccaaacgcgccatcgtctacaatgcgcaggacgccaaagtcagcgaactggcggccgaggcccaaaccgccgaaggatgccgcaaggtgggattcacgctcgaggccccccaggccggtcagatcggcattgaagatggctggatcgtggacaggagcggcgtggccggcggcgcagtgggggagcaggtcagactggccgccatcaccgatttcacgcatctggcagagccggacggctcactgtacccgcatctggtggccgatgcattgacggcattggcgttggtgctgggacttggcgctgatcgagataccgcgttgaaggcgcttacctcgttcaagccgggcggccatcgcatcgaaaccgtggctgaggccgcagtcgagggcggctccgttcgtttcgtggacgattccaaagccaccaacggtcatgcggcacgcgcctcgctgtccagtttcccggccaagtctgtgatctggattgccggaggtctggccaagggcagtcgattcgaggacctggtcaaggaccaggcacataccatcaaagcggccgtcatcatcggcaaagaccagcagccgatggtcgaagcgtttgccagccaagctccggacatcccggtgaccatcatcgatcccgaagacaacgataccgtcatggatcgtgccgtcgaagcctgcggcacgtatgccgccgccggcgacatcgtgcttatggctccggcctgcgcctccatggaccagttcaagtcctatgcggatcgaggcaatcgattcgccgccgcagccaagacgtggagcgaggtgcatggcctccactgatacccataagcgtaaggcatacagagcccctgacaggcccgcactcgagatcaccgactacacgggttggcgaagcttgctcaacccgctatggtgctaccacggattccgcatggccgtggtggggctgacatgcttcggcctgatcatggtgttctccagctccacggtcaccatggccgcactgggcaagtcgccgttccttcagcttctgaaccagggcgcgttttgcctgatcggcttggtgctgggcttcgtggcattgacgatgccggtgacgttctggaaacggaccggcgtgttctttgtggtgggtgcctgcctgttgcaggcgctgacctttactccgctgggtatcgacgtctacggcaacaaaggttggctgaacctcggcttcaccactatccagccggccgaattcatgaagttcgcgatgtgcatatggctgccctcgtcgttgcatgcctgcagcaagatgtaccacaagaagggaatcaaagcatatgccgcgccgttggtgttgtatgcgataggcgtggcgctggtgatgggcggcaaggacctcggcacggccatgattctggtctccatcggaggcgtggccttcctgatcgtcggattccccggcaaatggatgggaatcggcgtattgggcgcggtggttatggtcggtgcattggcggtttccagcccgaaccgcatgcgtcgtattctggccacatatggtgattgctcggccgctgacgcgcagagcgtatgctaccagtccattcacgccaagtacgccatcgcctccggaggctttctgggattgggcatcggtaattcgcgtgagaaatggaattacctgccggccgcccataacgatttcattttcgcgatcatcggcgaggagaccggattcgtcggttgcgccatcgtattgctgttcttcgcgattctcgcctggtgcatgatcgtcatcgcattgcaggtcaccgatcgttatgttgccatggtgctgatgtgcgtcaccatttggatcgtgggccaggccatggtcaacatcggcgtggtcgtgggtgtgttcccggtattgggcgtgcctatgccgttcgtctccgcaggtggctcatcaatgatcatgtgtttgacggcggccggactggttgtgggacttatgcgttctcaaccgcagataaaacagtcgcgtcagagcgcgtaagtagactcggtaatcatgaatcaaggcacaccacatatcgttcttgctggcggcggtaccgccggacatgtcaatccgctgctcgcggtcgccggagcgattcgcgacatcgaacccacggcacaggtcaccgtcatcggcactgcggtgggtttggagaaggatttggtgcctgaggccggctacgagctcgacaccatcgaaaaagtgccgttcccgcgtcgccctgacctgtacatgcttcgcttcccggcaaaatggaagcgagaaaccgccaaggtgcgctccattcttgaaacgcggcatgcggatgtcgtggccggattcggcgggtatgcttccgcccccgtctacgccaccgcacacaagatgggcattccgattgccatccatgagcagaatgcgcgtgccggcatggccaataaactgggcgctcgttgggctgatttcatcggtaccgtgtacgagggcaccggtctcaaaccgcgtgccggagccgacgtcgagcgtgtcggtctgccgttgcgcccggccatcgcctccctgaccaaacgcatcggtgacgaccgtgccgccgtacgccgtgaatcggccgcgcagcttggcgtcgatccgaaccgtccgctggtgctggtcactggcggatcgctgggagcgcaaagcctgaaccgcgccatcgcctcctccgccgcagacctgttggcccacgcacaaatcatccacttgaccgggcgaggcaaaatcagcgaagtacgcgaactggtcacggcctcggccggcgcggacgtgcttaccggcatcggccccgaatcggccggacaaggtgactaccataccgccgaatatctggaacgaatcgatctggccttcgcctgtgccgacttggtgatttgccgcgccggagccggatcggtatccgagctggctgcactgggtctgccggccatttacgtgccgctgccaatcggcaacggcgagcagcgtttcaatgccgagccagtggtgaacgccggcggcggccttctggtcgcagacaaggacctgaccccgcagtgggtgcatgagcatgtgcccgatctgctcgccgatcacgaacgacttgccgaattcggccgcaaggcatgggaatacggcatcagaaacgctgccgaaatcatggcccggcacgttctgcaattagccggaccatccaaatagtattcagatatcatcccgtgcgcgatacagaccaatcccgtcccgcaacacgagatacggtcataatatagggtgctggaatccccaaaggagttttgaattgtctcaagatcagcccatcgtgcttgaccccacgtatgcctcgttcgatgctgcggcccgccccgcggatctcggcgccacccatttcatcggtatcggcggcgccggtatgagcgttctggccgaaatgctgcacgccgaaggagtcgcggtggacggctccgatcgcgcacacagcgccaaaaccgaccgacttgaaacgctgggcatcaccgttgaattcgggcagcgagccgaaaatgtcgcccaggccgagaccgtggtctactccagcgccatcaaaccggacaatccggaaatcgtcgcagcgcacgcggcaggcaagcgcattgtgcatcgcagtgacatcctcgctctgctcatgaacggcaaacgagccgtcaccgtggccggagcgcatggcaaaaccaccaccagctccatgctgtcccacattctggtgaacgccggtgctgatccaagctacgccatcggcggctttatccaaggcccggacggcaccacgctggacggtggacacgcgggcaaaggcgatattctggtggccgaagccgacgaatcggacggcagcttcgccaaataccatccgaccatcgccattatcaccaactgtgaagccgatcatctcgaccattacggcgacgaagcccactaccgtgccgcgttcgttgcccacgccggccgggccaccggtcacgtgatcatcagtatcgacgaccccgacggacttgccgtgctggaggccatgcccgccgacgtgaaatcccataccgttgcctacggcactaccgcgcgtgaatccctgcccgatttgggcggtgccgcgtatgtctggatcgcttcggaaagcgagaccgcaggcagcggcgtcgaacagctcaccctgcatctgccggccgcggtgacggcgggggagccggtgtctcagagcgttgccctgaaggttcctggcgtgcacaatgcgcgcaatgcggccgccgccatcagcgctgccgtgctgctgggcgtgagccccgcagacgcggccaaggcggccggcacattcctcggtgcggcacgccgcttccaggtgcgtggcacggtcaagcaggtcactgtagtggacgattacgcccaccatcccaccgaaatcgcggccctgctggatgcggcccgacgccggtaccccgattcgaccattcgtgtgatcttccagccacacctgttctcccgcaccaagttcttcgcgcaccagttcgccgaatccttggccaaagccgatgacgtcattatcaccggcatcttcccggcccgtgaaaagcagaccgatttcccggacatcagcccctccaccatcgtggacgcggctgagggactcaaggacgcttccgcaggcacgtggattcagccggtcgaggatatgtgcctggccgccaagatgatggccatgcgcgcccaccacggcgacgtgatcttcaccgtgggcgcgggcgacatcactgacatggatcaggtgctgctcaccgcacttgaggcccatcgggaaagctgcgagtgatgtccgggcgcacggtcagatccgggggcaatgacaacggctcacgtcgttcgtccggaagtccccgcaagccgcgcaccatcggttcacgcggaaacacgggtcactcgtcgaagtctcgcgctccccggtccgtgtcttccgggcatgagatcaacgagccggagatcatcgacgatgtgacggtagccaagggccaggccggtgccttcgtcgatgcacgacggctgcacagcgaggattacgttgccgaaacgctgcaccagaccaccggctccctaggagtcgtatcacgcccgaaagtggtgaatttcaccgaacgcgccaaagaacgcaagcgtgcgaacgtacgtgtcgttgcgttacgcgtgttgattgctgtcgtcagcgtggctgtagtgacggggctaacgtggctgctgctcttctcgtcggcgtttcgtctggaaaccagcgagatcggcgtatccggtgccaacgaatgggtgagcgcgcagaccatccatgccatcgccgataagcaggctggaaagtcgttgttcctggtctccacccatgaggtcacagagcaactcaagtccattcccggcgtcagcgaggccaaggtctccaaacagttccccaagtcgatgagcgtggaagtcaaggcgcaacggcctgcggccatgctgaaaagaggcgataccctgaccgcggtggattctcaggcgcgtgtgttgaactcggtgaagaacgccaacgtggatggcatcccggtgatcgaggtcaaggatatagacgccagtctcaagaaccgttcggtgaaggaggcgctgacgattctgggcgcattgccggaatcgatgcgtaagtccattaccaaggtcaccgctgagacgcaggattcggtgaccaccacgcttaacgacggtgaccgcgtaatcatttggggagactcctcgcaactgaagctgaagctggcggaagtcgaggaaatcgacaagaacatcaccgctggcacggctggctttgccggcaaacatcagattgatgtttccgcatcccagaagcccatcatcaagtgacggcgattcagttggttccgttggttccgttggttccggggcggcgttcgctccgttggtcctgctgacaacgttggtcccgtcaatgccggggcgatgttcgctgccggcgatttgcgcgagtagcgccatagggtgtatgctgaaaagtccggccgaaaagccggaagcttgataactcaagattgggggcgatcggtttcgacggtgacctgttcgctgcagggaagcgtgccgagaacgccgggtccgctcgtggatgaccccggcaaaagaataagtgctaaatctaaccgcactgagttcgctctcgctgcctgattttagtcaggattaaccagtgagcagccgctccgttcactcctcctcgtctttgggaggatgctgagcgtcgtttagaagacttgctgatgcagttgagcctcagggttgcatcgggactttaactgcggatatgctcgccatcagttgtctgcgacatcgatgggggcagaaaaatcgccaacttggccagcagactacgcacgtagaagactgtgggctcggtcatcggaccggggttcaattccccgcgcctccaccaagacaagcgtcgtttccgtaagggaacggcgcttttttgttgctgcagttgctactgtagggagtcatgagagttgtagtgcaacgagtgtccgaagcgtccgtggacgtggtcaatgaattgggcacgctggatcccacgttcgagccgcagcagattggcccgggattcatgattctggtgggcgtcaccgatgaggacggcgacaagcagatcgcctggctggcccataagattctgaatctcagggtgttcgaggatgcgcagggcaagatgaaccgttcgatccaggatatcggcggcgagattctctccatctcgcagttcacgctgttcgccgacgtgcacaagggcaatcgcccgagcttcatcaaggccggcaagcccgagcatgccgatttcatgtggatcaagttcgacgaggcgttgcgctccgggggagtgccggtgaaggaaggtcgtttcggtgcgcatatgcgggtcggactggtcaatgacgggccggtgaccatcgtcatcgacaccgagcatgacatgcctgacggaacacgctgaattgcgatagtaatttgacatcatatcccgttccctccaatatgttactaaagcgctttagtcttctgcgggcgagggcgcatgtcgatatgtttcccatgaacgggcagcacaatgatgtggccgcacaagcggcagagataaggggagtgaacagcagatgttcctgaaacct

SEQ ID NO: 3819 - DNA, 6875 bp, Unknown
  R35_2m  MAG No. k141_7488
atgcacgaagctggtgacctcccaggcgagggtcttctgggcctcgcgcttgccggggttggtcttggattcctcgaccagtcgttcgatttcggccttgggcaggaaggtgaacgccttcagcaggctttccatctccacgtccgggcggttgatccagaactggtagaacttgtacgggctgagcatcgtggcgtcgagccagacggcgttgccctcggacttgccgaacttcttgccggaagcatcagtgatgatcgggctggtgaacacgttgacgtccacaccgcgcaccttgtggatcaggtccaggccggaggtgaggttgccccactggtcggagccgccgagttccagcgtgcagtggtattcgtcaaacaggtggaggaagtcgttgccctgcagcacctggtagctgaactcggtgaaggagatgccttcctcagagttcaggcggcgggcgaccgtgtccttggcgagcatggtgcccagacggaagttcttgccgacgtcacgcaggaagtcgatgacggtcatcgaggcggtccaatcgtaattggacacgaaacgtacggcgttcgcgccttcggtgtccagaatgccgccgatctggttcttcaggcgatcggcccagccggccaccacgtccttcgggttgagcgtgcgttcgccggactggcgcgggtcgccgataagtccggtggcgccaccgaccagagcaatcggatgatggcccgcaagctgcaggtgacgcatgttgatgagctgcacgaggttgccgatatgcaacgatgcagcggtgggatcgaagccacaataataggtgatgggctcgccgttcagtgcttctgcgagtcgatcccggtccgtggactgggaaatcaacccgcgccattccagttcctcaagcagggtgttgaaacccgcttccttgaagtcggtgacgtgagccatagcttgtcgcttctccctatcgaattgtgaatgagactgcccaattgggcacagtcaagtttcgcagaacatggcgacagtgccgaacaccagccgagccgcgcgattcagtaaaatgccttattctagcggcgcgggcccataagttcgcgcaaagagtcgatgatgtcctgacgatccggcacctggaacttcgggaaggacttgagcatacgcttctgctgtgcgttgatgacgccattgacggcccagcgcagacgctcaaccgtatcctgcgaaaactcacgcatcctgtcggataccgcactggagccccgctgccacgtgccaccggcgcgtgccgccacatcctgcaccacctgagcgacggaatcgagcacctgctcgaattcgagcatgcccgtaaccgtgaccgccaagtcgatgacggtgatcagagccagtaccgtgaccagcgtatgcagcatcggcagcggaatcatatccgtgacccgctcgacatatggctgcgaaccaagtaccacgcccacgccgccgaggccgaaaatcaacgcgcccagcaggcagacgcggccttggaggttgaagcggaaattcgagtaatcccaccagcgggcgtggaacagctgctccatgacccatgaggttgtgtattcgagtatcgtggcgcccaccatcgaaatcaggaagatgatgatcgggttatgtacgttgccgagaatggcgacgccgagtatcgcgccggtgccgtagatcgggcacagcgggccgttgaggaaccctcggttgaccaagcggtgctgttggcaggagacgagaatggattcgtacatccagccgacgaaactgtagaacagaaaccagaggaaataatgttcgagtgtgatgatcatcgacgggcttcgatctcggcgtagggcttcgcggcgggcaacgcgcgcttgttgaaccggtcgagcgagaaggtctcggcggtggcggagcatttgtccgccaaggtgaccagatagccttcgatatagcgcggcggcaccagggtcatcgggaacatgtggttctcgatgctgttgcgttcgatatcgttgagcttgaagtccttcagggcattgaccagggcggcgtggccatgggtgaagccatgccactggtgttcgccgttatcccagtcgtgccagtcgtacaggaagtaatcgtgcaggagggccgcgcgaatcagggatttgaggtcgacgcggtaccacaggtgcgcgcggtcggccatccacacagccaggcaggcgacacgcacggaatgttcgaacgtggtgacgttgccgtgctggtagcagcagcgttcgatctgcatgtggcgatgctcgatgacctcacggccgtgcttggcgaccaggcgttgaatctgcgttcgggtgagcagatgtcccacggtttcgaccctccgttcgggttggttcagtgcaatcccttgttgtgaattacgattacccgacgatattcaagaatccatcgagtaataccgtgaccgattgtagggcacacgtatgtccgtgcacactcatccaaaagaacgacaacgggaaccgttaatcgtggtgggtttcaagatagtcgagataaccctgaaaaccgccatcgaggcttgctacatcgtaaccgcgatcggcaaggatttcagctacttcctcgctccaccatccttgagcacaatagactacgacagttcgatctgtgggcacggttttgagcacatgggccagagggtcgagtggtgcattgatggcaccttcgaccgggtgggcggcgaagtcggctggttccctcaagtcgagcagcgtgaccgtattcgggtcgagcttggcaaattccgccggcgtgatgcggcggtacgatgcttcactgctctcatcgtcatcgaccgcattacgcaaagcaataggcatgttcttcccctctcgttccgatcttggctcccctcaaggaggggtgccacatagctctagatcgcgcaagccggctgaatatagttggccggatcaatagcagtaatggtcggctgctcaccgcacaccgggcagtcgggcacatggttcggcaacggcacacggcggatgttcatggtcagggcatccacagtgagcatacgagccacgagcggctcccccacgccggcaatcagcttgacggcctcagtcgcctccagactgccgaacacgccgaccaccgcgcccagcacgccggcctccttgcaggtcggaatttcacctgcggcgggcatatcgcggaagatgcagcggtagcaggggccttcgcctgggatgacggtcatcacctggccggcgaatccgaccacgccggcatggatgtacggcttgccggccagcacacatgcgtcattgatgaggaattttgcggcgaagttgtcggtggcatcgatcaccagatcgtacggttcgatgaggccggcgatgttgctggcatcgacgagctcgtagtaggtgtcgaccgtcacatctgggttgagcgcgcggatggccgtggccgcggattccactttgggcgctccgacacgtgcagtggtatggatgatctgacgttgcagattgctcatatccaccacatcgccgtccaccagtccgatatggccgacgccggccgccgccagatacagggcggccggagagccaagcccgcccgctccaatgatgagcacgctggaggccaacaaccgcttctgccctttgacgcccagccccttcaaaatcagatggcgcgcgtaccgctccacctgttcatcagtcaatgccatgttttctccatgtttccagctcccctcagtccgctacgcggccagctcccctcagagaggggagctaataaaagtgtcagtgcagatatcccgtagtcggactggacggcacggcctgtccctcggtcaccttgcccagaccggacagatacgccgcacgaccagcatcgatggcgtgcttgaacgcctcagccatcagcgggatattgccggcagaggcaacggccgtgtacgccatcaccgcatccgcacccatctccatggcgtcgcatgcctgactcgggcgtccgatgccggcatcgatgatgaccggcacatgcgcattggcgatgatgatctcgatgaagtcacgcatgcgcaggcccatgttggagccgatcagcgaaccgagcggcataacggcggcggcaccggcctcctccagctggcgtgcggcaatcgggtccgggaacatgtagggcatgaccacgaagccttccttggccagcatttcggtggctcggatggtttcggcgttgtccggcaggaggtacttggtctcgtgttcgatttcgaccttgacgaagtcggtgtggcacacttcgcgtgccagtcgggcgatacgcacggcttcctcggcgttgcgcgcaccggaggtgttgggcagcaacgtgatgccttcgggaatgtagtcgagcacgctgttctcggtggtctgcgcgcggcgcagtgccatggtgacgatttgcgtgcctgcatgttcgaccgtggccttgatgaggttcaggtcgtagcggccggagcccagaatgaatcgcgactggaactcgtgaccgcccagggtcagcggcttgtcttccactggcagaatcggcgcggcggtgccgaccggattggtgacggcgggctgcggcggcagcggagtcgcctcaacagatgcttcagtaaccggattaatattgctcatagcttttcctttcatccaccctgtacaaactgcacaatttccatgacgcactggtcgtcgagcatggcgtcggcacgcttatcgcgcgggataatctcaccattgagttcgatggccacacgctcggcgcggaatccgtgcgcttcgagataatcggcgacgctgaccggcgtctcgagcgtgacctgctctccgttgacctgcataatatcctttcagatagtaaaaaagggtgcacgaaacgaaccgtaccttaagtggtgcgcccattcatgaacccaatcatgcgaccgttcgaccgctgtgatgtattggctccatcacgaccgtctcacggctgaattatgcaaacggaatgaaagctgtatcggagaacccggcaaatctgcaacaacgattccttacggcggcatgacccgcgtcaagttccccggtcgaagtctggcaacttcctctcagcctcacggctcccgttcgttacgatttctcagtgtatgccgttgcagtgacaacagcaaaatagagctccctctgacgagggagctctattgggactagaacgtgccgggggctttgtaggcggagccatccgacgtggatgcggggaagagcttgagttcttcgacctcggccttggcgtcggcgatctgctcgcgcacgcgaccgtaagcggtgccgcccttgccgttgcgggagtcgaccgaaccgtggctggagagcacttcgcgtactcccggagccttgtcggccggcaggaacgcggcgaaggtctcgatgaagtcattgtcggtcagatcccacagttcctggccgcggccttcggcgagcttgacgcaggcaccagagagctcgtgcgcatggcggaacggcacaccgttcttgacaagccattcggcgatgtcggtggccagcgcgaagccggtcggggcttcctcttcaagccgctcgctgtcgaagtgcatggtcttgaccatgccggtgaaggcgggcagcagcacttcgagcgtatcgacctggtcgaacacggcctccttgtcctcctgcaggtcgcgagcgtaggcggtgggcaggcccttcagggtggccagcagaccggtcagatcgccgatgagtcggccggacttgccgcgggcgagctcggcgatatccgggttcttcttctgcggcatgatggaggagccggtggaatagccgtcgtcgagcttgacgaaggcgaactcctgggtgttccagatgatgatctcctcggacaggcgggagatgtccacgccggtcatggcggccacgaacgcgaattcggccacgagatcacgtgcggcggtgccgtcgatggagttgtcggtcacgcgggagaagccgagctcacgcgccacggcctccgggtcgaggccgagcgtgttgccggccagtgcgccggagccgtacggagaggcgttgatgcgcttgtcccagtcgatcagtcgctgcacgtcgcgaatcagcggccaagcgtgggccatgagctggtgcgcgagcagcacgggctgggcgtgctgcatgtgggtgcggcccggcatcacggtgcggccggccttttcgctctgctcgatcagggcgttgacgaggtcaagcaggagtccggcaatcgcacgggagtggcggcgcagccacatacgaatcaggcaggcgatctggtcgttgcgggagcgtccggcacgcagtttgccgccgagttcgtcgccggcaatgtcaatcagtccgcgttcgagggcggtggcctcgtcctcatcgtcttcgatgggggcgaaggagccatcgtcaacgtggcgctggagcgtgtcgagcgcatcctccatgcgctgcagctcgtcggcggtcagaagtcccgcacggccgagagcacgggcgtgggcgcgggaaccggcgatatcgtcgtcggccaagcgccagtcgaactgcgtggacttggacagtcgggccagttccggcgacggaccggacgtaaagcgaccaccccacagggccagatgttcgttgttctcagtcatgaaggctccttgaaaagtgaaaatagctgtgtttaagcgtagcaatgtgttcaaacatacagttgcccccgctggcgagggctgtcacatggagtgtgactgaggacagtcctttcaaagaccactcccagtcagctatgccgac

SEQ ID NO: 3820 - DNA, 8871 bp, Unknown
  R35_2m  MAG No. k141_7551
cgatccggcgaatggtcccgaatccaaggaggaagcatcatgcgagtagcgttggcgaacgcaaagggcggggtggccaaaaccaccagctgcatctatctggccgccgtgctggcccggcgcggcatcgaggtggcagtctacgacgcggacccgcagtccagcgccagcctatgggcggccgccgccgaacaggcgggagacccgctaccattcgacgtgctgccggccaacatggccaccctcgcccacctaggcggcgccccggccacaaaggaatggtcgatcatcgacgcccctccgcaaggcccgctgctcgacaagacgctggccgtggccgatttcgtcatcctacccacctcggactcgccgatggacctccagcaggcatgggacacgctcgaccgcgcccgacatgccaccagggcggccctgctgccggtgcgcgtcgaggcgaacaccaacgcctgggcccagaccctagccacgttggagcaaaccgacaccgcgcgcttcgacaccttcatcgccaaacgacaaccgatcaagacctcgctcggcatgaaccccaaacaactgtacgaataccgggaactggccgacgaactgacgcgcatcgccaaggaggaactggcatgaaaggcaactaccagccactgccccgacccgtgcccttcgacaaagtcctcgaccaacaggccgaagacaaacaacccaccgggaagaacaacgccggcgaaccgctggtcatgctctccctgcgcctgcccgtccggctgaagaaccgcctcaaaatcgccgccgccgaacacggcacgccatgcaacagatcctgcgccacgccatcgaacacgaactcgaccgactcgccagcaacgactgaataagggacaccgtacatgccgagatgcgaggattgacgaattgatagttgctatggtaaaatccaactaaatttgatggaacacctgacatgccaaggtggttccgaagcaggaaggccttagagcattggtgatttgagcagtggcggattgcatgaggagagattccgcgtgttctgcgcattatcgcgcgtatctgccattgtaccaatcgcaatgcctgattcgatgaagttctcgttagcatagcgactttcggtgccgtcacgaggactgctttctgaatgcagcttggcaataaatggcacagtccgccacttttcgatagtcacagtttgattaatgcgccttatcgaaagaggcttccatgagtcagatattgacactaaccgatatttcctactgctatccgggcgcgccggaaccattgttcgaacatctgtccgcgacattcgcggccgtctgggccgcagtgctgggagacaatggcattggcaagaccacactggccaaactcgcctgcggcatgctttcccccgattcggggacagtctcgccgaacccgtgcaagatggcagtcgcctactgtccgcaacgtactgatgaaacgcctacgaatctggatgatttcgcggcggattggacgggcgagaccatcgccatccgcgacgcgctgaacatcggcgacgattgggcataccgatacgagactctctctggaggcgaagccaagcggctgcaaatcgcttgtgcgctggccggcgatcccgacgtgctggtgttggacgagccaaccaatcatgtggacggcaggacgcgccaagccatcacgcaggcgatgcgtcggttcgatggcataggcatcgtgatctcccatgatgtcgaactgatcgacgcgacgtgttcgcgctgcgtgatgctggagcgccgacatgcgcgtgggcgtaacatcacggcggcgaacacctatcagggtggatatacccaggccgcgcagcagatgcgcgacaatcaacgtgccgatacggccgccatacagtccactcgaaaggagctgcaacgcatgcagcgcatcaagcgggagcgggcgcagcgtgcgcgcgaactggatatgcggaagaatcagggaatgcgcatcgatatcaaggacatcgatgctcgcaaagccctgaaaaatctgaaaccggctatcggcaccactgtcgcacagacaagcgcgcaattcgacgggcgtatcgccgccgccaccgacagacttgctcacctcagcgaagcggccaaacgctacgacggcaccatctggatgaacgtcatgccgagctcacgcagggaattgacgcgcatccccaacgaccacgccatcgcggaccaacccgatatgctgagcatcggcccgcgcgaccgcatcggcatcagcggtccaaatggcagcggtaaaaccgcattgatacgacgattgatcgaagcgctggagcgtgatgaagcgcagcggcattcggagagaatgccatatctctatattccccaaaattccagcgacatggataccgccaacgcaatgaaccgcttgcatgctttgacggacgagcaacgcgccattgtgctcagcgcctacgcccaacttaacgccgaccccgacagactgctcgccggcggcaatccctcgccaggcgaactacgcaaacttctgttgtgcctcggcatgattgaacagccacagctcatcatcatggatgagccgaccaaccacctcgacctgcactccaaacaggcacttgctaatacgctatcctcctatgcgggcgcattggtcgcagtcagccatgacgaatggtttctgaatgccgtcacatcgattcgatggcgatgcgcgtcatgacgctatctatgagtttacgttccttcgtaagacttggatatcggcaagacgcattccttttcgtatgaagctgtatcgatggcaatgaccgagcaagaggacaccagtatgacacgaccgattatgccgcgagcacatggcaaaaaacttcacatggaggcgaacatggctcatgttccttcggccatcgcaatcacggcgatgcgaccggaggaatatccgttgctcgtcgagttcctgtatcaggcgattcatgtatcgccgagaaccccggcaccggacaggagcgttgtcgagctgccggaattgcggcgatatatcgagggattcggacggcccgacgatgcctgcatggttgctcgcgccggactaccgaacggtccgcaaatcgtgggtgccgcatgggccagaatcttcccgaacaactccgcaggctacggtaccatcgacacggcaacgccggaagtctccatatccttgcttcccgactggcggaaccgaggcatagggcaccgcctgatgacggcgttactggaccgactgcgaaccgatggtcacgccgcagccagcctctcggtccagcgcaccaacgccaacgccctccatctctacgagtcgcttggcttcaccatcattagcgaacacgacggtgaactggtcatgcgcgtggctctcgcggattgaggcagtgttccacacatcatccgcatggagccagtgcgtaagccacccactgtgatatgtgcggctgcaagtcccgcattcatacaagcaaacaatctgacatacagatgcagtctattccttattatgttttcggctttgctcttgataagagccagcaccaccatccatcctcgatgaatgtgggcaggctttcgcaatgtgccacatgacgcaacgtgtagtcggcgtgaaccgcaccaccgcgcaggtgttcacgcatgaagctcacgaatgatacgacctcgaaaagctttttgggaggctcgttcccaatcttgtcctcagtgtgcagcctgtcagtctgaagtcagctttcaactggcaaatgttcaaagagacgggctagcgcagtggatagatccgctccttcgaaagcaaaagtcgcagcagcacgtgtctgcttgtccgcgttgaaggcaagcgagacaccgacggctttgaacagcggtaggtcagaacgactgtcaccaatagcgatgcaattcgaagcttcaactcccaagcattcacattgctgcctcatgaatgttactttggtttgttcatcggcatatgccgctgttttaccaataaacacgccatccttgacagcaagttctggaccgcaccatgcttcaaatccaaatctctgcgcaaggctctcggaaacgactgtccaagcgcaggatgcgaggactggcttgattcccctcgacttgcattccgcaacggactgtgcgattccttgcacaagcgggagatcgttcaaccatccgtgaatttcacttacccgatggccagtgtatccacgagcatcaatatcgcataccgtgtcatttccgatctcaccgcgtgcgtatcgatcctctgcatctcgcatcctgtcgccggtacccaaccggtccgcaataaatgcgccagagctaatgccgtatgtgagcgttccgtcgatatcaaaaaatgcaattcccgccattcatccctcttcatttactggttcagcccgaacctccagccggtaactaagccaatagcgtatcaaaaggcacacatatcagaaaagaaaggcagatagtcccattaaaccgtttcatgcgattgcagttgtccgccgctggctacggctggcagggggaagctgggaaaggcgtcccggcggaaggcccgccggtgcgttcttcttccagggacaaggaaggatgcgggcggccgtgaatggtcgcccgcattttccgtatccgtgtgaaacgggagggagcgcatcatggggcgcttccgactgaaaggacggatacgtatgtcaggtgggaagaagagcaggcgcacgatgctgatggctgccctgaccgcaggggcgttggccttgggatatctggcgccagccgcgttcgccgagggcggtggtggcggttccggcgagggcggtggcggttccggcgggcaggttccatcgcagaccgccgacgtgcattggatctacaaggattcctggcccgccactctggagggcatgaagcaggcgatacgtgattcgggcaccaccctgtcttccgatttggaggatgggtcgaatcagttcgtgaatatgaatgccatccttgccgacgcgatctcggagtgcaaggcctcatacaccggggagggtgacgcggaatgccggatggtcgctgtcggctacgcgcgcctcggcaacggcgtgttcagcggttcctatgtcagttcgaacgcgcgtcagcgttgggagtcccaatgggccgccgaagggcgcggcacctaccagtaccaaggccagtcgtacacgaccggcaccacgtggaccgatcggcttggcgtgcgttcggtggatagcctggtgcaggattccatcaacgccaatcccgatgcctcgttccgtgtggtcatgctggccaagaaccagccgcccgtcgattatccgttgaccgtcaccacctcgcaccgccagcagaccgacatacaggtcggctcgaccacgccggtcggcgacaccatccacgcgaacaacggcggctcgtcgatcaaggagaccctgcacggcaccgcgatcgtgcactacgatggcggcccctacacgccgacgggcagcgtgagcaagccgatcagcttcgccaacagcggcgacaccgtgatcgacaacctggcctcgccgggtgatttcggcatggattcctgggccgagggcacatattggatcgacatccaagtgcccaggcagggaagcatgcaggcggccgtggacaccacggaccgggatccggcggagacctggaaggtcagcgccgtgccgccggccgatccggtcaaaagcatcgaggaaggcgtcagcgccgaccgaatgaccaaccgcaccaccatcacgtatgggaccggccggggcggttacgagctgagtttcagggacgtgatcgaacccaacggcgtcgattacacggtggacagcttcacgctcgtggacgccaccgacaacaatcgcgatgtctccaacgagttcgagatcggttgggaccgcgcatcgaacacggtcagcgcggtccgttcggccgacaagggcatgatgccgttcgaccacgagtatgtgttcggcttcgatgtgaccgtcagcctgccatccgattaccagaacatcagcgaccatgcgtggggcaagtggaaccagctgcccgaggccgacgcgggagaacgcgagttcgacacctggcgtcccaatcccgacaaaagctggatcatgctcgacactaatggcaagtggcaggccgtgatcgaccccgaccgcaccaaccagaccggcggcgacggcaaggtgttcctcgacggagaccgcgtggcctccgtggtcaacggcaccgtgccggcgaacctgatccaggctccgcagacgctcaccttggtcgatgattggacagccgccgattacctgttcgacgccgatgaagcggcgaacgtccgagtgtacgaggcggacgcgggcaccgatcgtgccagcagcgtgagcgacatcgccaaccgtggccgtgacatcaccgaccagtgggacatcacgatcgatggcaccgtggtcaccgccacggccaaggcctcctacctgaccggactgaagggcttggcgaaggccaggcagatcacgatgctcgtgcccggccgcgcgaactacgccaacggggccggggcgggccaggtgcgcgatgacttcggcatcgaagcggacgacgagatcacgttctgcaccgccggcaagaacggcgcggagttgaccaacgccggctcgcagaccatcaacacccacacggtcgaaaccaacgagccgaaggtctgcggttacgtgccgtccgtggtcaaggatgtggtcggggaatcctcccaaggcggcgcccaggacagcgtggacggcaagatcgtcttccccggccagcgtctcgaataccgtctggaaacccagccgcacctgcccgacagtctcgcctacactatcgtcgaggtggcggtcaccgacacgtatgacgagcacttccagccgggcaagcagaccctggaggtcaccgacctgaccaccggcaagttcatccccaagagccagtaccgcagcgagtggaacgacgcgaaccatgccgtgcgtctcgtgttcgccgacgactatgtgcgggcgaactggctggcgggcgcgaatcccaggatcatcatcaggttcgagggcgtcgtggccgaggatgccccggctgacaccgtggttgacaaccggtgggcattgaccttgaacaactcggtcacgccaagcaacaaggtatggaacgatccgcccgacttccagccgggcaaggaggacacccaggccgacccgtccatttcgatcgacggcaagaccgcgttgctcggagaccgcatctactatcggatcaatctcgacgccaagcagacgaaccatgcctacaaggtgtggcggctgggcatggtcgatgactgggacgacgaatacctcgaactcgacgagaaccatatcaccgtgaccgacaaggccaacggcagggatatgaccgaccggttcaacatccaggccatcgacggcgtggcatacgtgttcgccaaaaccgttgacaccgaggttccggcgacgggagagaccatcaagggcgacccccagccagccgatctcaagatctacgccgcgcttggcgacaaggaccacgacccgttgaaggacccggccatcgaccagtcgcttctgggcacctcgtatgaggtcacgctgccgatgaccgtcatcaaggtcaccgacgattacgtggtcacgaacacggccacccagctggtcaacgacgtgcgcaaggacaccaaccaggtttccaaccccttgaagccgatcaacccggccaaggatgtcgtggtcaaggtggacgggcagagcgtggatggcaagagcatctatctcaacagcctgttcctctaccggctcgacagctccacgctgccgcccgaccgcgcctatccgcaggtctccgactggtccatcagcgacccgctcgacacccggtacgacaagttcaccggtcaatgggccgtctacgccgcccgcgacctcatcaaggacggcgagaccttggccgagcggggcgaacgcatcgccggctccgacttcgacgccagccgtttcggcggagaactcttcgagctcgccaccgacgagcacggcgtggtcactgtgcgcgccacggagctgatgcttggactcgtgtcggccgacaccgagcatgagcaggcgtggaccacgttcatccaatgccagcgcatcgccgtgggcggtcccgtggccaaccggttcaccgagaccatcaacggggtagaacggccctcgaacaccgtcaccacgtacacgcccgacatgacgccccggctcaccatcgagaaatgggacgagcactccggctggcccgacggcgaccgtgacaccgttgacgaggcgctgaacatgaacgggagcgatgctcgcatcgtgttcaccatcaccaacgcatcgcccaccgaccctgacaccggagacggcccttggttcaaggcgagcgagctgaacctcaccgaccagctcgtcgccggcgacggccagatcggcgagttcgagtatcccgacgactggcagacgctgatcctcaagcctggcgacagcgtggaggtcaaggccaccctcagtggcgtgagcgagcatcacaccgaccacgccatcgtcaccggcacgccgctcgtccaatgcgtcgtctccgaccccgaccccttcgacggcaaagacgaggagaaactgcccgaggacgcggtggagatcgacgggcgaaccctgtgcgcggacaccaccgtgaccagcaacaccgacgactggaacggctaccagcccaaggacaa

SEQ ID NO: 3821 - DNA, 31041 bp, Unknown
  R35_2m  MAG No. k141_7721
attccagtgagcgtgcttcaggaccagagcagcctcctgctcctggctcagtcggttctgcagaatcgcgatggccttctcgctggtcgcctcatcgagtcccggcacaacaaatgcaagtgtcataatgttccttctttcagtaggtggaacgttgccctttcattctacgtttttcggttttgccccgggccgaacccgggttctagatagaagcgcaacacccgctctatggttggaagtgttcaggttctaactggagaaggtgttgcgcccatgaggaaagtgtattcccacttgtcggcacaggaacgcatccggatcgacgaattgcgcaaccgcgaggggctcggcgtgcgccagatcgccctgaggatgggccgtgacaagtccaccgtcagccgcgagctgagacgcggcctgtggttcgcgtccgacgagaacgagtcccaccgcccctaccggccgaaacagctgaagacgggcgcgtggacgtcccgtccgttctactcggcgatgaccgcgcagcgcaaggccgagcggcgcgcccgccagctgcgcaagcccatgcgcatggcatacgacccgctgctcgaatgggtcatgaccgcgctgcgcaagggatggacgcccgaactcatcgagggacggctgaaggtcgaatggccgtccgacccgcatatgaggatcagctacgaatgcctctaccagtggatctacgccaagccgcgcagggcattggacctcaggcagtacctgccgcggggcaagcggcatcgcacgcgcgccaggggcaggaggtcgaaggggtcgcgcatcccgatgcgcgtgccgatcgccgacaggcccaaatgcgtggactcgcgccgcgagttcggccattatgagtccgacacggtcgtcggcgcctccccgtcgaggcggtgcatcgacacgcaggtcgaacgcaggagccgcaggctgttcgccaggttcgtccccgacaagagcgcgctggccacggcgcgcgccgaatacgactggcccggcgtcgccatcgcagcctagatgccgaggtcgtccttgtgcttgttcatgtcctcgacgaccttcttcaaggtgtcgtagtccttgatgtcggcgtcggactggatgactgcgtagtccttcttggcgtattcgttgacgatcttcttgttgtagatgataccgtaccactcgaccgcatacggcatggtgtaggcgtcgtcgccgaccttatgcgagttggtcttgccttcgtcgttgagcagcttgtacacgtcagtgtcctgcaacggttcgagatacctctggtacttggcgaactcgtcgtagccagcgatgatgaacatggtcggagcttcggacttggccagttcggaggtcagcgtggactcatagctgccggaggacgcgatctggatgtcgacctgcacgccggtctgattggtgtagtcctgcgcaagctgctgcagctgatcgaccacctcaggcttgccgttcaagaaataaacatgacccttattcggatcagccgcagtgcttccgcaggcgacgaggctgaacatggtgacggccgcaacgcccgcggcgaggattctcttcatgttcatggtgctcatcggcgttatgctccttccgcatataccgaacatctgtgtccggcgatctgttcttctcaaagggggccgctgaactatgctcagcgactcgttaccgtaagcgttgatgacaacgacatcacgcgatgcaattatgtacataatcggcgtgttgtcgggggattacttgatatttcaagtgttttctcacaccctctgattgcagctctggtgaatacgttgccaaggtactgtgcatgaatcggcaaacaggcgattccccgtgggccacgcccgttacaatgacgtgtatccatccgcccgcccctcaaggagatgaatcatgggctttatgtctccggattccgcattcatgcgcggactgagcaataccgtagatgccatctggatcaacctgctcatgatcatcaccagcattccactgatcaccatcggcgcggcgctcacggctggacacgatgccgcgcggcgcgtagcaatcgcggaaggtcacgtcaccgcgaactatttcaaggcattccgcgcgaatttcctcaaggctacgggactatggattattttcggcgccacgggaactggtctcgtgtattcatgggtggtgttgcagatcacgccgctgctcatccccaaaatcggtctgaccttggtgtggatcatcggattcgaatgggtgtgggcgttgcaggcgcgcttcgagaactcctttggcggagtactggcgaacgcgttcatcttcggcgtctcgcgcattggtgccacattggtattggtcacgatcgacgctatcttcctcggcctgctcgtcgcctcatgggtctacatgccgcagggcctgttcctgctgatagtcctgggctacggatcggtgctcatgctgcatgtgccaattctcgagcgcgtattcgccgcatgcgtcgccctgtccggcacgtccgacgcatccgccccgtccgacacgtccgacaccacgtccccgcaaaggcaatagcacatgggcaaagtcacactgcaggacgtcgccaaggcagctggagtctccaccgccaccgcatcatgggcgatcaacgacaacaagaacgtacgtattcccgaaaacacgcgccgcaaagtccgcaacgtcgccgaacgtctcggataccattccaacgcgtttgcccgaagtcttgcgcgcggcaaatccgatctaatcggtttcatcagcgacggtgtcgccacatctccattcgccggacgagtcattcaaggcgcgcaggacgaagcatggcgcaacggcaaaatcctgttggtggtcgacaccgacggcaatgcgaccattgagcgaaaggccttttcgttcatgcttgagcatcaggttgagggaatcatctattcaagctgggtgcatcgctccattacgccacctgacgagctggaacgcactatgtccgtattggtgaactgctttgacgaatcgggtcgattccccgctgtggtccccaatgaagtgcagggcggacagtccgctaccgagttgttgctgcaggcggggcatcgtcatgttgcattcgtgaacgagccaaccgcatcgcctgcgtcggtcggccgcctcgaagggtatcgtcaggcacttgccgcacacggattggcatacgaccccgcaatggtcgttgacgcaacagccgaccaggaaggcggttacggagcggccgacgcagtgctgaagaccggcgccacggcagtgttctgtcataacgaccgcactgccatgggtttgtacgacgcgcttcgcgagcgaggcttgcgtgtgcccgacgatttgtcgattgtcggattcgataaccaggaggtcatttccgcacacctgcatcctgcactcacgacggtcggactgccgcaatatgaccttggtgtattaggcgtacgctcgttgctgacgctgaataagacgcccgacgccgactacgacagcagcgaaaccgatcgcatcgaagatagcaaaacgcaccgcttcgagccattgctggtgggctgtccttcagtgatgcgcgattctatccgcgcctatcgcgggtagtcggcagcgcgagacacgcgccattcctagaggtgtgcgtcatggcttgacaggtatagtttgaatgtttatcatattgcttaatcgcttaaatgcttaagcgattaaatcaaatcaggacaatacaataaagcatgtttctaatgcgcggagctgcgcagtagaaacagccaggataccgttcgccgcgaaactgcacacaagtccggtagcccgaccacagagcaattggcgagcggtcgtcaaccgaccatataggagtgataatcatgccaaagctgtactaccaattccctggcacgtggttcggcgattgcatgccgttcggcaagggcaacgagttctttctgtatcaccagcgagacaatcgcaatccggaaccattcggcgaaccgttcggctgggatctggccacaacctctgatttcgtgcattacaaggattgcggtgtagccgtgccgcgcggcagggacgacgagcaggatcagttcatattcgcgggatcggtgtttgaaggggaagggcaataccatatcttctacaccgggtacaaccgcgattacccccagcgggacaagccggcgcaggtgctgatgcacgcagtcagcgatgatttgtaccactggacgaaaacccagaacgccatcaccttcactccgcaagaaggctacgatccagacgattggcgcgacccgtgggtcattcgcgacgacgaacatgaccagtatctgctaatccttggagcccgtaagatcggcccgaaaacgcagcagaccggccgcacggtgaagttcacgtctaaagacctcaagaactggacgttcgaaggtgacttctgggctccgaacctatacacgatgcatgagatgcctgatctgttcaagatgggcgagtggtggtatcacatcgttacggaatacagcgatcggcacaagatggtgtatcgcatggccaagagtctagaaggcccgtggatcgcacccgatgatgacgcgtttgacggcagcgcctattatgccggacggaccttcgaactaggtggacggcgaatcctcttcggctgggttgccaccaaggaagactgcgatgacgtaaagaacttcgaatgggctggcaccttcgtccctcacgaggtctaccagcgtaccgacggcacacttggcgtgcgcattcccgacacggtctgggatgcgttcaacgaacgcgagcaaatcgtgacgaatgcggtaatcgacggtactgacgctcgccgtaacgccgtgctggccgagggctgcggagacctgtattcgtttgaagcggacgtcatgttcagcgagggaacgcgatccttcggtctccgcgtctaccgcgatgaggcaagcgagcgtggctatcagttcatcttcccgattggtgagcatcgctacgtattcgaaggcagcccgaacttcccgtggttcaactgtatgaatatcgggctagagcggccaatcgaactggttgccgggcgtgaatatcacattcagctcatcgtggacgacaccatcgccactctgtacgtcaatggcgtcgcactcaacgcgcgtatgtaccagcacccaggcgacgcattaagcatgttcgtcaccgacggcacgctcaccgtcacgaatgcgaccatcagtcgtggactcaaggaggtgtgagccacagtcaccaccgtatgtttgcgaaccgatacgttcgcctgtgattcatccgtacaccatatgaacgccgccgggcgcaaccggcggcgggcctccaacctacgcgcggccagcgggcacgacttgtgcaatgacgatgtccgctcccccgccctgtattgcaacaacaacgaagttatggcattccataggagggaaaccatgaagaagattatcaaagcaacggccgcaatggcagcggcaggtctgtctctggggttgatcgccgggtgcggttccggcgactccaatgcagataagggtcatgtctacttcctgagcatgaaagtagagcaggctgatcagattcgtgagcttgcagataatttcaccgcagagaccggcatcgaagtagatgtcgccacagcatcgtctgacacatacgaacagacgctgaagagcgagctcgccaaatccgaagcgccaaccgtgttcgatgtggacaacaacgacttcctcaattggaccgattactacgcagacatgtccgatacgaacatgtacaaggacctcaccaagcaggactacgccatgaagaatggcgatgaaattggcgctgtgccttacgtgatggagcggtacggcatcatctacaacaaggccttgctgcagaagtattttgatgccaactggtcaagcgtgaaggacgttgagacgatcaacaacttcgatacgctgaggaccgtggctgacgagattcaggcgcataaagatgacctcggtatcaagggcgcgtttacgtcagcgggcttcgatacgagttcgatcaagcggttcggcgatcagctcgcccacgtgccggtgtattacgagtatcgcgatcaaggtgtgacgcaacttccggccacaatctccgacacatacattccgaatttcaagaagatcttcgacctgtatatcactgattcgaccacgccggccagccagctttcgagcgccaccatggatgacgccaattcggaattcgcgcttggcgaggccgtgttcctgcagaacggcacgtggggttactcgcagatcaaggatcagaacgtacctgacgaggacatgggcgtgctgccgatttatattggcactgaaggcgaggagaaggccggcctgacagtcagcttcctgtacgttgcgatgaacaaggacgcttccgaaaaggatcagcaggcgacccgtcagttcttggactacatcctgcaaaacgatgatgcacgcaagttggtcaccgacgagatgggattcgagacaccgttcaagtcatatgcagaaaacggatacaagaccacgaatccaattcatcgcgccaacgacgcctacgcagtcaagggcaattacgatatcgtgatctatcctttgccgagcacacaatgggtgatgagtctcggcaatgcgatgctcgagtacgcacagggcaccggcgactgggatacggtcgcgtctgccttcgtggatggttgggcgtcggaatacaagaccacgcactgattcgaagcgaccggcattgaagtggtaatcgggatttagcgtcctgattatcactcgggaatacgccgcttagcatgctggtgtgctcgtgagcacgttgcttacgagcacaccagcatattccgtattggggtatgggttaccgccgctgcgcaccgtgacttgcaagtcctctcagtgacggaaattctagaggaaaatggctacgtcgagaatttacgtcactgagagcccgccagcgcacgaaattctcgcgcaatgggattattccgagaatttgcgtcgctaagaacccagagcatccgattattgcggttctttgcgctcagcagccaccagcgcaataggcagctagcgttctgcgtcagcagttcgttgacaaattcgctacccctcagccccgcttcgcgggccggctctcctgacaaggagagccggaaacgatatcaacgaactactggcgcaggacgcgccggtatccgaacagaacgtcagagcccgcgcagcagcggctcggcgatggcctggatcacggattcgggcatgtgggaatcgtcgaactcgtggccgggatagctgctcttggtgctttccagcgtatgcagcgcattgagcgcacgagcgccgtcagccttgatgagccggtaggcacgttccttggccagatagtcgatctgtgcgttgtacagcacagtgaacgcatcctcaatcgccggatcgtcggcgtaccgcagtccgttcgtcgcgtgaatcgacacggcctgcgtgaccggcgcatccgcaaccgtgacggacaggctcagcgcctcggtgtcgtacgacacatccggcacgacctcagcgccaccaaccgtcacaatcaactcgtcaacggcgaccggtgccacaccggtgaacgtcaccgtccacgtgcgctgctgcggcaccgccgccacattgccggccaccggggcaatctcgaacgcgttcaccgcaccatcggcctcccagcggaagtccatatgcgtcaccgcgagcgcggaatccgacggctgcgcctggttggtgccatcgtcctccttgaggtcgaacgcgccgttcgcgcccgggaacacggcaacctccagatagcgcggattatccacggagttgaggctgccgttgagctcctcgtccagcggctgcaacggcacgatgccgccggccttcgcgaagaccggaatgccatcgagcccacgccacgcctcgaacttgcggccttcggcagagcccgcctcgtaccgccgtccggtgaagaagtcgaaccatgtaccctgcggcagccacacgtcggttttcgccagctgcgcgttgcggtcggacggcgtcacgatcggcgcgacgatcagctcggtgccgaagcggaactcatgctccaccccgtacgcggtgacattttccggcgactgccagtacatcggctcgaccagcggacggccctcggcggcggcacgccagttcatcgtatacagatacggcagcagttcgtggcgcagacgcagcgcgtcatccatcgagcattccgtctcgggacggaagttccacggttccttgccgttaaacggcgaatcggtcgaatgcagacggttgatcgggctgaacgcgccaagctgataccagcgggcctccagctcctcgtcgcggtagccgaacatgtggccgccgatatcatgactccaccagccgtagccgatgttcgacgcagtagccgtgaagtacggctggaacttcagcgactcccacgtcacgactgtgtcgccggagaacccgaccggataacggtgcgagcccgggccggcatatcgcgagaacgtgagcggccagcgcccgtcacgggcggagtcgagataatgcatgtggttcagcatccacagcgggtcaagacccttctggcgggtcacgccgccctgctgccagtccagccaccagaaatcggtgcccagggtttcgagcccatggtgcaggtcgaagtacgcttccatgaatcgcggactggtcagatcgaactcgaccggctcgccgcccgccgggtcaatgcccatgtgttcggcgactttggcatagccgtcttcaaatgctcgaacgccgtcgcgcgggtggacgttgagcgtcgtgcgcagtccatgctcgtgcagaatgcgctggaatcgctcggggtcggggaagaattcacggttccacgtgtagccggtccatccggatccatacttcgggtcgacattgtcgaccagatgccagtccatgtcgatgacggccgtggtgaacggcaggccttcctgctcgaagcgatcgacaagctccagatactcggcttccgtgtaccggtggtagcggctccaccagttgccgagcgcgaagcgcggcagcagcggcgtcgggccggtgagcttgtagaagtcctgcacggcttcgatgtaccgatggccgtatccgaagacatacagatccttgccggggtgctcgcgcggaatgacccacataccgaatgggttggcctcgcccttgacggtggcggcttcggcgccttcgacgatcacgtttgatgcggaatcgtcgagcacggcccagccgtcgcgggagatcacgccgagccccagttcgatctcaccgtcgaccgcgtccagcgtacgcgcggtgccgcgcaggttgccgtcctgggcttcgccgtagtgccacgtattcatctgggaattcgccacgcctttgacgacgatgctcagaccttccttactgaacggctgcatgtcgtaggtgaggcgcagcgccggcgtatcgatgatgagcagcccgtcgcgctcggtcttcgtgaacttcggcgggtttgaagtgccgtccgcacggttcgcgccatccgcaccgttcgcgtcatccgacaaccaatcgcgattgacgatcatttgggtggcgtggtcttcgaacttgccgttgtcctgccattcgaggcggacgagcgattcggtgatgatgccgatgcgccaacggtcgccttggatgaccgcggccgggttcatgcccggatgggtggccagctgtggaaaggtggacattggtgtgctcctttgctcgtgttattttccacgttgttgttagtgtatccatgaaccatcgccgccgtgcgggcctcagacatcgcgatacgctccgtcatggtccttttcatgcggatatactgttaccgacggcgacacgcatcgggggcattcacgcggcgatggccgtggtgtcgcgcagcatcagctgcggggccacggtttcaaatcgcggttcggacaggggtccttccatcgcggcaagcgctttgcgcgcggcaatggcgcctaggtcattcgggcgttgccgcaatgtggtcaggcccattttgacgctgaaggggatatcgtcgaagccaattactgacaggtcacgcggcacgcgcagcccatattgcggcaaccggtacagcaccggaatcgccatttcgtcggtctggaagcagactgcggtgggcgtgggcgacatggtggtcagctgggcgagcgccgcgccggtcgtatcctcatggccggagcagcgaatctgctcaagcgtgacgtcaggatgggccgcagcggcatcgataaggccttgcagtcggttttccgcactgaagcgcagttgactggtgtcatccggcgcgccgtacacgtaggcgatgttgcgatggccgagcgaaatcaggtgttcgaaagccgtatgcatgcccagcttgtcgtcaatgcacaccgcgccgtcaagtccgatggtggacggggtgttgatgccgatgagcggcacgttcacgtctttcagacgactgacctcatccgggtcgatgtcgaacgagcagacgatgaccgcgtccacattgcgacgaaccggcagttcagtgaagaaatcatgccgttcccgcgcgttcgacaggccgtatacggagatgtcgtatccggccgggccgaatacggaattgagcccgcggaagacattggcattgaaccagacggcaatggtatcggcatgcaggagtgcgatgcggaacgattgtccggatttcaacgcggccgccgaccgggagacctggaagtcgagtttgcgtgcggcggcgaggactcggtcacgtgtcttcggcagcacaagattcggcttggcgaaggttcgtgacaccgttgacacggatacgccagcctctttcgctaccgcttgaatgctcgcttttgccatggcaacctcgctcatcaacagtggataacaatcccgctcaaaagacaacgttatcatacctaagcgagcaacatgcacgccacgctgtctatttagaagtgcaacgcccctgttcgtcggctaattcttgcagttcgtcggtgaatgccccgggcccccggattcaacttgtaagtgcaacggctggtttcgggtcggcttgttttgattgtagcttggcgatctcctcgtcccatacctcgttgggcgttttgtagccgaggagcttcatgggggtgtcgttgatctccccgacgatcgcgtcgagctcgtcctgcgtgagatcctcgaaactggttcccttgggcaggtagcggcggatcctgccgttcctgttctcgttgctgccgcgctgccaggaactgtacgggtcggcgaagtacgtgagcatgcccagcgcctcgtccaccagcatgtgcaggctcgcctccgtgccgttgtcccacgtgcggtcgacgcgcgcggccggcggcatgtccttgaagatctcgtattcggccctggccgtggcggacgcgctcttgtcgtcgacgagccgggcgaacagcctgcggctcctgcgctccacctgcgtgttcacgcagcgcctcgacggcgcggcgccgaccaccgtgtccgactcgaaatggccgaaccccttcctggatccgaccgcctcgggccggtccgcgatgggcacgcgcatcgggatgcgcggccccttcgccttcctgccctttttcctcgtccggcgtttcctgccgcgcgccaggtactggcgcaggtccagcgcccgctgcggcttggcgtagatccactggtagaggcactcgtggctgatccgcatcgacgggtcgccggcgtaccgggccttcaaccgtccctcgatcagttccgggctccaccccctgcgcagcgcgtcaagcacccaggcgcgcaacgggcccgaatccatgcgacgcggtttcctggactcgcgccgacgccggtcggcctttctctgcgcggccagcgccgaatagaacggacccgaggtccacggcccggtcttcagccgtttcggccggtaggggcggtacgacccgttctcgttggacgcgaaccacaggccgcgcctcagctcgcggctcacggtggacttgtcccggccgatcctctccgcggtccgacggatgcccggatgctgttcgcaatgcagcttctcgatcaggatcctctcctcggacgacaggtgcgaatactgttgacccatgagtgcgacaccttcttaagttagaaacttcgaacacttccaaccctagacaaggtgttgcacttctatttagaacccggggccgaacccatgaccgcgaataacaagcgcgatgactggtggaagcaagctgtcgtcttcaggtctatccgcgtagcttcaaagacgccaacggtgatggacttagcgacatcgcaggcgtcaccgagaaaatcccctatctcaagacgctcggcgtggacgccatctggctgagcccgttctacccctccgacctggcggacggcggctacgacgtcatcgactatcgcaatgtcgatccgcgtctgggaaccatggacgacttcgacgccatggttgcagccgcacacgaagctggcatcaaagtcatcgtcgatatcgtgccgaactataccgccgataagcacgtcttcttccaggaggcgctggctgcaggacccggttcgcccgaacgcgaccgctacatcttccgagacggccgcggcgagcatggcgagctgccgccgaacgactggatttccctgttcggcggcccggcgtgggaacaggtgcccgacggtcagcggtacctgcatatcttcgccaagcagccgccggacgtcaattggaacaatccggacatccacgaagagttcaagaagaccctgcgcttctggtccgatcacggcaccgacggcttccgcatcgatgtggcgcatggcctggccaaggacctggaatccacgccgcttgatcagatggacccgctggccgtgcagcatggcctctgccacgacttcacgagcccgctctgggaccgccgcgaagtgcacgacatctaccgtgaatggcgcgaggtgttcaacgagtacaacccgccttgattcgccgtcggcgaggcatgggtcgtgccggagcgccagcatctgtatgcgagcaccgacgagctcggtcaggtgttcaacttcgagttcgccgaagcgaactgggatgtggacgcgatgcgtgcggcaatcttcgtcggtctgcgctccgccgagaaggcgcacgattcgacgacgacgtgggtgatgagcaaccatgacgtgccgcgtcacgtttcgcgttacggcctgccgcgagtgccggcctcgtcgcatcaccagctcgccaaggactggctgctgcgcgacggcaccagctacttcgaagatcgcgagctcggcaccaagcgtgcgcgcgcggcgattctgatggagctcagcctgcccggttcggtgtacatctaccaaggcgaggagctcggcttgcctgaagtggcggacatcctgtgggatcgtctcgaggatccgacccccgttcttcacccgcgaacggttcatcgaaaagggtcgcgacggttgccgcgtgcctctgccgtgggtcgccgccgacgtgcctgcacccgctgaatggaacgcgggattcggcaccggagcatcgttcggattctccccggcgacgaaggccgacggctcggccagtgcggacccgcatctgccgcagccactgcggtacaaggattatgccgccgatgccgaggctgctgatgacgcgtctatgctgaacctgtatcggaccacgctggagctgcgcgctttgctactcaccgcaaccgccgatacctcggactgcgcggccatcgatgccggacacgacgtgatcgcgtactcccgccccggcacggacggacgccgtttcgccagctacaccaatttcggtgtggcggcggtgacgctgcctgccggtgaggtcgtgctcgcctccggcgatctgaccgctgacggcgctctgccgcaggacaccacggtgtggatcctgctcgactaattcttccttctcctctttcccctccgcggcttcccgggtcttcccgggaagccgctttttgtatgccttgttggacgtgtggatgtacagagaggggtgtagccgcgttgtagaggactgcgcgcgggcgggcatacgcggtggtgacgtgggcgtgaggggttgtataagccccaaatcagcccctcgtaagcgagatatgtggctcgtcagtcgaattgcggtttggcatgattctgcatgcctagagatgctagtggtctgccttataaataactgaaggaccagctttttctctccccccagtcagcttcgctgatagccccctcgtcagagggggcacataccgccgctgtctgcttcacggcaacgtcccattagaagccgatgccggcttgcatggctccccttgtcaggggggcgtcccgcggaagcgggactgaggggtagtcatttaacgaacttccgacggaggacactagagagttagggtcgcgctccagtgcgcatacgaaggggggcttcccggaacaatccgggaagccccccttcggcttgtaatcgtcagcccttgacggcgccagccatcacacccttgatgatgtacttctggcacacgaggtagaagatgataatcgggatgatggccagcacgaggcagcccatcatggcacccatatccaccgagccataaccacccttgaggtactggatggcgattgacatggtcttgaaccggcgcatgtccaacgtcaggtacggcaggaggaaatcgttccagatccacatggcctgcaggatggcgaccgagatcacggacgggcgcatgatcggcagcgtgatttggaagaaaatgcgcggcacggaggcgccgtcgatcattgcagattcctcaagttcctgcgggatgcccttgatcacgcctgtgaatatgaacacggccagaccggcgccgaagcccagatacacgatccacaggccccacggagtgttcaggccgagcatatcggcgatcttggagagggtgaacatgaccatctggaacggcacgatcatgttgaacaggaacagcaggtacagggacttcgccgtgcggttgttcacacgcacgatccaccatgcgcacatggaagtgcacagcaggatgagcagcactgcgccgaccgtgaccacaacggtccagccgaaggactcgattagattggtgcgcttgatgccgcgtgtgtagttctgcaggccgacgaacgccttgccggtcgggatggagaacgcgttgcggctgatgtatgccttctgcttgaacgagttgatcaccacgaggacgatcggaaacacccaagccagcgagatgatggtgaacagcgtggcccacagtactggatgcttgactttctcgctcatgcggacacctccttgctagtggtgagacggttctggatgatggcgattagcgccacgatgatgaagaacacgacggccttcgcctggccgacgccctcgaagccggcgcggccgtagaacgtgcggtagatgttcagagccagcagctcggagctgttggacggggcgccgttggtaagggcgaggttctgatcgaacatcttgaagccaccggtgacggtcaggaacgagcacacggtgatggacggcatcatcaacgggatcgtgatctggaacagcgtctgggtgttggttgcgccatcaaccgcggcggcttcgagcacatcgcccggaagcgcctgcaggccggcgatgtagatgatcatcatgtagccgatctgctgccagcagtacagcatgaccatgccccagaagccgtacacacccgagtaggtgattgaacgaccccagtgggccagcacgccgttgagcaacagcagccagatgtagcccaggatgatgccgccgatcaggttcggcatgaagaacaccgaacggaagatattggtgcctgcgaaccgcttggtgagcatgtatgcgatcgcgaatgcggccacgttgatcacgatggtcgtcacgatcgtgaacagcaccgtgtacaccagtgcgttccagaactccttgtcctgcacggcattgacgtagttgtcaatgccgatgaactgggcgtccgtcaccgtgctgaacttgcagaagctcaggtacaggcccatgatgaagggcaccacgaaaccaatcatgaatgctgcgaacgtaggcagggcgaacagtgcccaccacctgcgaatcgctttgccagtcatagaaatcatgccagcctactttctcctccttgagcacacccgcactactgcgtgcgagtggtccgaatttgggattgttcagtctcctcagtgctgaatagcaccaaatcgaaccggtttaaggttaccataccacgcgtatgaccgatggtcaaacgttgtcacagaaagcgtgtccatcactccttcctcgctgcctaagcacagggcaaaatgctggaaatactgatttttggcatttccgatgcagaataacacatatgataacgttgtcttatcgactgctcaacacatggtcgacgccgtccgcgtttattgttgtgtcatagacgcatctcactgcaaaggagaccggcatgggaatcaacatcaaagatgtggccaacaaggccggtgtctccgtctccacggtctcccgcgcgttcgcccgaccggagctcgtgtcgaaagcgacgcgggccaaggtgctggccatcgccgaggagctgaacttcttgatcctcccgctcggccatggtgctcaagtccggccgcgcgctgcgcgtggctttgctgatgagcgatcacattcgtctatggttcagcgcttcgatcatcgaagggctgaaccaggtgttccacgcgaacggctatgacctgtcgatcttccagatcttcagcattgaggagcgccgcgagttcttcgacatgctgccgatacggcgcaacgccgacgccgtgatcgtgccgtgacgctgcacttcagcgtgcagcagcgatacgaatcgttcgtacaggtctgcgaacaatccggtatcgacctgaccgccatcgtcatcgcggacggcgatgaccgcatcagccgggcgaccaccgaactgctttcgatggatcgcatgccgaccgccatcgcatgccaagaagacggtatcgcgattccgctcatgttccagctggcgcgcactggccttcgcgtaccgttcgacgtgtctatggtcggatacgacgacagcttctatgccaatgagatcggattgacgaccgtgcggcaggatccgatcgcgatggcgacatgcgcggcgcttaaagcccttgatctcatcgagacagggaagacggccaagccgtttgaggtctttcccgcgcagatgctggtgcggtccagcacgaccgaggcgaagggctgaggggctgacgaatcccgtcagccgctgaccagacctcgccgtaaaaacggggttccgatatggtatcgaaaccccgttcgctgacgttgcgtgatcatgggctaacagccgactggggcaacgctttcacgccggagtcggactcaggacgcgtgcgcggccgagtactccttggcccagccgtccacgaacgcggtcttgaccgcatcccagctctgggtgccctgtgcgtactcgaggagcgcgttgccgagatcattcttccactgctcggacggcatcatggtgaagttccagctgacctgcgtcttgccggacttctgatcggcgacggcggccgcaaccagcggattgtcggtcttgatgtcatcgaaggtcttgaacggggtggtgaagcccatctcggtgctcagcgcctccttgccggtgtcagaagtgatgacccacttgaggaactcggcggtggccttctggtcggcctcggaggccttggagttgatgcaccagtagttctcggagccggtggcgagtccttcgtcctgctcgtccgggtcgccgatgtagatcggcatcatgcccacctgctcggcggtcatgccggcgttctgcagattggtccatgcccaggtgccattctggtagaaggcggcctcgccgagtgcgaactcggagttcgcgtcatcgccggtcttggagctcagctgagacggctcggtggtggagtccgtgatgtacaggtcgaagatgttcttgtagttctccaggcaggtgcccttgatggtggccggctgctcgtgatgttgtcttccttgaactcgtagtagagcggcaggttggccaagtgggtcttgaagcgccagtcggagctggagtcgaagccggcggaggtgaacgcgcccttgatgccgagctcatccttgcgggcctgcatgtcgtcggcgacggccttgagcgtcttgaaggagtcgatatcgtcgatagacttggccttcgcgccggacaggccgaagtacttgttgaggatgtccttgttgtagatcaggccgtaggtctccatggcgtacggcacgccgacgaccttgtcgccgtccttgagtgcgacatccgggttctgcagctgcttgtagacctcggtgtcggacatgtccgccgtgtagtccttccagttggcgtagccgaccgggccgttgacctggaacagggtgggggcgttggacttggccatctccgacttgagctgctgctcgtaggtgttggatgccgcggtctccaccgtgacttctacgccggtttcgtcggtgtaggcctgtgccaggtccttccactgatcggcggctttcggcttgaagttcaggtagtagaccttgccgttgtctccgacctcggcgttggagttggtgtcgctgccgcacgcggccatgctgatggacatggctgccacggcgaatatcgctgctgcggatttgattgtacgattcatcttcgacccttaccctaaatgctaccggtcccatcttcgttgagtcggcgccaccggcaccgttgcttccggcgacagaatctattgtgcactgtttcccagaagaatgcaaacgagtgcaatccatctctcggcagaacggctaacctcggatagacaaagtaatcaaaaccgcacatttttaccactgttgtcgccgttttacagactgcaatcgattgcaataaacgtttgcaactgtgtcattcttcgcgcgcgattacgtcactccctgcgtgtcgcgggcattattcctctccgaggcggcccagtggtttgtttcgctaatgattgaggatttcggttttgtgtctctcccccagtcagctacgctgccagcccgtcccgcaagtatggacgcgctccgcgcggcagcctgctagctcgcttgtcggctcgcatgttgtctacagacagctcttcacggcaacgtcccatcagagggggcaacgtaccgccactgtctgcttcacggcaacggtccgtcaaaggaggcaatgccgctcagacgaatacaagacagaccactagttcgcttcgtgaatcctctgcgctgcttcggcgtccttcgcaccaacgcaatgaggcgggcgaagagcatggaatctgctcctcgcccgcctcgtctcattgcgctcgtcaccgcggccagcggtacacacgatccggcagcgtggggaatgcggcatgcggctcacgctgataccagtacgcgatcgatgccacgtcgtcctgccgctcgaagaagccgcgatggcccacgccgatctgctgcacggtcacgcgcagatcggagcggaaacggatcggatcggggatgtgccagcgatagaagccgcgcatcggcgggcagtcgtcgttgtgataatcgttgtgcaccagttcatcgtgcgcggagtaatacggataccccatgtaaggcgtgcagtagttctgctccacggtcttcccgttcacctgcttggcgaagctccacgagccgccgaagtagtcctcggtaccggtgccgcagatcgtcgggtattcgcggttgccgtcgatatagaacttgaactcgccttcgccccaccagtaccgttcgagcgtggtcagcgccagataggtacccacatactgccccgagccgcgtacgccatcgagcaccacataatcattgcccagctcggtcagccgctggcgacgccactgcgcatggaagtaggcggtatcgggtggcagtggatcgtcgtacaggctgtagtcgatctgatagaagaacgcgccgattgtgttcacatgctgattctcgagcgttatccgcgcgtgcctagcgaacggcatcgggaagaacatgttgaacccgcggttgggcaccacggccaccggttcggagttgacgaggcatgcgcggccgaatccgcagcagaagaaatcgccgagcgggcactccacgctcggctcgctttcgtcatcccagtagaaccgcagcaccagatcacgcagcacgaaacagtcggcgtccgtggtcttttcgtcgacggtgatccagatatgacggatgcagccggggccgtcgatgtcggccaatgtgaccgtttcgccactgggaatgttgcgcaggcaggggctgcccttgcgcgacgggcccagttcgctggcggcgatgccgccgcggccgggctccccggtcggattctccgcgttgatcgcacggctggactcacgtcgtagggtcatcaatgaaccaaggtcggcaatcatcatcaatctattccttccattacacgaaccattacgcgaacggttccggtgccgcacatgacgcacgacgccggaaccgtcctatgttgcggcagtcgccgcgatgccactgcttcgtctatgacaatgacaatggcggtcgccgcacctgctgcctaagtgctcgaatcatgcgcgcatcacttgtgcaccggcggcagcatgccgaagttggactcgtagtcgttccaggcgctggtccaatcgtcgagatacgccttcttgacgccgttccagtcgccagtgccctgcgcgtactcgagcagtgcgttggccacgccgtcggcccatgcctgaccgggaatgtaggcgccgtggatcggcgtcagaccgtcggattccagcttgagtgcggacttggtgagcgggttgtccggctggaagtcttcgctgtcgaacgtggtgaacggcacggcgaagcccatgtccttggcgaggatcttcttggcgtcgtcgttggtgaccatccacttgatgaagtcgagcgtcgccttcttgtccttctcggatgcgttcttgttcacggaccaggagatgtcgtagatggagttcgccgcatacttgctttcgttcgggaagcccatgtagtacggcagcatggcgaggtcctcgtcggccacgtcgttgtccttgatctgcgagtaggcccacacgccgttcgggtagaacgccacgcgaccggtggagaactcggcggtggaatcctcgtagttgaccgagccgagcatggtgttctcggtcgggttgtccttcatctcgagatcccacagggccttgtagttgtcgaggtaggtgcccttgagctccttctcgaagtccacgccctcatcgatgtactcgtaggcgaccgggacctgggtcatgtgcgacgcgtaacggtagtagttggaggcgtcgaggccgggggtggagaaagcgccgtcgaggccgaggtcgtccttgtgctgctggatgctgtcggcgaccttcttgagcgtggcgaaatccttgatgtcatcgaaggacttgatgaccgagtagctcttcttggcgtactcgttgatgatcttcttgttggcgatgatgccgaaccattcggcggcgtacggcaggccgtacacgtcgtcgccgtccttgtgggccatctgcttgccctgctcgttgagcagcttgtaggcttcggagtcctgcagcggctcgaggtaattcttgtacttggcgtactggtcgaagccgccgatgccgaacatggtcggggcgttgttcttggccagctcggacgacagcgtggattcgtagctgccggaagtggcggactggatgtcgacctgcacgccggtttccttggtgtacatgtcggcgagttcgttccactggtcgacgacttccggcttgttgttcaggaagtagacatggcctgcgtcgctgttcgtgcttgagccgcatgcggccagtcccagcgtcaacgctgcggcgctgatcaggacaattcctttggacagcttattcatggatttcctttcttcatctgcggccacggagccgcctcgcacttgttgttgtacggggtgccggactgcatacgtcgccgttggtgcagccggttttgctgtagcgcatttcgttatgcgttggagtggattattggtctggctcaggtgttgcctcgttgcgtaagcatacagtcgaaccggtttgatttataggatatcgaaccggttcgctatcgtcaatcgggcgtgttccagcgtgtcgctacgtagccgggggtgagtcacggaagggatggtgcggcggcagtggtggcgcgcggaatcagcgtggctctcaccgtggtgaccgtttcgctcaactgctcgcctcgcatgagggcgagcagttgttgcgcggccagtcgcgccatgtgctgcgggtcctgatgcaacgtggtcagtccggcgactacggcggtcggatggtcgtcgaatccgatgatcgacaggtcttcggggatgcgtatgccaagctgccgcagatgccgcatgatggcgaccgccgcttcgtcggtttcgacgcagatcgcggtcggccgatgctcgctgctggcgatccggccggctatggcagccatggcctcatcttcgctcatggcgtccatgtcgctggatgatgcgaacgcgaccggttcggcgtcgggaatgcattcgcgcatcgcgtcgaggaagaaatccttgcgcagatacgagctggcggggaacggtgccggtttcggatgtgcgacgtatccgatgcggcgatggccgagttggcgcaggaatcgtacggcgtcgttcatggcacgcttgttgtcgagcatcacggatgcgggcaggcgggaagcgctccgtgcgtcgagggcgaccgcggggatatgcatgctggaaagcaacgccgattcgctgtcgtccagcgagaatgacgggaggatgaacccatccatattgcgtccgttgctgggcaggtcggcgaagaatccatgcagttgctccaggtcgcagacccgtacgggcacaagatcgtagccgtggggttccagcgtttcgagtgcgccttcgatgcagctcgcgttgaaccatgacgcaatcgtgcagccgaacagcatgacgacgcgcatggttttgccggatgccagcgatgatgcgctgcgggacagcgtgaaatcgaggcgacgggcggcgtccagcacgagttgccgggtggacggccggacgctattcatgccgcgcaatgcgcgcgataccgtggcgtcggagactcctgtggctatggccacgtcgtggattgtcgccatgatgtctcctttcgctgtgtggtgggcggtgtcagatactgtagccgtgctggtgccgccgcaatcgctgcgacgtacgcccatgcacattaatagcatatatgtatgcgcttacattcttttgtaccacgatgtgcgcgttgttagcggtcacggtttgattgtgtttgcaatggtttaccaatgttctgtattgtgtgcatgtgatgtgatgcgcaatctgcaggcggcggttgacggtgtgcaatgtaagcgctatcattttgttgtgtcaatcaatgcatggttgatgcagccggcatccgatccggcagggcgaccgcaaggtcgtacacggatatgtgcatggaggcacgtatcacatgagcaaggagagccattacagggaggtaatgatgacaggaagaacgtggaacaccatcgccaaggcaatcggcttggtatcagtggcggcgctcagcttcggggcgctggctgcatgcgggaacacgaccgcggtcgacagcagcaaagggcgtgtgtactacctgaacaagaaggcggaagagcaggagaaatgggaggccctggcgcaggcgttccaggacgagaccggcatcgagacccagattcagctttcggccaccgactacgaccagacgctgcgttccgaaatggccaaggacgaggcgccgaccatgttccaggccgacggcccgagcttcatgtacagctggctcgattatgccgccgatatgagcgactccaagatctacggcgagctgactgacagctacaaggaccgcacgctcaagaacgccgacggcaagccggtcggcatcccgtacgcggtggaaagctacggcatcatctacaacaagtcgctgctcaagaagtatttcgatgcatcgtggtcatcggtcaagtccatcgacggtctcaacaacttcaaggcgctcaagaccgtcgccgatgagatccaggaacacaaggacgacatgggcgtcaagggcgcgttcacttcggccggcatggattcctcggcgttccgatacaacttccatctgccttctctcccgctgttctacgagtaccgtgatgacggcgtcgatatgaactccgtgccggaatccgtcaagggcacgtatgtcgactacatgcagaatatctacgatctgtacatcaccgatgcaacggtgccggccagttcgctttcaggcaagaccatggatgatgccacttcggagttcgcgctcggcgaggcggtgttcttccaggacggcgtatggatttactccgcattgcaggatcagggattcccggatgaggacctcggcgtgctgccgatctacatgggcgtcgacggcgaggagaagcagggcctcaaccaggtgatctccaactactggtgcgtcaattccaagtcttcccagaaggatcaggaagcgacccagcagttcctggagtggctcgtcacttctgatgccgcacgtgaatccatctcgcaggacatgggtctggtcacgccgttcaagaccttcgacgaggaggcatacaccgtcaagaacccgctggtcgaagccaaccgcgagtaccaggagaacggctactacgacgtcatcagcgtctccaccgtgtcccaccagtgggaaaaggatctcggctccgcggagctcaactacgcccaggggcagggggactgggatgcggtgaagaaggtcttcaccgatgactgggccaaggaatacaagctcgccttcgccaagtaagcgaagtaatcgacaggcgatccgaggggtcgcagcgtgaggggcgtccgttgccatagtgctggacgtccctcacgcgttgttgtgttgttgcgaactggctcagcgcggcccgctggacagcatgtggccttccgacttcgcacgcaacgtcccagcgaagccgaatgaccatacactggcctgcccgcgtcgcatgtgcggcaattacgttttccaaccatggaagacggtatttcatgcacttttccaaccgtgcacgtgcggagacggctgagacggttggcgcagagacagctgaggggagcctccatacggaagactcccctcatagagacgctactgcaagtcagcggtcatgcagccggtattggccggctgcgaggcgtcatgcaaggtggctacgcatgaaccactggaatttctcgagctgctggacgtgatcctggatgacgttggagctgatcacatccagctcgtccagctcggcgatggccttgcggtcgtcggcgatgaaggcgtcgtagtactcgatcagcgccttgagatacgcctcggtgccggcgcggccttcgacgtcgaacggcttccgcgtgcggttgcgcatgattgcgtcggtacggccgtccggcgtgccgcccagcgtggcgatacgctcggcggtctcatccgcctgagccagcacggattcgacctcaggatcgagcatcttgtgcacggcgatgaagttcggtccggtcacattccagtgtgtatgcttcaggaccagcgcggcctcctgctcctagctcagtcggttctgcagaatcgcgatggccttctcgctggtcgcctcatcgagtcccggcgcaactgattattgggaggtttgagcaccggatgttattccgattcggcactggggttattgtgggatggcaccggcgtgcttggtattgggcactgccggtgccgttcctgtttgcgagactggttggcggctaccggccgggtgcgtgttccctcatgttgtagtcgccggtttctatccaggtggtgttgtgcacgatccggtccatgatggcgtcggcgtgggtgccgcctccgagtcgttggtgccagtccttttgggggtattgggtggcgaacagggtgctgccggtgtcgtgtcggcgttccatgagctcgaacaggaagccgcggaagcgttcctcgggcgggtcgaacagccattcgaccgggcgcgaggaccgtgtacgcgctgtagcgtttgagcagtctggaccgtccttggggcttgtcggcggcctgacgccattcctcctcgaggtcggggacgcggatgtagcgggaacggtaccggttgcggcacgcctgacgcgccagggcgcagacgatccagctcttgccggacccgcagtagccctgggcgacgatgttgcggtgtcgcgtgacccatgagcagtctgagagcgaggcgatcagttcgcggctgatgccgcgttcgtcgagcaggtcgagggtgcgcaggtcggcctgcgggtagcgcagcctcgcccttctggccagtccgccgatgcgtttgtccgtgaacgcggcgtgcgcctcgtcgaccgcgagttttatacgttgttccgcgttcaggggcgcgcatgcgtcgtcgtcctgatgcaggagcgcgtcgagaagctcctggcatcccatgtcgcgcagctggtggcgggtttttgttcgtcgagcctcatcgcttcgtctccctcgcgttgtagtcggcgccgcgcacgtatcccgcgggcggttcgacgtcgagacccttgactttcgggtcctcgccttccatgacctcgtggtcctggccggtgtcgaggatcgtcttcaattgccggtggcggggcgtgttcacgaccctgcgggccacgtcgcacgcgttctccagtcgttgccgcccgtagcggcgcgacagcctcagcaccgccagagcggggtcgatggcctggtccggcctggcatatgattcgaagatgcgggatatgacgatgaccgcgttcgggccgacgcccgacgcccatgccctgacccggggctcgtcccattcccgccagttcgcctttttcggcaggtccacgtcgcgcgtggaggaacggttcgactgaacggcatcgaacagccgatgcacggcgacccgctggccatcgtgccagatctcgagcgtgcgggcggtctcgcgaagctcgacccgggtgccgatcagccggtggggtacggaataccggttccgcctgtaaacgatatggcagtcgttggcgactttcctcgtgccggcccaatcgccggtctcgtacggcatgacgggcagcgggatcatcatgggtcgctcctcggactcgaacaccgccaggcggctgccctcgcgtttctggaaaggcgcggcgttgtacgcgtcgagccagtcgcggatcgcccggttcagttcgtcgagcgaatggaattcccggtcgcgcatcgcgccgacgacggcccgttcggcgtgcaggacgaggttctcgccgctgggcttgtccttcggccgtttcaccctgcccggcagcaccgccgtggaatagtgttcggcgaggttgcggtaatggtcgtccggcacgatctcgccatcgcggggatggctcacgacaccggtcttgaggttgtcgcacacgatcctgaccggcaccgcgccgaaatagtcgaacatgcacacatggcagtccagccacgaggattcgcgcatgtcgccggtcgcgcgcacgaacgagtaacggctgaacggcaggcacccgacgaacaggtacgccttcgacgtctctccggtgaccgtgtcatggatcggcatggtcgccccggcccagtcgacctcgaccgtacgcccggccttgcgctccaccctcgaggtgacgcccagacgcagcacgtaatcggcgtacagcttgcagaaccggtcgtagcccatgaacggaaccccttcacccggcacgagtccgcgtactccgcgtgcagcagcttcaacgtgacgcccacgcgccccaattcgctgtgcacgcgcgcccagtcgggctgctcgtaggcgctctcgatcacacccctgccgggaaacagcagggcgtacacctcgtcatcggttttgtcctccacaccatcgtaggagacgttaagccggtcggcggcgtcgaacacgtcgatcacgctatgcttcgacataccgtagcccacggctatcgcgttgcgcgacaatccttgctcacgaagcctgagcacgagcttcgccttgattctgcgtaccatcgttggcactcctttcgccatgcgtccatcacatggtgaaaggagactaacccaaacggcgccgaaccacaataactttggtgctaaaccacaatgatcccgtgaaacggcaatggtgccgaactggaataaccaacgtgctcagcaagtcaaatattcagcaacaaatgcaagtgtcatgatgttccttcctttcatcttcaaggaacgtccctcccagtctacgcgcccttgtccgacggctgaccgcgctgtggaaggccgccaactggtcatcgggtctttgatcgggaagatggcgcgtttggcgtgtcgccaatgatgtcgcgccttattggcatttgtgctcggttgagagctgttgcgcaaactgcacccaccggtaaaggaaaggggattctgcagttcattcatgttctgtggaatcgttggaaaacgagattcacaggcagaatgacatgtacaggggcaggaagcggcgtatgccatcctgactcatctggcgggggtgcagcacgtattcttcgccggctcgttgtgtgaatttcgcgtggaacttgtctagggacaccgtggaatagcgtttgccggatttgacctctacagggctgactctgggtttcatggctgcgtccgggtaaggtcggatgatcaggaagtcaatctccatgcgctcctcgcggatgctcgaggattttgagtagaaatacaggtcgtgcccggatgcggtgagctgctgagcgacggcgttttccgcgagcatgccctcgttcacgccgtccgctcccagcaacacttgccggtacacttctggcaaggcggagcccgaggcggagaatgccatggtagacaacagtccggtgtcagccatgtagcatttcactgttgcgtcgtcggcgctgagcgccagaccaattgacgggtcctcggcgagggtgcataggttgaccgtcgccgcttcgcgcatccaagagaaggccgtcatgaaatcacgcgatctcgagccgttctcgacttgcgtgtacaccaagcgcttctcgtgcttcgacagctgaccgggaattgcgtcgaacactgctcggattcgtttagccgccgtgccgccgtatttctcgatatcctcgcggtagatcttgaggaccatgcgcttggccctgtcggcggccgccatgtccctattcggggcgtaggccgtgaccgactgtggcatgcctcccaccagcacgtattcgcgccataggcgcgacgccttgcggtgcagcgagtccggcaaggggctccccgatgcaaacgagttcgtgatcatctgagccagcgcctcttcgcccatggcccacagaaactcctcgaaatccagaggacccattttcatggactcttcctcggagggaatcagtatgcccttcacgttttcgttaagggagattagggatcccgtctcgatgaagtcgtaccggccgtcggcgaccaagtgcttgatgaactcgcgggctggcgggaacagctgcacttcgtcgaagatgactagggacttacgttcggtcagggtcacgcccaacatggcgcttaggtacaggaagaaggagtcaaggtccccccttgtgtcgagcagcgttcgacgaaactcgtctcccaccttggtgaagtccacgagagcgtacgaattgtattcgttgcgcgcgaactcctcggcaatggtggatttgcccacgcggcgggccccctcgatcaacatggcggtgtgacctccgcttgaccgcttccattcgactagcttgtcgtaagccttgcgccgaaacatggctcctcccttatgattgcacgtttctaagggttaagtatagtacaagattgcacgtttctaaggtttcgcacggtgggtgaattgcacgtttctaagggttaacgaaatttctgttgggaacacttcgctggccggccccttttgttggagagccgtaatcaacgaattaatgacgcgggatactgggaagaagcctaggcggcatcggaacccgtcacagtatccggctgcgaggatgcatcggtggcgccggctttgcggacttcgatggtttcgatgcggcggccatccaccttggtgatgaccatgttgtagccgtcgtcggaatgcagcacgtcgcccaccgcacccatcttgccggtcttggacaggaagtagccggcgaccgtctcgtacgggccgtcctccaattcgatgccggtcagatcggcgaagtcctcaatggtcatgctggcctcgatcgtggccacaccattgacgaacgcggtg
